United States Patent Application Publication US 2014/0230087 A1 - sequence listing, part 11

SEQ ID NO: 7928 - DNA, 2060 bp, Cucumis sativus
  Intron number 7 from transcript Cucsa.133670.2 (locus Cucs a.133670) derived from phytozome v7.0 (chr-ID scaffold0103 7; pos 1336658 to 1338717)
aagctcaagaaaaatttcttcaacaacagattgaggtatgttatcaacgttacctagtgagctgttttgcttggttagtgcatgttttatttagtctcttgttgccgggcccttgtataatcttcagctctgcttttgaaggaaaaaagaaaaaaaaaacgtgaacagtagttgactagtatgcacacatggccttgaccatggggaaataatactcctgaatcaatatcatttctcataccctttttttttaaaaaaatcatttctcatacccttttcttaaaaaaaaatcatttctcatacttaggtgatgtttatgatgaactcaaatgatcagaataacatgtcttgattctctcgttgtcctggattgaccaaaccgctgtttggttttcctatttgtgctgtatcctggacctcctgtgtcaacaacaagagactgctttgatgtttgcggttcaaaattggagtacaaaaataactgggccgaccaagatgaggtacccttaacagttaaaaagaaaaaacaccattagcagccctagttgtttgtgatcaagagattaggaccattacaagagggttcgaagtaagctctccagagagagttataaaatgtgtcaaatctcagaccttcctttgaaaccaatttatttctaagaaaaacttcctgtgtattcgcaacaactatccttagaatggcaacaaattctactttctttaataattagtctctatgttggaaattgggttcaagaaagcttttccaccattatgtgaatagttgaaggaactctcaaaatgccaaagtgcgcttggctcagtggcgtacctggaggttagaagtttaatgccccgtaccgtagttgtgctaaaagaaaaaatcttctgaggcagacttacacacagattctttggataaagaactaggttttaatcttccaaaggaagtatgtcttttgaggattttcaaaatcctagtttttttagaaaagaggatacggggaggaaagaaaggaataaattatgcagaagacttttcgatggaaacaccataagaatgaagggatcacaatcaatgattgggagcccaaacataacttttactctttggatagaagagaatatcagtggaaggaggctacttattgacttctctattgcaaagggctttatgaaaatgaaaataagaggaaagagacccacttctagagttctagctaacgaactatttggaaatctttgactagggataagaaataccgatgcaaaaattgcacccagagggtactatttggaagccaatcatcttccttcaatcaaactatgcaacaatccctcacaattacttacacataagatagaaagcgaagatgtgtagatcaaaggaggaggccttttatattctccttaacatctccttaacagcccttggacttgtgcattataataagtcatgcaggatctccttgaaaactacctaaatcagtgcgtcgactctttgatgtaagccatgtggattgagttcaggaaatacttaacgtcttggagagaagcctattcttttaagcccttggatatttatcctccatagattgcacacaacttctcctcaccggcccttgggaatttcatggaaattcgtatggactcggttcaaaaagatacttttttgtatctctccaagtccttggagttgtatatgctttgtagatcccttccaatttttcaattaaaggttgagttgaggagatgcttgtagttttgatggaagaaataaatatataaacttgattttagatttttgttcaaaaagggttaaagttcttccaaacaactctatattttctagaaactagaggttagaaatgataagttaaggaggcatcttcataataaattaatttgtactcgattcaatttcaaactaatttcagtagaacagagctaggcgtagttgagggtttttacgaaatcaatacctttttccttctattaaattcaaaatttcgtatttgccaacagttccttcagaatcaactgcaacttctccgtaaacc

SEQ ID NO: 7929 - DNA, 1996 bp, Cucumis sativus
  Intron number 1 from transcript Cucsa.328140.1 (locus Cucs a.328140) derived from phytozome v7.0 (chr-ID scaffold0315 9; pos 512729 to 514724)
accccaaccctgccgtcgagtgtcgcattgatccggtgaggactttgtgtttcactgttaatgtatttgatgtataatgtgttttatttacagtgttattcgaatttacaggagccctctgttagttctggcattgcgtcaattgtttaacacttcagttcaatagtttatttattggaattttattagggagaaagcgtgggttcaactttaagtaaccaaacaatatggggattgatgctttgagcaagattcttgaagtgttcctgactacttatttaatactttaaatgggccgtggttagaactttaatgggattatttgttttcatggaaatggaaaagaacagtgtaaaactcgatttggtctactacgtatttcaagcattttgatgcactgactagaaagtgttaatggtctgagactgatgcaaaaagccttgaacaatatagatctgttttgaagaaagagttgctcatgattgtctttttcatggcttcaggttttttaattatctatgcatatttttaaattttctacacatattatatttttacaaacgtttacgtgtaaatataaatataatttggtcatgctataatatatgtgagagcagtcttcttcccaccaataatatatgtgagagctcttgagcgtgctcgaccacaggaatgagatgtctattcacttgatttacaaatcatatatgtggatttcagttctatgggctatttgttagggttattcaaaccttggttttagtaaggttcacgagaaaggttttgctgtttgttacaagccacagtgttgcatctttgatatcctcatggctcacctgctataactgattattaaagaaggttgcatgatttggttcagaaaaagaaggttgcaacttggatgatgagcttttttgtaaattgcatttattacttcaggaaactataggttagaacgtcttaggtgtctgacatggttaattttgaagcataaacaccttagtttgtatagtgtttcactataaaacctttgtagatatctgttgcacattcaaaatagggtgctagtttttgtataaatgcatatgttacataccttatttgattgaaagcaaatgctttagaaaaatgatccatcttggagtgtggaggggctgataaatttcgtgtgagaagattgaataatttttttcgtagttcattctttagtttttattcctggacttcacaaaaaatgttgggtgaaaggaataaactaatgaatttcaatctagtgacatcattctttcaattaggagcattgctcaagcaactaatgaatttcactctagtgacatcattctttcaattaggagcattgctcaagcattttgatatggaatcttacattctcattggattttaaatcactgagagtgagagatatatgtaatatgtttaagactacatacacttttattacaagatgttgcactgttacaaacatcaaacatgtgactgatttgttgaagttcttgcagttattgcgtaccaactatttttccattcatattgtatttaaaatacagattttatactcaaaggcaaattctggagcatgaaaatcattgatatgggttaaaatatacttgaccacaatatatatgttaaatcctgtcattggtgttctcatttcattaatgtatttttctttagaaaatgcctcaatcctcataggcatgtatttgttcaataatgtatttctctccattatatttatataagaaagtggtttgttggtctgtccatatctttatatgttttgtgcaatttcattctgtttacttcatgttgtctttatgttttgtttatgtcatatttgttcctttttgatgtccaatggtgtttttaccaatgaggacttaggggtcggtttttaacgtaatggaagagaaaatgattataactcatgaagtacttgccattttgttttgccattaggggcaaccaattgaag

SEQ ID NO: 7930 - DNA, 1045 bp, Cucumis sativus
  Intron number 2 from transcript Cucsa.261660.1 (locus Cucs a.261660) derived from phytozome v7.0 (chr-ID scaffold0226 5; pos 68088 to 69132)
cgaaaaagattcagggtcagctgtggacaataaaggtaatttctttttgttctcctatcaattcttaatagtgtgtgaaatttgttttgggctagattataagtttaatctatggactgtctgattctggactttgaatgtttaggacattttagacatttcttaaaaagtttaatgatctataggaaacaagctttggaattgctgggaccaaacttcttattttatcttggtttgtttaaattgtactttcacattttttctaacatatataaacttttaactttttttattctgctgctttcatgatactagttattttggtttgtcaaggattgatattttccatttttagtatagtatggcagtatgactttgagtgtaatacatgacctcgttaaaataacgaaatgcaattgtttcctcatcttattatcatctaataattcatggaataaatagtattacggatttggtgttaactgtttaaggcattccgtgcagtgcattgatcaagaaaattaaacagaaagggattaatacgttgattgtatgatcggtttgtttgtcttttgggttacactataaactgttctccatttataagattttaatgaattgattttattgtatgaaatgcttaatttttttatgggttataactacaagtattttttggatgaaaattaaatttcaaactaggagcctaggaggggttgataacattatcaaattggaaaatttagcggttttcttgaacccctaataaaatccttgtttcattgcaatatcaacttgatatgcttggaggctataagcttcgggaagtcctatcttggtaatgaaaatgaccatgttttcgttcacttttgatagtagttctttattcttttaccagcatgtataaactataatgtgcatgtttcttgtcatttctatttcacttgtagagatttgaattacttcataggtaaatattcatcaacgaagaagaaattaagactatatctcaattttgaaaaacttgcttgttgactagatactc

SEQ ID NO: 7931 - DNA, 4225 bp, Cucumis sativus
  Intron number 8 from transcript Cucsa.355910.2 (locus Cucs a.355910) derived from phytozome v7.0 (chr-ID scaffold0357 7; pos 537845 to 542069 reverse strand)
cattagttaccttgctttttgagtgcacagaagctgtaagtatttgattccaaccacaacatgcaacttttggatgtattaattgattattttccttttctatgagttccaatgtttcttttagactgtcttgtttgggccaagttttcttaatgtagcctaaagagataaaaggagaatctctaaaagaatccgatcaagtctttattattactgaaatattgtcttttactagcggggggattctctatttttaaataaataaatgcaagaaagaatcttaaaaggataactaaaaggaaactaatttctaaaataggaaaaaaagaatcaatcaaggtttaaaccaagttattcctaaatcccattgcatcacattctatccctcctaaaaaaaatttgtcgccgagttgtttattatggatgagccaacttgttgcaaggatgcttctttcaatgattgcagaaaactcccacgggaaatttctttttaaggtgatgaacgtgcccaaaagctccaaaattagtgtcatgtccaaagatattgaaaattggcacaaaagaacttggaaatcgatatcctcttccttgaaaattggcacaagtcttgatttcgaagtggtttcacagacttcaaatttcttcaaattaggtacatggtgatagaccccgtatcatacaccagtacagcagaaggaataaaagaagaacatgagagtagcacgtgcgtaatgaagtcagtttgttagtgtttgtggtaaagagtgttatttctgtagtataaatacttcttgtttataggagggaaagttagttagaaatttggaaaagaatagagtcctttgtacacctttgagagatagggttacagagaaagaggagggttaggaattgagattcatctcaattcggatattcttacgttttagcacattgattgtcaagcaataaagtctactgattgaattcaaggttgagtcccaacacatgggtatctttttcttcggtctctacaactcctttgtctttaacatctccatctatgatttccagtgttcgatcgaggttctgattgtgcaacctccgtgtcaattgcatcaaaatttttgttcttccatggaaaggttttccacatgtcttaacttctttttttgacttatcttcaactgatttttcttctttgcctaccgggtccgtcacacttgagtttcatatcataacctgtttgctttcaattccttcatatacaagtctcgaatctcttagtctttcttttttgtttgtttctagtatacttccacaccttctttggttgaattctttatccttatgagcgcttaagtaaatgtaattcacagcaactgtcaatttttctgattcagtgaggttataaatcttaaaaaaacgatcggtcaacaccattggaaaccggcatttctacctttttgaatttactcctgtcagtcattttttcttcctcatgagccttgctcgttttcgactcttcattggatgttgctccactgaactatatcaagcattgaaacgacaccttgttcccccttactttcattggatgttgctccactgtactgacctgtcagtttccttcatcatcgtggattcctccctcattatgccttcagtgtatttcattaagagttactgctgttgttgctgcttttcgacctgcattccaatcttctcaatatttgatgcaactgaagataacttttcctcaataactggcaatttctggacttcttctcacattccagaaatctcatgctccacggattcaaactgctcgtccactttcttagccattcttccctgttttcccgggttttagtgctctgataccaatatgatagaacactgatattgtgtctattatattggcatgaattgaaaattacaaaactctaattacagagttaaaaaaaaaaaactaaaacaagaaaacacgaagtacacagtttctatgagatttacagcctatccaataaaataccaagctacaatatcaaatgtaaacaacaagaacttacacagaatcagtaacctctgccctccaccctccaccctccaccctcggatttagcagcccactcctcactaacattctccacccttcctccttctaacttccttcctcccttttatatcatgttttcctgtaacttctccttctaactttctgtaactaactctaggtcccaccagaaaattatccctttcttcctcaatttcataactgtcctcatatatatttcttcccttatttctcctgctttcctcacatatatttttacccttatttctcctgctataagtaaattttttaggaggcctaacagtttctttgaaaatcttgaaaattatgattctgcctttcttgaatttttcgcaaaagacctcaagtttcatccattttctttctaaagtcctgattgtgaattttctcttattaaataaatcagcatacataaaaaccttttacataggtgaataaatagagacaaagaaaccaataaaggaaaaatacataaaaggaaaataattattagcaataagcctaatttagttataaaccttaatttccttttaattactgatacatcttactgtaagattattaagtgttcccactgagctgtaagacaattaagttccactaaattactattagataattaagtttttccattattctcatatctttttagatctttgagcaactttccttttttttttaagttgtaaattgggcatcattggggcactccatggttcaacccaccccgacccaaacatccttgtttgagtcaaatacattttttctctgtaatatcatattcccttctttcttattattacctaaattcccaagaagtacttcaacatgcctaaatcttttatgtggaattgactatggagaaagcttttagggattggattcccaagtcactatacacttctttcttttcaaaaagttagtcatattacttgctgttcttcgttctaaacttgatcaagtttctcaagccaagctcgtggactctgcttgaaaagacgacataacctttccatactccccttaagcaacaaacatttggggatgctctatataaacgcatttataatatcaagctgatgcaaatgttagtgatggattgatgctaatgaaataaatagcttgacagagggcattttagcatttggaggaatatatcatcaacatagtcaactccgtaagtttgtgcatagcttttagcatctagatgaacttctgattcaactagaaatccattaagattgacttgtaggtttctttccaacgagaagattaactaaatcccaagtgcaatggtcatttgagactttcatctccgctaccatcactacacaccaaccagtatgagatagagcttcatgaacaattttaaaatagatacagacattaaggatgcaatgaaagaacatgtagaagatgaaaaatagtcatacgaaataaaagaaataaaaaatgagtgcatgcgaccatatcatcaacttataaccatcaacataaggctgagagtttgtgatgaaacttatcaaccctccaatcaaacattagggatgatatggttatacgttgatgatgtgtgctactcaaccctcaatcatatggtttaaacttgaaattaggctatcaatatcaacctaaacctggatgtaaaaagttacaaattttacaaggaaataatctaaagttctcagtttacagctgaacgttttagcttgattttctaccacaagcatgtcttgtctttttgtctgatttttttttccattttattgactaaatttctatttctgttttttttttataatatatatgtacttaactaaaaaaaagactatcatagacctcccatgagtatgctgaaaatcctttgctttacgttcgtagataataattttgtggtagtggtttgactacaattctttttcttctttccagcccaagttgtttcttttcattgcagcatattttttccttacatagcagattttacccttagtttgtgaggttaatctgatcttggacaaaaaagagcaggggcgtagtttaaatttcttgttccaactgagttggtattgttttgcctatgcactttttaagaattcatattttcttgcagcctttttgcacaaggagccaactatttacaaaggt

SEQ ID NO: 7932 - DNA, 447 bp, Cucumis sativus
  Intron number 7 from transcript Cucsa.232350.1 (locus Cucs a.232350) derived from phytozome v7.0 (chr-ID scaffold0198 9; pos 345816 to 346262 reverse strand)
gtgaggtatcaagtcaatggctgatttaaaaaaatctacaaatttgaattgattaaggaaataacttaacctaggaagcatgtgctgctatgcccaccaatagaagaaaaagaatgtaatttacgtactttcattgaactttaaatggatttattctctagattttaagtagtttaatgtgaactatcgatcacactttttacttagtcgtgaatagaaggctaatgtaaattaaatacctgttagtttgcctgctcgttttttaagtagcaccagttcagccaaaatctgcctgatgaacatgccatgccatatttctaactcaaatacaatacgactaaaatatttgttttgtggtccagtgattaatgccattggattcgaactgttcaacactgttaaacttttacttaatgtcgacttctttaaattacttgggagtatagg

SEQ ID NO: 7933 - DNA, 4016 bp, Cucumis sativus
  Intron number 4 from transcript Cucsa.364950.1 (locus Cucs a.364950) derived from phytozome v7.0 (chr-ID scaffold0361 1; pos 2434267 to 2438282 reverse strand)
acactgaaaagctgctttctcttctccacgaacaggtacaggctagctgttatttgatgaaacatgcacctgattatttcttaatcttttagaattacctttgtagatatgacatttcttttagtaattgtgccaattcataatattgttttaaatactcccttgggccctacttttttccttaaagcgatcaattacttttttttccaatggaaacaactttttttttcttgagaaaaaatgaaaggatacaagggttaaagcgataaattgttaaaattttaatggttgaatatggcaactctgaaacaaaggtttttatgtagttaatgttgcaacaaccttttctttccctgtttggggtgcccattattgtcaataagacttgggagaagtttaggagggatttcttatgtgaaggggctgatgatggaaggaatctcctctactaaggcagcgagtggtggccaagccattggattttgggggattagccataggtgatttgtacgtgttctctcttcctttgtgaatagtttgtagatctgattgccaatgccttcctaacaagatatgacaagcttccatatcgagaatgttacatacaatatgatctttgtagaaattaccaattgagagagagatggtgcaaatggaacttatctaagcttcaccacccttcttaatccatccaatcttttatggttgagaatgcagatttttttttaagatcaagtgctttcacaagtttaaagtcaccatgttctcactgcttccattatcgaacatgttgattatttcctttcttttattatattttattgtattggtattatatttacccaaatttattttttccttctttgtaatgggttgttcttctattcaagaaaaccctttcctctttgtgaaagatacaagaaatatatttttttgaaaaccttaaaaaccctaactcattgaaacctaaaaatcccttatagctccctgccgccactcccgccaccgctgttgccttgagggtcgtcgctgccggtcgatctactctgacccattgccactgccgccagctcgccagacattgccggcagttggtttttcttgtgtttttgctgtaatttggtgggtttttttgtggtttctcatgtctttgccgatcgcccttgtctgagatgtccgccactgattttgctactgttcgctggcggtgatgagtttgatcctttttttttccagatctgttttgtctgttttcttaactttgttgcttcagccatgtttaagtcacttatggttaaagtcgacaatcgtatccattccaatagccccacaatccaaataaccacaatctgacttaacagagacaactttctttgttggtcagaaagtgttaggttgtatattcgtgaacaagggaaaattggctacattatcggagagaaaactgtccggtaatgtacaacctttagctgttgctggtttttggaatttttttttgtgcctcttctaggatttggactactttggcatgttagctttgtgcttgtcggttgcttcttcttgctagtctctagtttcaaatgttttccttttgagagagttatttcgttttgctttgttttcagatctcttcgttttggttttgttttagtttcattttttctgttggttttcgcctttctagcttgttctttgcgtttgtttgttttggttatttttctcttgtattggcagtttgtttggttgttttattttcttttcttttttgctcttagtataattctcttgtactttgagcattagtctcatttaataaagaggcttgtctctgtttcgaaaaaaagaaagaaaattgtcccaactttgcttgttacatgagatgctgaaaactccatggttatgacttgacttgtaaactccatggttgaaaacatcaactgcaattacatttactctacaaccaaatgattgtgggatagtgtgacacatatgtactttgatttgggcaatcaatcacaagtatttgagttgaatctcaaattaggaaatatactccaaggaggtaactcagtgacataatactttcacaccctaaaaaggatttggcaagacctggatctctttgattcatacaagtggaagtctgcagatgatcaaaagcattacaggaaaattgtagaagacggtcatatttacaagttttttactggcctcaatgttgaatttgatgaggttagagatcaagtacttggaaaaaccactcttccatctattaatgatgtgttttctgaagttcgcagggaagaaagccgcaggaatcttatgattggaaaaaaggctattgactcagtagaaagttctacgatggtggctgaataaacaaccatgaagacctctgatcactctaacaagacacacactctaacaagacacaggtaaagcctcaagttaggtgtgtcccttgtaataaaccctgacatacacgtgaaatgtgttggaagcttcatggaaaacctgcaaattggagaagttgtaagaaaggggggagaaattccctcctacatgaaactagtttgcaatttgttatctgctagtaaaatctctaaggatactactttggaggtaaattgttcctaggcaaatttgactttagaccaaaatcctgattctttggaggtaaattgttcctaggcaaatttgactttagaccaaaatcctgattctttggaggtaaattgttcctacgttcaagctccttctttttcaaccaagtcagacccgcctaggccacctcatccacgttttaagtattatgttttttccttactttcctcaaagttgaagtttttgggaggttctccatgcaaatctctgaccgctccattaaaaaagaattgtgaatcagattttgacactacatgtagtctgagtagcgaggaagccgaccatttgacaaattcaactgaggaggaggtctagtcgttaaaaatcctttagaatctgatctaaattcccagtttcagtcagaggaggatctaattattgaaaaagcagacctctatgattccctcacaagcacaacactgtgaaattccagatcacttgaagtctttttcatgagaaatgtagaatagttttggtttgagtcctaaaagtaaatttgattctgtctcatcagacaattattattggattgcagtcttttgggttgaaagttttcagtgaggcttcccggactcgggatcgtttctgtcacttcagacttgaagcagcttgtttgtttaccttttcttggtgtttcctctccatccatttttaaactttgacccaaaatggacatcttggattttgggctttgttttaaaaattctttaagtttacgttgtactttgttttcttttgtttattcgaggtttagaagttttcgttcagttcgttggttcttttgttcactgttcttttagtccttttcagcttttagtatatttctcctgtactttgtgcattagtctcattgttattattaataaagaggtgtgtttccatttcaaaaagacgacagttaaaggaattagcgtgcccccaaatcttcatcttggtgttctctctctcaaagttatttggttgtttgagatttaccgcagcagttggaaagcttttatttctttgattttctgatttacgtaataattttattttgattgttggtttgccttttctatgctttgcttgggctgattttattgtttttttccactcattttggagtttgttttcttgaacaatagtctcttcttatttttttaattaaaaagttccgtatcttgttgaaaaataaaagttaaagaatctggaagagcacaattggagtttacattgcttcatacggcatatattttagaagtttcctttactatggttgattgttaatagatatacttaaaatttatggttttccgcgtctttgaatcttcataccaagataacaattgtttgtactttccaggctaattata

SEQ ID NO: 7934 - DNA, 5481 bp, Cucumis sativus
  Intron number 18 from transcript Cucsa.084850.1 (locus Cuc sa.084850) derived from phytozome v7.0 (chr-ID scaffold008 62; pos 497777 to 503257 reverse strand)
caggctctggtgaagttagacctctggaacaagaggtactccttaccacctactagctgatatttttattattctttcttaaaaggaaacaagtctctttattaataaaatatatgatactaatggtcaaagcacaagaggattagtgatgtgtttgaaaagaaaatcgttagtcaaattggaaatcattacaattgacatgatcaacacataaagaccaagttttaccaaaatcgtggtcatctttataaagattaggtaaggagtcaaaagctactacttgacattttagaatggtaagtaggttggctttgtgttttattatgaaatggaaacgttggataaaagaaagcatctaacgtgcattctactaatagttctttgggtttgcaaatatttgagggacaagtggtcgaaatataaaataaattcttggccttaaagatagtgttcccaaaccttgaaagctcttaccaacgaatagagttcttgttcatacgtgctccgtttttgtcttgctttatcaccaaaatactcaattgggtgagtgtgttgagaccagaccgctcctatcccatatccgcaagcatcgaccgccgcttcaaacggttgagtgaaattcggtaacgcaagaacaggtgtgttaaacaatctatctttcaaaaacataaaactttgagtttgagggttagaccatgaaaattttcctttctttaaacattccattagcagggatgctataatgttaaaatttcttatgaattttccgttgaaagaagcaagcccaagaaaactttgtcaatcttttactgtcttaggttgtggccaatcttttattgccttaatttcgttggggtctacggatattccaaattcgttaatgataaaacctaaaaatatatttctttaactaagaaaaaacacttattgaaattaatactaagttgattttcttgaagtgctttaaaaagtttgtgcaagtgggatagactttcgtcataagtagtgctgtaaactaaaatgtcatcaaaatagactactaggaatttattaaggtaagaacgtagaacctaggttgactcatgaatgttctaggtgcgttggaaagtccgaatgacattaccccattcaaagaggccctcattagtcttaaatgttattttccattcatctctcgttcggatttgtatttggtggtacccactttttaagtcgatcttggagaaaattttcgctcctccaaaccctaatggatagtcctttggacctgtcttatggcgtcttcggacctgtcttatggcacctggacctttggaccatttagtggaataagactctgcaatatccctgtcgtatgatcaaatagatcagacatccttggaatggggaagcaatatttgattataattttgttgatggctcgactgtctacgcacatcctccacgatccgtctttcttgggagttaaaagaacagacacggcataaagacttaagcttggtctaatgtgttctttctctagaagttcattcacttgttcttgaaggattttgtattcttttggactcattctgtagtgaggtcaatttggaagcgttgagtgaagaatgagatcgatattgatatctctcaatggtggcaaattagtgggagcttctaacacttggtgaaattcttcttgcaaccttttgatgtccttgtttttcttcttgtaagaacggagttgatacttgattttttactatcaaagcccacacttctttgtcttccttttcaactatccttccactttcttggatgcgaaatagttgtttctttatttccttcttgttcttggatccctctttatctcttaggttcatagaaggtagaagcttcactttttgccccatccaagtaacttcgtaagtattctctcttccttggtgtattgcttgtaggtcttattgtcgagattgtcctagtaaaatatgacatacattaatatcaagaaccatcacaaataatttgatctttataaaaattactgatagagagagtaattgtccaagttgaacttatctatgcttcgtcgcttttcttgattgaactaacttgttaaggatgcggatgtgaatcaagcttgaggttaagtgcttgcacgagctttgaggagacaatgttttcgctactctcgctatcaattatgacattgcaaactttgccattgattgtgcaacgtgttcggaataatgagtgtcattgttggtgagtttcggtcttcgatgttggtagaattcattcaaatcttctttggaatttagcgttgtctcgtcttcttggctttcttctccctcaacatatgttaccatcttccacgtggtcattgattagacaagtgtcccgtttgattataccagtagcaaaacccaagatccagtctttggtagttatttgatcctcctttcttgttgagagattcttggattcttggactttgattggctttgggaggttgatcatctttaatctttgacgtgttggagccttgaccttgcttgttatttttgaagttcttttgttggtacggagtgaatgacttatcccacgaattctttttggtttcactgtttctttgctctttttacagctttagtttggctttataagccattgaaatggcgggcggcaatatgaatatgggttgcaagtcgaattcttgtatgtcttccttgaaactgtcaacgaatcgggtgatttggtagttctcactctcgttcgttcgggtcgtagcgcttaaatgatggaattctttggcatattccgccactttcctattaccatggtagcaccgttggtattgttggtagagtatttgctcgaaatctgcgggtagaaagtgttccttcatcattttcaacattcttggccaacttcttattagtgtttttcctattaatcgttggttgacttgaaattgatcccaccaagctgatgcaaccagtttgagtttatgcgaccaacttcaccttcttgtcgttggctgtttccatgtattcaaagaaactctccacgtcttttaccaatcaaggaatgcctttatatccaatttgccactggaaattggtaaattaaccttcatctggaagtcttggtgaaacttttctcaaaattggaattctctgtgtcgggcaggtacaatttggccttcgttgtaatcttcttctttgtttcgatcatcacaataatttccttctctgtttcggcccctttctgaatcttggatgatggtttctgacctctctttttgttagctaaacgtcatcttcttcttcagttgagtcttctaaatcttgaatatccattatgggtttttgcagccggtagcatttggggagactttgagtattgttggaggattctgaggtgtcgtcgtggtcttttcagcacggttggtgctgaattcagccggcaatgcgctgaatttcttctctctgttggtttttagtgttgacttcttgccgctggggaagggcattcaaaactacttccaatcgtcgagcaatccgttccacgatggtctgcaattcattcatttggtcgttgagttccaccatattctcttcgacgaccatcaagctcgcaattgaggtgtgcaagaatggaatctcttcatcgactgcgatgatacggcaaccctaatcctcagtctaaagattcaagttattaacgtagcaagaacctttgcaataagaaactaacacctctttatactaatttagatcaaccaagaaaaagttaggattagattacctcttagattgaagatcttgaagcaagatttagaaatcttgttctaaattgagtcacttcataatcaaacttgatcaatgttagattgaataactcgcatgcattctatcacaagaattgcaaaaataggaaaagtctcaaagcgagattttaaattcctttcatcaaaagtcttgttcttacaaatagaaggagaaaggcattatatcgccttgcagaaatattgtcctatttaatgaaaataccaaaaagtcaaaataaaacattcactaggttttctatcttccgacaactatcttccaaccaccatctttaatactaacctctcaatggtagttaccctaacttgtcaaattaaaacaaatgaaaatacaataaaaatgtgatattaactaaatcataagggttcatggaagcttaatgtctacccatagtccactttaaccgagaaaacattgtcattcaatactccaaatggtccttcgtctcttgtattagtaagtgacacatgaaattaaggacgaattgaccctatccattcttgtacataaagaatgaatgatcgttgaatctttgatgccttagattttgtaattggtccttgtggaacgagtggaacaccatgattctcatcacatccattcccttgctggtcatagctcccttcgccgaaggcgcatacaagaaaactgggatttttttattaatattctgcacaacctatgctttatactatggacagaagctgacctaacacctaaacaaccggtaatgcttagaaaaagctaagtagaattataacatatagttaaataaaagatggccattaaagataaaacatagcaagcaactggtagctactagatacatcaactagctgatatttttgttgatgaggtttgttgaagtattgatataatttactttattgtaacttattagcttgagcttttagatcattagtgatttaacatggtatcacaaggtattcccgttttttaaagtcccataatgtcactttctctttaatggttatttgatttttcacttgttgggtttttataaattttagctcacaatgaggtgtgaagttaatgagttaagtttatcttgtaatattcaattgttgtgtttattgattattgatttggcactaggccccacatttaattacgtttacaaaacacaggtaaacaagcaacaataaatgaatcaaatgtggcacacttttcaaattactattgatagattacgtttttaggatactaaacatggccggtggtctgtaagttttatcggtttcttttttgtccatttttggtccttgtgctttcacatggatattttcacaaaacttgatgcttacaaaattttggggctacaaattgtgtactttaacttgggggctagattatatgcttagaagacatggggaggaaagacaggatccatacaaaattatttcccgaatttatttgaatgtttggaaactcacgtcccaaataactgtaatggaaactcacggtgcagttcactgattgaggatttctagatctggggtcatgttcttcatctactgagacaaatcagccaatatcatttctatgtttgtttgagattttattcaaataactgatcttattctcatttacaggaaagtttcgtcagtgctgatctcatcttaaaccg

SEQ ID NO: 7935 - DNA, 657 bp, Cucumis sativus
  Intron number 6 from transcript Cucsa.232350.2 (locus Cucs a.232350) derived from phytozome v7.0 (chr-ID scaffold0198 9; pos 345816 to 346472 reverse strand)
gagtcgtacatatttccacttattactggttgaaggtccgtttttctcttatttgcctctctctctctctccttccccatctctcctccaagttgttccaacctttacatacctgcatattacaggtcaaggcagatggttcattgataagtgatctagatctctttcatcacaggccgtatgaatgccttctcttgggctattgttatggtgaggtatcaagtcaatggctgatttaaaaaaatctacaaatttgaattgattaaggaaataacttaacctaggaagcatgtgctgctatgcccaccaatagaagaaaaagaatgtaatttacgtactttcattgaactttaaatggatttattctctagattttaagtagtttaatgtgaactatcgatcacactttttacttagtcgtgaatagaaggctaatgtaaattaaatacctgttagtttgcctgctcgttttttaagtagcaccagttcagccaaaatctgcctgatgaacatgccatgccatatttctaactcaaatacaatacgactaaaatatttgttttgtggtccagtgattaatgccattggattcgaactgttcaacactgttaaacttttacttaatgtcgacttctttaaattacttgggagtatagg

SEQ ID NO: 7936 - DNA, 782 bp, Cucumis sativus
  Intron number 9 from transcript Cucsa.020120.1 (locus Cucs a.020120) derived from phytozome v7.0 (chr-ID scaffold0028 8; pos 11650 to 12431 reverse strand)
ccggttagcgctctcttataatttcttattgatagctcatgtttgggcttccataaaaatttcattcttacgtcttttaatgcataaaatttctaaaaggctatatttttttgtttttttttctaaataagctttagaaacaccattttgaccctttcaagtttctatatttaaggtatttttttcaaaccttattgtttttagaattggacaaagaatttgaatgattttttttaagaaatgtgaaaacaataataaagaaactacgagtaaacaaatatcgattttaactacaaaaaactaaaagttaaaccattatcgaatgagatcctaatttattttgttttaagatctacatttatagacgattctaagattggattttcatctcaaaattttctattcttgacatttcttgctgattttgtagtctgttcatatttctagtgacaattgaatttatgatgaatttgttagagcactagttaaaggtatatatgtaagattagtaaggtattagtaaggggtattgtgggtaattatgtagcagtgtcttggttataaataagggaaattatggaccttagagggtttgtggatggttttggtgggagtttccattgggaaaaagatagccctctcgaaacactattggtgtattgtaaccgtgcttgatattttgcaatacactactatctttgtgctctttttgatttctttgagtttttatgtgagttgggatcctaacagattttttttatacttggatgaatagggttgcg

SEQ ID NO: 7937 - DNA, 9018 bp, Cucumis sativus
  Intron number 5 from transcript Cucsa.017880.1 (locus Cucs a.017880) derived from phytozome v7.0 (chr-ID scaffold0025 2; pos 112549 to 121566 reverse strand)
gttgctattattggaattggaggtgtaggttcaaggtaagctatttcattctttgttgtattcgggaggtgttgggtggccaaaagttgggctcttatttctcattaccaatggtagttgatgagatcaaatagccaacatttttgttttattatatttatcatatttaatagtgttattattattatgattattttgatatctatgaatgttttggtcaacttatgtgcacctcggctaatcatacggaacaacccacctgtccctataaaatttgggtttaaagaaaatatattgttggtaattttagtatatgtaatggttgatatacaatccacacctaagggaggagatacatgtaagacctgcaatcatccacactcaagcaattccctttttaccccaaggagtagagggagtacgtttctgttatggatgtggagatcattggtgctatggatgtggggaccagcgtggaggtttataaggggttttgaggaagaaattgagggcgtgggttatttgagttgagacgactagttgtacatgtcttgaagttgtatcaatatatcgtgctatcagagtgtgtattacctgtttttcttatttgttgggcattactgcgtgcatgattacaatagatgcctattaataaggatatagtagtaattaactagggacttctggttataaattgagagagtgagggtttgtgagaggtaatattttggtgaatcaaaccgaaagctattgatattatttttagtttcttttgatttgcaatataatttttgtttttcatcttgtttgtacttgggatctgaaaacattcttccagaggggcatcgcatgcatgggctagtgcctttgctttctttccagtatttttttttacttcgaatatagctggtgtacaacaagttctacttctccaaattgtacgttaaaggcttaaggggaagttcttcaatcaatcaattatttctcctttcggatctaaaacaatttgatttgaggggttatcaacccttctcctcctatggaacctatccctcttacacattcacgtttttactccgatggagattttgaaataagtttgagtagtctgcaggctgcagcatttttggaagaaagattgttcgaatatccttatcttgtggacttatttcctgatgcttttgtggcatcatttaaagatgatgttcaagataatttgactgtgacttctcaacctcatcgctagttataattctgctaggcctcctatacttatcacatatagtaggaagaataaggagaaaaacagaattacacgtgggtcatggggagaggaaaaagggcaggaccaccatgcaatggggcccagcagtttgttagaataagtagaagaagaaggggagagagaggtatcgaagataatttctggaatggaggtggctgcttcattcttgcggagaagaagacagaagggtccaggttttgttgttcttaatcattttgtcttgttgaggtatttaggttgattatagatttcttttagtaagtgttaatctactgtgttctggcaattttactggaatttgaactttatatggtattttgttgaagaacttatattataattcatttgagaacttcaatacaaagatatagttgtactatctttacaaattggtatcagtcatggcaaagaaagtggaacaagaactccaacgattaccaataatggaagagaacttgtccttgatatcgaaaagcatccaagagatgaataagcacatagataaacagcaacaacaacaataatcgattatgaagtatattgaaggaatcgtatgtgaggatatttcagtgggaaaaaaagtggaaagcccggtgagtcaaatgaaatataccgaaacaatcatctcgggaacttccgatggatcaaagaaagaaggaaggaatgatgaggaaaaagcgacagatcgaagtaagtttaagaaagtaaaaatgcctattttcaatggaacaaacccgaattcctggctattctgagcagattgctacttcaaaattcacgagttaatagatacggaaaaactaatggtagcagtgataagtttcgatggaccagctttggattggtatagatcgaacgacgaattggaacgatttaaaagttgggaagatttgaagtagaggctgttagtccgattccgaacaattcacgatggattcctggtcggacgattcttaacgatcaagcaggagacgacgatggaagaatatcgaaatcgattcgatatgtatttggccccggtagcatttcttcaaactatagtattggaagaaacctttatgaatgggctaagcctatggctgaaatcagaggtggatgctttggagcctataagactggcccagatgatgaaattggccctgaaaattgaaaatagagagatggtttgaagggagtgtgggctaagtagcgtgttcaacgggaatcatcaattcaaatatattaatgggaaaccatccactacaatcacaaccaccctgaaacaaactggaaatagttggccgatgaggatgatcaccctaaaaggagttacgacagaggaaaaaaagaaagatggccttaccaagcgtctcttagacgtggaattccaatcacgaagagagaagggactgtgttttcaatgtgatgagaagtattacgaatgttggtggtaaaagaaaatggtgaagaactagatattattgaggaagaattcttttatgctgaaacagaggataaaaccgtcgcaatagggaatgtggagaatctgaatattgaattgtccattaactctgttgtaggactgtccaattcgggaacaatgaaggtaaaagggaagatactagggactgaagtggtggtgctcattgactgtggagccacccacagtttcattgtagacaacctggtaacatcccttaaattaccattgactgaaacctccaactgtggagtaattctggggtccggagccgctgtgaaaggaaagggcatttgtggccaagtcgaggtaatggtaggagagtggaaaattgttgacagcttcttaccactggagttaagaggcgttgatgtaattttggatatgcaatggttgcactcgttaggggtaactgaattcgattggaggaagttggtgatgacattccaacatgaagggaagaaggtagtgataaggggagatcctagcctcactaaaatgatggtgagtttgaaatctatgatgaagtcatggaacgtagaggatcaagggtatcgggtggaatgtcgagccatggaaggaagattatctgtggaagggttatgtagtgaagaggaaaccacaaccgttgacaccatgattccgacactgttaagtagattcagtgatgtgtttgaatggccggaggaactacctcaagaaaggggtggatccggtgaacgtcagaccttactgttacgctcatcatcaaaaagaagagatgggaagactagtggatgaaatgttaaagactggaattatcagaccaagcagtagcccttattccagcccaatcctcttagtgaaaaagaaggatggaagttggagattctacgtagactatcgagcattaaataatgtaaccatctcggataagttcccaattccggtcgtagatgagctattcgacgagctgaatggggccaatatgttttctaagatatgccttaaggccggttaccatcagatcagaatgcatcctggggacgtggaaaaaaacagcctttcgacacatgagggactatgagtttttggtcatgccgtttgggctagccaatgcaccgtccacgtttcaagctttgatgaaccatatattcaaaccttatatgcgacgatttgtcttagtgtttttcgatgacattttgatatacagcaggggagtgacagagcatgtgcagcatttggaagtagtagtgttggaagctttgtgagaaaatgagatgtatgctaacatggctaagtgtagctttgccaagagaagaattggttacttgggccactttatatcgaagaaaggcattgaggtggatccagagaagataagagctattaaagaattgccaacccccactagtgtttgagaagtttgaggttttctggggctcacgggatactataagaaatttgtgtagaactatagtagtatcgcaagttcgttgacacaattgttgaaaacaagggcttaccgttggacagagatgcaagtgtagcatttgaaaacttgaagatgcctatgatgactaccggtgctagctatgccagactttaacctcccctttgaagtggaaaacagatgtttttgggttcggtgtggggtcagttttaatacaagccaagaggccgatagcttactttagcaaaaccttgtgtatgagggataaagctcgcccggtctatgaaagagaattaatagttgtggtatttgttgtgcagaggtggagactatacttgttggggaagaaattcacgatgaaataaccggaggtagactttctgtcaacaacagatcctacctagttcgagtcagtgtatgcgtcaatggtctttctatttgtctttctaaacatcaaccctttaccaggtgttcttttcaagtatctcaaatttctgttgacagctttcatgtgttcctcatagggagcttgtataaacgggctgacaacactcacaacaaaggaaatatcaggacgattatgagtaagtaaattaatttacctataaggcgttgatattgttctttatcaactagaacttgatcatcatcaaattttcctagtttacaattgaattcaataggagtgttagcaggacgacatccaatacgtatgtgtctcggttagcaaatcagggatgtattttctttgagacacggagatgccttctttagatctggccatctccattccaagaaaatatttcagatttcccaaatcctttatttcaatctcaaaccccatcttcttttttagttgaacgatctcatcaatatcctccccagatagcacaatgtcattgacatagacaatcaatactgcaattttccctgccttggagactttggtgaacaaggtgtgatcgaagtgaccctgcttgtacccttgagacgattaaagtggaaaatatatcaaacaacgctctcggtgattgtttcaacccgtataaggactttcaaagcttgcaaacctaattattaaattgagcatcaaattcttggaggcggacacatgtacacttcctctttaagatcctcattcaagaatgcattcttaacatcaagttgataccggagccaatctttattcactgcaacagacaacaaaactccaatagtgttcaactttgcaacaggagaaaaagtttcagaatagtcaatctcataggtctgagtgaacccatttgcatctagcctggacttatgtctgtcaattataccatctgttctatacttgagtgttaacatccatttgcatcaaacagtcttgttcttttccagagctctcatttcttccatgatagcaactttccatttcggatactctgagggaaggtggatactcttgggtattgtggtagagtcaagattgacagtaaaagctctgaactgtagtaaaagattatcgtatgacacataattagatatggagtgctttgtacatgacctagtacctttcctcagtgcaataggaagatcaagagatggatcacacttactagtatttccaaaatggtttgacttagtttccttttcagtatgtttagcaacaactttgctgtcatcaatcctttcctctccatctgtaatgaacctatcaatattgccttgctcacacatatcttccagaacagctgtctcgaactcattattctcacttgccttaccgtcagtgcgtaagtcaaggttagttgaattcatctcagatctatcagtctcactcattctgttattactatgtgaattaatggaatcaatcataccttgatctcttattggttcagaatcctggactggagctatttgaacaacaggagactcaactccctttttgagattcctcttaaagtaggttttttgaagaatttgatttgttggtaggattgtactgtgggggctagggttagataaggtaaccatagtgggacaagtagactctaatggaagcatatagttgactcttcactccctctctccctctgaagtaggcttatgggaaaaaaggacgatcctcaataaaggtgacatccattgtaacaaagtacttacgtgaagatcggtggaaggatttatagcctcggtgcagaggatacccaacaaacacacaagcctaaatttaatttggttaggggcatgtctatggacataggtagtttatctagacacttgaagggaaacatcagggatgagacgagtggagggatgggattctttgaggcaatctaacgatgtctgaaagtgaaggacacgagcagacatgcagttgatgagatgagcagtagtgagaatgaatcacctcaaagataggaaggaagagaagtggacaacataagcgaacaaggaactctcaaaaggtgacaagtttttggtttagcaaccccattttgttggagattgtaagcacaagaatttttgtgaacaattcctttagtggataagaattcgttaagagtggttttgaaactcacgtccattatcactcataggattgcaatctttgtattgaattgcatttctatggtgtgatagaagtcccagaatgtagtggtaacttcagatttgtcggagatcaagaaaacccaagtaagacaagtatagtcatcaataaaggtcaaatcatcgtttttcggaggaggtagtgaccttggatggtcaccaaatatcactatggacaagagtaaaaggtcgggttggcttatagggttgcgaggaaaacgagactcggtgttgtttagcttttttgcacacatcacaagttaaggaagaaatatcaactttagaaaagagatgaggaaataggtatctcatatatttaaagttgggatggcctaaacagaaatgccacaacataggatctttttcagaagtggtaaagtaggaaggtaaaagactagttctagaaatgttactagaagaggcatcatcatcaagcaagtaaagatccctattgtgccaggcagtgttaatcatcctcctcgagctcaggtcttgaaaagaaacagaaccaggtaagaatgttgctttgcagtttaattcttgagtaatcttgctaatcgacataaaattatatgaaatttgtggcacatgcaacaaattttataatgagaacccgtcaaaaagggaaatcagccctttcccgacaatgggagccaaggagctatcaacaattctatcttctcatttccagcacacagaatgtaggacacaaagtcttaagaggaaccagttaaatgatttgtggcaccagagtccaggatccaagaattcttatcatcaatactaatgagagtaaaagaccgaggtacacttgactagacaatagctcaaagtgtggttggactagcattctcattcacataggtaggaaatgaggttaccagattcttagaatacattggtacaaaattgttgaatgtcgtccctcaggtgcctcaattgctgcattctattgatgaagccctttcagtttctgttgagctattctcgaagaaaaagaggaaccttgcacgttagggttggaatgtgccaaagattcaccaacctcaaatattgagtggatttgagggttcctaacatcgaaatgataactaaggtaagtgggtggcagggcattccgatttgatggcagaagtggtggtggccggtcggaattaggtggcagaccgtgaatcggggcatggggaacaatataggtcgcgaatgaagaagacggttgcacagatgggatggttagaactgtctgaggaagatggaccggcgcatatagctctggcggcggcacgaggaggtttggcagcggcgtgtggaggcatgtgagagagttttgacggcatagatgacggtggaattgacgagaatacattttccgacattttctgaaggcgacataaccatttgtccatggcaacaccgatccaagcatcgacggcggcggcaacgacagtaaagctggtgcttgtctcctccgtttgatttccatcactagttgtgttgtttagggtttgttcaatgacccgctttgataccatattgaaagtagaaacaagaacagacaaatttatgtaaaaacccgagtacaaggagaaaaaccacggtattttttcttattattttctgatcaattttacaataggtacaataaggaagaataaatagaatacacaagggaataaaaaaggaaaagatttaggaattgggaattatggtaaatatttctatgatctttccataaataccctaaggcgaatcccaccaattccaaccaatccattgaacaccaattactctgtcatagcaatgtctcaattgctctaaccatattaaattactcattgatttggcaatccccttgctagccgttacatctccaaatataaaaaaaatgtggttctataatgaatatttcagttatgattgaatatatctttcaaataatatttacaagatgaaaaaatgttttgtagcttcagaatgctctaacacagtatctaaaatataaaggaaaaaagaaaaagaaagattgcaaaactaataaagaaaacaaattgaatgatgggcattttggtgaaagttagaggcattcatatctgagtttttaagacttgacatttaaactaaatttttaagaaggcatttagcccagaagtcttcccaaccaatctggtgtcttttccccttctttttgtaacattatttctgatttctccagttgcttgcagatagcaagggccttcggtgcttctc

SEQ ID NO: 7938 - DNA, 893 bp, Cucumis sativus
  Intron number 1 from transcript Cucsa.043460.1 (locus Cucs a.043460) derived from phytozome v7.0 (chr-ID scaffold0054 2; pos 262205 to 263097 reverse strand)
gttatcagtcacaatcccgataacgacacatccaggtttgatgatgagatattgatttctgtttaatttgtttgatctcatctataaatatactttttttttatcgcgtttgtatgttgttttgcgttaatattatgttacttgttgcaccaacctagctaaaaagtgtaatctaatgcgtgtagttaatctttcacctttacgaacaaatttagtccaagaagatatattgccttgacttctcgaagagggctcgggaaggcttttgagagaggaagagaaagggggataagagtggatcagggtaaatatcaaaagaggagaattaataagcgagagacagaaattagggtgaactaaaatcagaagcaataaaaaagaggaccgtcaaggagagtaatagacacagaattggggttatggttgaattttgaatgaaaaattattgacctacctgaagtttgacagttaattctcgcacgtctcttgatggattgttctgtgaactttattgcttttaattgctgccttgatcttaattgatatggaaatgaaaattcaaacattaggcgtttgcaagataggttctgatttgaacgtccaggttgaataacattcagtctccattcccggttgttggaatttaataatttaagatattgattcttttctatttttgttgtttggtgtttggtgctgaactgaattgatgtttaattcttgttttaaactttgctgtcttgtggaattttatatttttcgtgtgtgattggtagttagcagattggtgacatttgattctagcttgtgaattcattcaaacattttgtctgatgttcgttttttaataacaatcaggatcaagcttccatccggtgcgaagaaaatagttc

SEQ ID NO: 7939 - DNA, 9562 bp, Cucumis sativus
  Intron number 1 from transcript Cucsa.360290.1 (locus Cucs a.360290) derived from phytozome v7.0 (chr-ID scaffold0358 8; pos 992372 to 1001933 reverse strand)
aatttacaaatttggcaattgttccagccttccaggtattaatcatcttcataaaacgacatgagaactgagtcatctttattgtttttttctgtcatagttcatcgattttttgctgagcttgaaatatctgctttgtctatgtccatcctcattgtatttttcaatctcgttgttaatttggctgcaggcttggacaatctcgctctatgagcatttattttatactagttagaactaagctaacttctttctataagctgtgtgaaattttgaaaacgtgatctcatctaaaaaaaacgagttctaaactttgcatttataattttaaaaagtaacattgaaataaagcatttgtaataagaaaacagtgaaatagaagtgttgtccatcaaaactataagaaaaggttgataaaatgtccatatctacctaaaagaaaacaaaatttgttaatgaaaatttaaaattttcaaatttacttttacaagcacaattgccttacatctgtaacttcttgtttttttttcggggggtaataaatctgaaaaataaataggaagaaaatagtggtgattaaaaaaagcataaattagaaaaaattaacgaaatttatgtaaaaaaaacggttttagttcagattggacaaacttgtatagagaaagcttttaactccaaattatttataaaatggctctttctaagcttctttttttctttacacctttgtgactccaaattgaaaaaaaaacattaaaataagacccagtaaaagatttaggcaaacaaagtcataaaaaaaacccccaagaaccaatggttaagaagggtctcttatgacacgtgcatgcaaagattaagaaaattcctataattcttgccaccaccagtaacaaacattttgttgccacatcatttgggtccgtttttctctctttcttcttcttctttttttttttttttttgtactttccatttctttctcgagggaaacaaaaataagataaaagagttttgtgtatttatttacaaccgtcacgagcatagcgtggaagaactcatctcatgcatactcccactaactcctccaccacccagcttgccttgcccatgactcgagggaggaatttgggcgtgcatctcagcaagctccctcacccgtaacaagacctgtgcaggaatcgatatcgatgcatgtttccgagaacttatctacatcatcatcatcatccatgaggacttgaagaagaagaagaagaatactaagacaaacaaataacagaaacttttgaaatcaaatgcttcttaccccttcatcaacaggtgtctgcaccaagctagctttcagcaggtttctccatttatcctatcaaaaagagaagaaacctattttgagctaaattgttgtaagcaaacatgaacaaagaccccaaccgttaatggctgataggtctatataacctggataggcacttcctgtggttttgggccctttttctttttctttccaagacatgagaaaaagtagagttttagccacaagtaatttttccctttcaacattaaaactcctactccttcaatagtaatgctataccctaaactgagtgtgctgtttatatatataaaaacaaattaggcatccatctattgtctttttcttcattatggaaaatccaaaaatcatatacccttgaactctttcaattttaaaaattaagtgaagaaattgcaacttattggttcaatttgtattatttggaggaccgatttctacaatcatggcaagtttgagggtttaaactttaacacccatataagtttgaggagaaattgaggatgaaattgcaactatcgcctgatttttgcaaatggccctttttctttattcttccttatccttagcaatcttgccaagaattgcacttataaatattttcatggatagtttgtgagaaaatgcaccttgagatcaactgacgtacggtatgagtatgatgaaaaagatagtttcttaatctcagaccacttcccagctccgcatttcgacacaccttctactaatttgatgacttcaacaagagtccaagcacgatgatgcttcctcctcattccaccttttgtcgttgaaacaaccgccgtgttatcatctgatacattgtcagaagtggtttgcttctgctccaaattcttctctgcttcatctgtgaccgtaactgaaggactctgatctttctctggaagtgcaaactaagacaaaaggtagaacaatccagcagtcagaagccagccaaacaattattaaaattgagtaaccataaacaatgtttttcctatcctatccatatactgaagagagaaaagacattgacttaaataagtcaaaacacttaccacaaggcctacaacgtctttcctcggacggctccttctaaccctcgaaacacaggggacttgaaagccagatccaccaagagaatctaatcttgtgattacagttcttcctccatctgaataaaccttcttaataggtcttgcaatggaattcgcagatacgctgtctgatatagtatttttattcatactaaccaccttttgcacatactctcttgattccacttcagaaagttcttcaatataccgcctggtaggcttccgaactcttttaacagcagctctctcatcatgttgaccttcacttccatgatcaagttccatatcctcagagtgatgaaggtccttgttttccaaactataagtggatggcgaaactctgcattcaatattcaaagtttcggcagttggagcagtggacaggccctccacgtttggagaaatttcttcaacaaacttgccttccttaattataaaagatgagactggaatgtcgcatgagttggtcaatcccatgacaattctcctcctaagccacgacttgtctttaacagtagtgtctctcccaaaagtcgctttgaaacattcacggagttctctaattgaaagattatccaggcatacatcgcccttcaacaaggaaaaatcagggttagacgtagtgcagagggcatctgatgattcagactcgactgatttatctggatgctttaaacaatcgcctagactcccattttcattcacatgattctcctttaaacttggagaaattgagtgagttatttcctgcagagaaatattggattggagcttttcatcaataacaggcaatctaccatgctcatcagaacccttcctgtctccattcacgtaagcagaagcgtagttcgatgatccacatgttaagcgaagcctctcttcctgtttcaccttttgcaaaacctcctcaatgtactacagggtattaaaaggtacaatcagtacaaattaatgaataatcagtgattcaatattaggagagagaaacaaaatctgtaaattttttgtgaagagcgtggaggctcgtctaagaaagtttcttttgcactccatgcaacaagtcacaatgttcagcaaaagaaagcatttcatttcataagaaagcaaattttatacctccaaccgggcattataatctgcagcagcttcaaaggtatcagactgcagtaaacctggcgtatctgtacaatatagacatcacaacccaaactcaaccccacccccaaaaaacaaaaaagtaatcttcttaagctacgatagttacaaattgctaatctaaacaattcaactcaaaagttatataattctactgctatgcaagatcattaacaaatagaattttaacaagactggaaggagactattccagaggtagtaatagatagacaaaataaaaatgaaatcataggtaactagtctctaatcacaatttaaacccactcaacacaaaaatcacacttcgaagaatggaagtgctgaataaacatctgtcctagagggaacacactaaggagtaattataatagcaaaagaaaagagatgaaaaaaagaaagaaaaagtcaaccattcaagacttctacatgaggcttcccaaataaagtgccttctttgggtatgcatcctacaatttgtcctgcatcttccactttttcattcttgtcgtcttcaagtaagtcctcaacctccattacctcatcatctgtggcaggaacaaatctcccgtcaccatcaacctaaatatgacatacagaacttcatgagaaacttaaacaaacactaatgtggaaccagaaggaaaaagaaaaggaaagtaatgctatcactggaattcgattacaaaaccaatgaaatgatcggatcacacttcttcttccacatatattgacaattttcagaaaaattaccaaagcggatttaggttgcgttgttgcatattgctatacaaacaattttggaacattttgttttgcccattacgctagaccaaagttatggtactacctgatatgttactaactcacgatacatatgaatgcttgctatttaaaacagaacatggataacaagaagcttcaacttctttgatcctttttttttttcggaaggggggagctacaaatttattcaatctcctttcttagtcctcacaatatgaaacacatttacttttagacatccatttggtaccttcatcaattgacatctctatgagaacgacggtacctttaacctgcatatagtactccaatcagaatgatgctctcagctaagggcttatgaagccaccaatcagtaacttaataatatggatagattgcaccaaaaacagttcaaaacctagacgttatatttaatttcaaggtagatagattatacttgggtataacttttacattattgtaccataagaacaaaaatgcagaattagcaccagtaactgaagaatcgaaattctttcaaagaagaaaatcaagaacgttcaaaaacttcaaagttcaatcaaaataagagaaagaagataccctgacaagtttgtacacaactgggtcagcgatttgatttggggacagagtggagccatcctgagtagccccgctttcaacaatcttcctttcattctccacaattccaacctctgtttccatggaaaatccaccacatgcaactaaaatacataaactgaaacccccaaaaacagacaagaaataaatacataaataaataaggaaacaaaaacttcgtctgtatcaagacaaaaaccactccatcaaactcatgtaactcaaactcactcctccatcaataaccataaattaacgaatctttaattctctctaatacaaacaaaaattcatttccaattaatcagaaaccccaaaatttcaaaaaaaaaaaacaataaacaaaccaaccaagatagctcctatgttgattctactacaccgaattcaaacgaactagtcacaaatataaacaggtatcaaagaaagatacattaaacactgataaaaacgacaaaacagaagaaaataagcagagaaaaaagaaatttgtcgcggcttagacttaccatagaactaagtgaaggccgagttgactcggcaagtgaaaacggggaaaatcaactgaaagagacagtactggagttattcaacgaagctatttttcacactccaacaaccaacaatgggttaatcgagagagagagagaaaatcaaaaagaaaaccggagagattgagagaggaagagagttgtgtaattgtgtagaggaatttagaattgtacgtgcaaacgagataggtgggggggtatctcgttttctatctatcttgtgggctttgcttcttcatcacgctgattttctactatgcacaaccggactccacaaggttttctcaattccattttaattgttaacactcgagtccgaaaacggttcgtttcgtcgcaatttgttcacacgtgcttatcctttcctcattcttcgggtgcactcaagtttgggctccgacccaacatgtgagtaaactcacaattgagctcctcaatatgggctacggcccaacatgtgagtatactcaaaattgggctcctcaatatgggttaccgcccaacatgtgagtaaactcaaaattgggctcctcaacatgggctacggcccaacatgtgaagccagagtagatcttccatgcattaatcagcctctgattatataacagaattagtgaatgtaatcaaatttatatctaattcattagattaatcacgatgaattccaggtttatcatattagtaattagcaattggtcaccatttgagagtgaaaatcgtgtcaataaatcacattaatgtaatgatttaatttttaagaccaatagtatgccaaagtctttcatcaaaagttcatatctccacttccaaacttatattggtaagaatagataacaaactcgaaacagagaaaccaaatcgaaaattgatacaatagaggtgggagatttttggctaatgttacaaagtgaaataagattgaacattaattaaagcactaggtgatatgagataagagtaaatttacgaagtttgtgtgaatacttttgtaacaaaaacagcccaaaatcaaaactcaaaacagaagaaaacgacttcaaaacttagaattccatattctgaaagaaatgacattatagtaagcaacactacactacttcctccctcatgtctctcatcatctcttaagctgctccaacttcaatctcggtcgtggggataacagccacaggcctgatgaaatcctcttcctctttgggagaatggatggtaaccaaatctggaagaggcgtcggtggaccttgcttacccttaggatcccaatcaagcatgatcttgaccttgatacccaaaacaccctgtaaagtgatgaaaatgagacacaaatttaatgaacagaagcacccacaaatgtgattcgagaaaacagaatgctaatacgagcaggcagctatgaagccacctctgcatttgagatcatacggaactgacctgtctaaggagaacgtgtctcacagcagagtcgatgtactctttcactggctgtccagatgaaatcatgtaaccatccttgaatttcatggattttgcacgctgagctctcagcttaccactaacaataacctgcatgattcagaatacaagttcataaaaacataaccaactagatagttggttccatcaaaacattgagaacaaataccataaagaattagaattcacctcacatcctttagctccactctccatgacaaatctaagcacaccatagcaagccctagaaaaaaaatgaaaaagtaatgcttaataggagtggttgcccaaataaggcgcttagtatgttatgatgagttccaaaccaagtaatcagtatccagaaagaaatttttcatagttacgtcatcacacacctagatagatcgaaagtttcaaatcaaactagaaactacaacacatctcaaaattattgcattgatgatttctactatataccttctcacagcaaggcctcctagaagcttgtagcgaagagactcagcttgagcaatggcacacagtcctctgttgttgaccttctcagcatatagctcaacactgttttcagggaacttgaaacgtttctgaacaacagatgtcaattctctgattctccttcctttctcacctaaagtcacaattcaatttccagtcaaacaccggagccaagcacattaatgaatgagaacgcctaaatgagatcactctacatgtaatatgaagagttcacttcaaagtatgcaagatggtttaaacacattggcattgtaggtaagatcaacatccatattctccaatgatgatgcacttcaagactataattaaacataaagcgccaataacatcccaagagaaactttcaaacatgagaagtaccaagcaccaacaaacacggttgaactgtacattttattcaaccacgcaatgacacttcaaaacaattgcctacccctgtctaagattctacaaattctacaattccagattcaacgtcataagaattacattacattcgaattagagataaataacaaaatcaggaatttgaggcagaaatttgaagttacagaaatgagcaggaaaacaaaagacactcgtaatggtagattgataataaacaaaaactgcacaatcttcccaaacatatccccataattcgcaggaataatatcaacgcaacgaggataataaaaatctcttaccaagaacattctgagtgcgagtggccctaatgatgatctcagtacgcataggtgtaaccctaacctccactccggagtatccatcctctgcaagctctctggtaagaacttcgttaagctcagcaaagaacaccccatcagccacaaactgtgccggaatgaatggaataagactcgacaacatcaaaatgggaagaatactttgtacctcgtgaaaaatataagatgaagatacgaattcgataccaacctttcgctttttgctcatctgagtagccatgactggttggtggtggtggttctgtcgccgttcaccgctgttctgcttggactctaggttgaagatgaagaaaaccctaagaaacgctgagaatttgagagacgcagatatcctcgaatgaaaggctttaacgtctaatattgggccttcagctttcttgcaggcccaagaaatatatatcgaatgaaaggctttaacgtctaatattgggtcttcagtttccttacagacccagcaaaagttagtgggccgaatgaaaaataatcgaatgatgatatttttaaaaaatcgcaaatatagccaaactactaatataatgtaccaatatttacgatatgttctataagtgatatacttctgtttttgataaagtttgacaaattttattatatttgtaactttttttaaatgttgttatatacttaattattttgaatatagttgcatttgactttgctatttttacaatttgtgtaaggaatgtttgcaaaaaaacaaaaaattgataataggacctatgtcattacatattttaaattacaaaagtatgaaattggtggactaaattttgtgatagtattttcgataatcgtctgatattactaactcatttctgttagattcgcaatttgcaaaagaagaaaatgtgatgtggtgtttttctaaaatgtttttgccattatgcaattttcatttgtttaatatgttgttgtatacttaattactattcttagaattgtcctccattacaattaccatttcataaataagtttaaaagattctataaatattttgattggattgttagaaatactcatatttaattcaaagtgtcataattattttaaataaaagtataaaattacatgagaaacatttcaaatatattttcagaatcaaaatttctttataacttgagaacaaataagtctattcttatcaatacggtcactaaaaatacataattttaaaactcgaggatcaaattgatatatttttcaaagttgggggactgaaaagtattttttggtttgttatcttgactgtgacacacaag

SEQ ID NO: 7940 - DNA, 3614 bp, Cucumis sativus
  Intron number 1 from transcript Cucsa.263980.1 (locus Cucs a.263980) derived from phytozome v7.0 (chr-ID scaffold0233 0; pos 92430 to 96043)
gttcatttaagaagcataagcaaggttcgtttttctatattttaattttttttattaaaaacaaaaagcttttagtccatgctttgtatggttgcttataggagggaggagagacaaattatgtgcttggtcattgctttgttttgttcaatgtagggggagatatgattgctggtttctgtttattatccttttcttttcttttcttttctgtagttagaattgtcgcttttactgtcttagtggatcatcttgcatttgtttctatggattgttgagttggattacgagaattactggctccatgtgttcgtgcttgtggtttacccttataattgcgtttatccaattttatctttattgtttatttttctttgtttaaactagagatgactggaaatactcccttagcaagtggatctgcttccagtagttcaaggtggttattatttgtaggttatgcgactaagggaaaggtctgttatcactagtggtgaaataggaaagtgagtaattggacaaattttagaactatatctgttggtcatgatttttgggaccattttagggtttttggtcttcattgtcattctttaacaaagtgtcccattgggctcacgatcaaccattaatacttgactaatttttccagtagtctgttgggattgttgatgaaaaacaaagaatcggggaggaagataccctgccgtatacctcttgtcttgatgcaagtattctactccttggactagtagctagcatttctaatgcttgctttgtctcaaattttctatttgttgcgaacttgaaattatcgttaacagaattcctatcagttcaatctctcctttcttttattttatgttctactgaagtccttattcaccatttgggggcattcagttgtatgttgttttatctcttattcttggctattactttcaagccagttagtaagagataacatgtggcttttaacactctaggatttttgtgacttagaagtactggtcaccattcatcaacgtgcttgttatcatactaggagctatctgtaaaccaggttcttggtgattatttatgtactggcttggttattccaactgatacagtccatctctaaggaactactttcagcagaatctcccccgaaacttggtccttaaccacacaaaattcagggtgaaactcaacatgaacattattatcacgagcaagtttaggtacactaaaaagattcttggcaattgtaggaacacataaaacatcatttagtttcagatagtcattcttaaaaacaagattcgatgtccctaatcgagatataggcagttgtggaccattaccaacaataattcgctcattacctgcatagtcaactggggaattcaaggagttttgataggctgtaatgtgattcaatgcaccactgtcagcataccagttcagatttgccacaacttcaggattagcaacagaagagtttgcaactagggcagtaggattagtgtattgaccttggtttggagtataattcgactcaactctgtaatgagtttgctttggattattaatctccttgttaaagtggaagaaacagactcctgctgtatgacttaagttctccatacacttggcatgttggatgtctggtagacgcattgttgcaacgcccacgaccacggccctgttctctaaaggatgggtttgaatttttgaacatttgttttgattttgtcgattctgatatgatcctccacttgaatgggatccactttgtaccatagtaacagatgcagcattactattaatagaaagagagattagacaaaccagatttcaacctgagttgatactccagccgagcttcataggcaagcaaatcagactgcatatcagtccatgaaatgtcatatttaccttggactgatatacctactggatatacacttcatcaagccctgcaagaacctgagaaacaagattgctgactaaaacagggctactggcgagggccaaaccatcaaaatactttttcattcgtgtaaaatactcattcattttttactattctttgcgagaagtataaaaaagacatttgagatagtcaatttcagaactatattgcattccaaagagcacttgtacagcagcccataaatttttagaagtttgaaaacccattccattacctgtattgcaatcgcttgggtgattgagttgtatatccaacccaaaattaattgatcaagagcaacccaggcttcatattctgggtttggaatcttctcagttagaacaccaaccgatgcaaaggagccctcacctggagtgctttctcgattcacaactctagtaatggtcctacacatggtttttctccggtcagatgaccttcccaatggtagctgcctaaaatatgccaaacaagatttgccacagtggaaattctatccatcttgataaccgtaatttgattcaaaagttagttctgaggaggaggaccagatatgcactgggtgcagcaatagagctaaaggtagatcgacttgaatgagccatttgaggctctgataccaacttaagttccagagaagaagaaataacttggagaagaatttttttctctttcactatattgcaacttgtattttctctaatgaaatacaaaggagaggtcggtttaattgataaacaaagagagtaattacatgaataaagaatgaagagtattatcacagaaaactatatacgtgccaacatcctattgagtaaagcataacagactggaaaccgtgaagcttctatagaatggaatacccagatttggctgggagaatccatgttgcctgccacatgttgctgactcactgttttgactggtctgtttcttactagaatggtcctcaataaccatgtcattagatgagtaacttagcctaccagcatttttgagttatatatgcatcttaggagatatgagttgaatatggaaaggaaagtttgaagaattgtgacttagaactcaaggacacagttgtataacccatagaatagatcttgttcaagcaaggtcgcagttcaagaattatgactttaagaacagttcgtttgctaccgtattctaaaattttttatatcatctttatatatggtcaacaatcaagatacccttaggatcaagacaaaagttcaaaaaaaattttggctataagtttattatatccttaggttagtcatttggactatatagaaggcttagaatggagggttaaaatattttatctaccattgataagattcagttttaggtggggtttcccctccctgtccccttttatttgatgttgggtcattttgtatttattacaattttaggtgaccttgaaatccaactgaaacagtggacgttacccaattcatatattaagaatgttaccctacattaacagaaagctacaaattatttagtaatgtgttagttgcctaaataatttaaatgtaaagatgtattaaagtgttagagtaaaaatcttaacaaattataactgagaaagaacaattaatgttttgcaacagaattggagtccttatcaactgtagggagcaaatcg

SEQ ID NO: 7941 - DNA, 3076 bp, Cucumis sativus
  Intron number 2 from transcript Cucsa.012110.1 (locus Cucs a.012110) derived from phytozome v7.0 (chr-ID scaffold0015 4; pos 1558181 to 1561256)
gtgccgtcgacttgggatccccctgctattgccaggtaattccaattccttaatttaaaagctatttcttttttctaaataaaaaaatatcagttaatttataaattttaacggtaaatttaaaaattagaaatggaggatataattttcacttggaaatactttatgcttcaaagatgatgttagtatcttaatggttgaacatttcaactctccatttttattttttaaaaaatgttttattgttttttgtatttgatctcttaaatttaatattgatttcttaagctaaaagtgatgatttgaatgaagataatgggggggtaactttggtttaattttaaatggtagtggctaaagttgaagttcaatgatggttcttttttatttatgtcatagttgaaatgatggttaaaggactctaaggagtgaatgtctatatataatttatttcaaaagttgaaccatcaaaggaaatggttaatgacttttgttttcaaactttttaattagaataaaaatctaacaaaataactcaatagagacaattgatcgaatttacttttgaagggataataattagtaaaaacagaagttgaaacgtgtcaacattgtattggtgtagcaagggcggtaaaagagatagatgcagccctatactccaactacacctaaatttttgtcttattaaaaagaagtaaaatgattattggcaaactaaaattttaaattccatgatcacatatgtttaatgtttttacaaaaagctaacccaaaagagatatgcatattctataggcatcattagtagctatatcactatagatcctaaaattttaaatatactactaagaagcaccataaatattttagattcattttcttctaaataaatatattgaatccttttttggaaaacacattgctaaaataacttttaattcatggaaaaggaggagaacaacctcatgttaccttcttaaaaatgaacctattatagctagtcaaatatatattagaaatactaaagttaaattgcttttaaacttatgaaccaagataatattttaaccaatataaaaacaatagtattaaattgatgtatgaaatatgatgagggaaataggttgggattcttgacttgggcaagtgggaaattattagcttaacaaatctttacctatcaatgacaagacagctattgagaaagagaatacgaaagttcatattgctccaaagatgtatttatcaatttcttttctctttattttaactttaaattccatttcaacccatgaattttttataatattctaaaatagacttaaacaaatatcctttaaaagtttggaattatcttttatattagtttagaaactaaaatacaaccatcaacaaaatttgattatttattttttaaatagattaatgatattcttgttagaagaaatctgaccagttcattacattagagtttcaaaatattctgtcatttttgctctcaattatttttgtagtattataaacctttactctatggtcaccctattggttgttcatggagtcttccatctatatatgtcttcatataccaactctacttaatatgtaattaattttcctgatgtagattttttttaattcaataaatttcataactataataaataaatgaatttttttttcaaattacctatatttattgtttgtcatgttaacatacatgtcaaatagtgtgaaattccaccgacatggatatgaagtcaacttgtatctctctctctatcattaaagtaaaattttattaatttattaacaaaattctatattaacccataaattgataaattgatttttttttaaaaaaggaaaagtccaaaaaatcagctttattttatttttatttacaacaacttaaggatggctgagtatttggttatgctaataaacaaatctcaaaccttgattgtaatagatagtcaactcatctaattgctgacattatttatttatttattgacaatgacataagtgagagtatgggtagagggcttcaaatatgaaggtatatttcaaatgaattaaatatttatatgttgttaacatgttagagtcatcctgaaatagttagaattaatttagttcaaatagacattttacacttttaaaagtaattttcatatactatactatgagttgaattgatttcgatccattttgacaactcattttagtccttttgaaataagatctagtaattgttattaaatgcttcacaaatttcaaacgtagaaatttgttgggcagcctcttttgaggatcatttcagggtcttgattgacttttaattctttgtgttctaattcactttttctacctctatattaataaaccatttttaagattgttaaactcaaagatatagaaaattgggtaatggttaggtgtagtctagactatgtttatatctcatgcaacttttttgttacatagtaaaaggaagtaattccattctttaacagtgaaatatttgccacatatgatcacaggtgtaaacaatctatgtattattctaacctgaaccaatctttaatgtattataatgttcaaaattgatagatgctaactattagattttgtttccgaaacataaatttccatatgatcatgaaataatatgaacaatcaatattgtcttaatatactttacttcaaagttgtgttttgtcaaactcaagaaagaaagacaaaaatatagacttatattttgtctctgagtcaatggcttccaggaaattagagaggggaaaaaatggattggactttccaaagttgcacagaagaaaaattgaattttttacattttaatctttgttcctttggactatgtactgaaattttatcgtctaagatactcttctcattctccataattttttaaaatacatgtggtgggtttgcctgtaatctcaactagggtgtaagaaaccgatgaaccaaaccaaactaataggaaaaaaaaattgaagtttaaataaagggggtatataattatggaacaggttcatagagaagt

SEQ ID NO: 7942 - DNA, 3053 bp, Cucumis sativus
  Intron number 6 from transcript Cucsa.088920.1 (locus Cucs a.088920) derived from phytozome v7.0 (chr-ID scaffold0089 4; pos 134653 to 137705 reverse strand)
agaacacaatctctcttcttgtgaaaactcaaaatgtaagtcctacttgttataaatttatgtgttcaatcttttcttaaaagtattattcttttcactttcaatatatatctgatgatccaaatcttaggaaaaaaatggtttgcaaattgcaattgcatatgatctcagggagatgttaaaagtgctgtaaatctagttatggatgtatttgtacattgaccaatgtgcatgggtcctcagaaggagtatatcaatggatattctaggaacaatcgtgacaatgctgaaaaattggattaataaaacttcatcaaacaactaccaaactcctggggaataatcttggaaaagattgatctatatctataggctaagatgaaaaattggattaataaaactttatcaaacaactaccaaactcctggggaataatcttggaaaagattgatctatatctataggctaagaaggtggttatatggatattattaaggacataaatatatattgatgagaatctagatttcattagaaaagagaatgtattgcgaactgcaaagtaacaaacatgatgtccggttattgagcgaacatgtaagcttgtaagtacaatagtgtttagactttaaagaccaaagggacacaatgcaaggctgtaattatgtaatcatttggactcaaatcctataattattagggatattggatgttccggggtgtatgcggttatttgggacatttggggtgagaggaacgatagggtgttcatgttctgggggagagagagggatcttagtgagatttggtcattgattagatttcatgtgacttttcgggctgcgatttcaaagaacttttgtattacttagttggtccctctttttgtaagtagggtggcttggtgggctgttctttttatatgcccttgtattctttcaatttttagggatatcattgattaactagcaaggttgttgtagttgaatgattacaattaacgagttacaaacatcttcctcctcctttcctaaacaaatgccctcagcagtttggaaatccagagtccaagggatttcagtgattgaatatggattttgctttatgggagtttaaatatggcagaaactctccaaaaagaaccttcctggaacagttttgtatccccaggctctctaagtgtgtttcgtgttcttccaataatgtaagtcagcagcatatatttttccaatcttcatatgcattggatatttggtattccttatttcataccttcaaatatcaatgggttttctggagaagtttgagcagtaatgtgtttcagcttctatatgttccagttttatcttctcaagctcttctattattggttaatgctagatataatatacttaaatctaccttcaccactaacttaagcttttgggccaatgagtgatttaagatggtatcagaacatggggtctagggaggtcttgtgttcaagcccatgcgatgttatttcctcccccatttaatatgattttgacttgtttggttcaaacccataagttagggagtgtttttttttaaacggagacaagcttctttagtgatagaatctcaaagtacaagataattatacaatgaggataatggagaagcctagagagagagaaatagatagataggatcaggagatgcacctagacatctcaattaggttgacaccctatagtgccatcattatattccaaagaaaaagcatataaagaccagatacagcagtacaaaaccagccaaactagacaatgtttaaaccgaagaaaagcaagacaagaaaagaaacaaaacagagaagactactcttcaaaaaagccatagcttccataagtgaggcagtgttaggtatgtataactaaatctaccttcatcaccagtttaagcttttgagtcagtcggtctaatgctgtcaaacatatcttgcagaaatatggttcaagcgaaaccaacagacatatgaacattattctcctaatggcatttgattatttgggatgcgtttgctaatccctctcagtctcaggacatcctgtattttacatatttatttttcaccacttcattcaggagagtttgtatcattaacatttttgttcccttccttcaatcaatgaagagtttgcatcttgttaaaagaaaaataaaaaaatagcaaagaaagtaagaaggaaaaaaaggagttagccatattgggaattaagcagaaccttccagtttttctttcttatccctacattttctactatttccccttccattcatggttcttatcactcaggcccttagtttgatggtatcccttctttttgtactttttggttggtcctaaggaataggtttattgtttacatttagaaaaaagatctgtcttcattaatgaacgtaaaagcgatacatcaataaatctgtaccatttgctctaattcaataaagaaaaaattatctgagcatgtagaattgtaaggagattggacttcctcctcaatgcatttctgtcttcagtacaatttatttatgttttacacaaaagccgaactacttgaataatgatactaaacgagtacgtatttgttttctgagggttgatattactgactttgggtcacttaatggaaggaattattctggagtgaagtatagagtaatgttcccattgtatgcgaagcattaagcagatttcatacttctcttttcttaatcttgtaggaatagtagtattataacttaaaggaaagatctttagcagctagcaggactactaacttgtatcttggatttatgcagctgcacatgcatgatacgattaagtaacacatttatttgacaatatcatttacaattataaagagaggatttccctaatttctaccagttttttagttttattgtatattaagcagagattatttggagtatgtgattctttttcacaaattgttggtaaatgtgtatttctgattttgttcttacaacacaaactttccatgtaggataaagtagtatcctttcca

SEQ ID NO: 7943 - DNA, 2657 bp, Cucumis sativus
  Intron number 2 from transcript Cucsa.107870.2 (locus Cucs a.107870) derived from phytozome v7.0 (chr-ID scaffold0093 1; pos 143169 to 145825 reverse strand)
gcgccggagcgggaaactggcttctacagttcgaggtgaaaaacgaaaattattttctcttctttttactcttctttttattttattttatttctattctttccggaattataattcatttgtgccctcttccaatgactgcttgacacgtttgattcccatctggcataattattaacccccacactggctctctctccatggaaaaattcacacacaacccacagggtaaatgtacaacccttcatacaaatagattcgctacacctgaagagaatttttctaataggacactgtgtagtattataatttttttctaagtttggagatagatgaaatttggtttgtaggatttataattggagtttagtttttagaactggttatcaaatcaactaaattctaaccttgaaaatcatagaaggctaaactataatgtgaacaaagaaattagcatatactaatgtactatataatgtcttcatccaatcaatgacttaataaattagcatatactgatttactatatgtgagttttttagaacaacaaagttgatgctatacacataacacattacaggagtgaacagacttccgtaaaaactctatcaaaactattaaataatcaagatgccaacttccaatttaaaaaaggaaaaagtaaaaataacatatatttgaataaagttatattatagtatgattattttgttaataagtccaattcttaaaatataaataatattgaggggaaaagttgtaggacgacgtttcttagatttgtttgcacattgttgtgtgtttggcttgcggtgggttgcactgttgttggtattatatttatgttcccacgttggataatatatttattttccatgcttggttggacaaggattccacgctgtctcttgtgtaataattttgtttccaaaattagtatatgttttacgatttttacccttttatccctaattttttctttttaatttttatttcctttcctttttaatcattttatggctgaattttgaatatatatattacaatttcatcttgaaatattgttaaccaccgttttttctatttgatgttcttttatttaattatttagaataatttttaatttatagtaataaaaaattagtggaaaaaaaattaagaatctaaatgttgaaatctaaatatcaaataaaaacaaaatttaaaacttaatgaggaaactaaatattttaaagtttaacaatttagaagaaactaaactcaaaagaagataaaaagtttaggaggcttaaaaaagtaatttttcatcatattatataatttacatatgtactccatgcccgaaatggacgataaaatcaattgcaaaagtgaatcactagtcgttatcaaatacacatatatataactcaataattagaatgctgactaaaagtctcatgcaaatacccaattattagaataatttagggccgccaaccattataggtgtattattatttcattttgggctttttaaaatatttttttttaattataattcaacaatgtaggtgagtgttataatttgatgatatctaactttttggttgtccaaaattatttgataatgttggttttcaactcaataaaaaaaaaaaaaaactcataagagtggatttcttgcatttttcaacatggaattttcaaatatggctttgaataccatagtataaaattttgtctcaaagtcaattgataataagagaggaggagtaacctatttaattgccatcaaatatgtaacatcaaccttgatgaatccatgccattaatttttcttttcaatgatataatttaaaactaatcctaatatgaatatcatttcacgacataatatttatattataaatatttaagtatttgaggttttggataccaaaatgaagaatagtgtaaaaaaaagtgaactagaatggatggttttattttcgtggcatggtcccaaatggatggtgttactaagagagaatgagtaatttacacggaactttgaattgaagaaagtgacagaaagtgagaacattcaagggaagaatggctcctcgttctggttaattatttggaacttggtgggtccgataacatatatatatatatatgaaaagatatgtattcttaagttatgtaactaagttttaaaataaattagtaaaatactaaaacaaagaataaaaacatcatagaggtaaatcaattccaaggtgattattacagttttaaatactctttgcttcaaatacctattagttttaaatactcttgcttcaaatacctattagttttaaatactcttgcttcaaatacctacttgatttattttaaaactactaatgagtagtctatctatctattaaggttgtgaagtttttcgatctttttgtaatgtgagatcatcgacatattctaataaaatagttttcttttttgttgacccatttttgaaatagatctcgattttttttttttaccaaattctcgtttttaccttgcatgagttattatatgatattagctggataagataaagtagcccaatcatttgggtttctttaataaaatccaaacgtaaatatgaaacttgatgattgtaataaaatagggtggtgggtggtgca

SEQ ID NO: 7944 - DNA, 5292 bp, Cucumis sativus
  Intron number 2 from transcript Cucsa.132180.1 (locus Cucs a.132180) derived from phytozome v7.0 (chr-ID scaffold0103 7; pos 212673 to 217964)
tcgaactacctgctcctcctggttggaagaaaaaggttttgatttctcctttgtggctttgatttttgtatgaattctctgtttttgttactcaattttgctctaaaatgttgaattatcatctggggttctgttgtttcctgattttagggcttctttggtggtaattcactgtcttttgtaactagggcttttctggaaggttgaattgtcaaatttcttgcttaattcttcttttgatttggtttttcagtgttttcttttggtgaattgtttgcaaattgttgctttctggtttctaatttttgccttgtttttacatcataatttgaattttggttgttttatacctgggttctggactaatttgtgttcccttttgcatctggtgcaagagagtgagtgagtgataaagttttcttgcattatctggggaggaccagggccgcaattgcttagtcatcgaaggttggaatcttttgtagtttatgagtcgtttccttcctcgattcccctagccccacaagtgtatattcgtgtgtgcgtattttctatccaatcacgtagctatatttcggaccagataccagccactggtacatttggtcggatttccacccccgcaatttaaatcatatctttcagctgattgttagtttgttatccttatctatctctgtacccttccataagacacatgttacatttatactatgttcttagtcagacaatcttgccaaataggtttcccttattcaggttataacttccagttccgaagttagaatgtaagcaaaaactctcacagctcttttcccacataatttggtaagaagtggatccgtttttcttggatgctagctacgtgtatagcctattgggggttgtatattgccttgaatatgttgatttggagttggattttatttccagaactggaataaattggatatcttcaaggttattttacggaggaatctgagtataatattgagatgttggatgactatagttgtttctatatatcatctcttttcttgctatcctcaaagataatcttttggcatgtagaagagactgcttcttttttggggaagctctagaggttgaggtctattgtggaagaaatgatataggggaattatagattggagattagaagagtgagattttaggaggatgtttgtcttaaggaaggaagtcttaaactgaaattggtaatgatcagtataaaaaatttccttccacttttactagtatcatcaaaataaaaaattatcctccaagtgatcaaataaatttcatacttcttctgaaaaaaaaacttttgatacttatggaaagaaaaggcattagggagatgacagctgacaggtgtgaatttcaaaaataggatgtggaattcggatatagttagtcaagggaataaattagcttggttgataactacagggagaagttagccaagttgagtgtgttactacagggagaattctggtatgtggtaggatcaactatctttggtttaccttctcttttgtacttttaccttatgtattcttctagaaacaataaatgccgctaccatgatggtttcagactagttcaagaatgaaatcaaattcaaatatgagatcttgactagatgtaatgaattgccgtagttagagatgatgaggacttgaaggaaatttcatttttaatatggagaagtatagagactatgatgttcttataggagctgtttttaaggaaaagaagaggaatgttccagcaccaatgggaagagaaacatacactggaagccaaggggataatctcctaagatgaatgatggagcaactaaaatagtaagagagtcaaatgggattgatatctaaagcttgaattcaagaattggtggaaagcatattcgatgttgtagatcatgatggttggttaatttgagttgaatgaaacttatgtatataatgactatacaaataagaagttggaacttggaggggagttatgtgtggaaggtgatgcagtgtcaatattcttaaaggaaaataggatttattgggttttgttcctatttaatattttccatatttgtatctttcctttattagaattttggtatctatttattcaccaatgtaataggctattgtgtactttgatttatccaatatattatataaaattatcagatatgatgtcaagaatgtctatgcagaatccaaaattggtttaatcacaaaaggttggttgtagctattaatctgttttggtcccaacaatttttttttcttggtgtagtctaatctgagggagaacacctgtagttttagatattgctgcaccactggcaaccaattgggcatagggacaagtttttataaatgtggttatttcctttccttacccttggataactcctaggttcttatttacatctttgattgtcgtggacacaaatccttatccatatctccaacttcaaaagaactaaattaagaacctagtgcaagggaatctactgccaggtaagctataatccaatacaagttcacgccttactatactacagttgtactgttcataaagtaagaacgctagtgattttatgttggctccattcaaccttaaacagtgagctttgagttacatttgtagttgtggagctactagatgaactacatgagactcgtcatcttcaagattgacttcgagtatgcatacatagaccagttctcgtcttgaaaattgatataaaaaagggtataacctgatttacaaaagcttgagaatgtgccttaaaccgcctcttgcacttatcaaaagcactataaatgttaggactccaatgcagttactgttgggcccagcggccctcccccttccctttagttgtgtatgttgaatttggtcatctttgaactcgttatgaaaaaaggtatgtacaaacttttttttcatgtttcttaaaaagaaaaaaacattacttttctcataaaaaataaataatttatctctaatttaagctgggagtcctattccctttatttaatttgtacataatgtttattaagtttcttgttttgtttgggtttcgtttttattcatggtgttagttaaaattgactaatcaaacttataaatatatatagtcacattttctaaataaactcatattgaacataacagcttgatatagtgtgagtgatcattataactttgatttgaatgttataaataaaattacatttcataattgtatgtcttaaacttataattatattaatttgtgctcctaactggcactgtttctggatcatgttgtttggcttggccaatgactaatcagctgtcaaatatcacatggacatatttagattgttcctttccaagtattctctagttttattaaccgaatgcttgcttacaatgctggttcagagctatgttctcagcatttgttctctgttttagacttcttcataaatatgctactggctaggtaccaatcactgcacttcttcacaccctcagattgattattttggtgatgtggtttccgagtaaggtagacagtttatgaccataaaatcgaaaatatgttgaattggtcatctccttccgtcggggcttacacgtttccactgaatatctttggctgattatagtttgactgcatttccctcatccatcacttgaaaaatagtagtttgtgtcgaaccccaaggctaaggaattctttccttgcctcaaagctattcattaaggaaactgatggtctggatcgaagatttctgtggatatacgagccaatgtcttatcacttggttgacccaagcttatccggagggtgtgattacaaacctatacataaaaggtagctgatgatgatcgtctttgccatttgaaaatggtctccattcatattgggcatgtgactcacaattcatacagatcaatgcatcttgaagttcttgcttaaaacaatgggtgcaagttccccaagtgggtgggaagcccacagttagttaaaggaatgagctgagaaataggatacatggcaaggattggtacattaatcttggaaagggagattgaggaatgtaagtgggtttttcctaccaggagaattctagttggatggagaattggtagcttctgtaagggctggccactctgtactttagccttagtctttcagaaatgataaaatctcctaatacatcattcatttcattagatctttttcagatggatgtggatggttaatgatgataaaaagaacaaaatttatcttcaagtaggcagcatgatagcagacgttctaccagaggagttgagcatcttttttattaatccacgtgctgtttcttaacagcacatcagattcatagccagcaggatgtttcttttaagcttttgaaatttagaattctcaaattctcagagattttttcttttggcatcttgattttgggaaggttaaatctttttatcttatacagaaactccagatagttctgcatcctcattggtgctgtttatgtaacaatactgattgctgacagcataaagaactccaattaatacagtctctttttcctaaattatgtgtggctttttcccccatttcccatatgcctggtgttagctggtgttttccacttgctgctgtgctgatttcctattaaagagaagatgaagattccatggtgaaatactgcttgttttttttttactttagagagcttatggctgaaaaggaacggaggtgttttgtatgagagagcggcaggactttcttgggtgtgaaaaggagaggatgtatatatatatattttttttgggcttctagagagttctctgtttatcattattctttcttaagtgctgtaatgtattccaatttgagattttttatcatcttcattgtggaggagagacttctagttttctgggttgtttggatgtatttttgtctcaatattgaaagattttctttgttgcaagagtatcattgcgttgagaggaccacttattttattgattgttcttcagtcacccttataacggaaaactaaaacttgtacatctatatatgaagagctaacctacgtatgaggtccgccttaacctatatttacacggttatttagcttctaatatcttgtattaataagaaaaagaacaaaagagagatctgagttgctggtttattggttgcaactgattgaacgatatgaatatttggcagttttttcctaagcaaggtaactcccctaggaaaca

SEQ ID NO: 7945 - DNA, 4365 bp, Cucumis sativus
  Intron number 1 from transcript Cucsa.372110.2 (locus Cucs a.372110) derived from phytozome v7.0 (chr-ID scaffold0370 3; pos 301277 to 305641)
caggtgcttgttctataatctgtacctttttttttatgtttttttattcattttctctctgtcttttcgatgcttcttatccttggcctatcgtgaaacttaaattatgtttggatgcattattgctggattgtgattaattagacatggaagggttccttgcccatggtttgaaggtgggtggtactttgtagcatgcagaaattggtatgtcttgattaccacaaagcttaagtgaacctgtgctaaagtgcagtgttggaatggaacaaagatgcttcttcagtgtagggatcctaaataatatagcaattagttatgcgcatgtactcaaaaatttgggcctgatgtaagagtggtgggagtgagacatcattaatatattttatgttgagaaagatgggaagtaggcgaggatttggttgtttgaacgtctaggaagcaggcgcggtttaacgatgtattgagaggtatggtataatgctgcacaggagaaaattattcctagacaagtggtctatcaacataaattctgaagaataattgtattgttttccatataagaataaagccttagagacattcgtgcgtaactcatccatccatgtaattgagttcttttttttttttttggtaagaaaaaaaactttggaggtataccatgtagacttgttcattgagttctccatgaaggaggtagttgtggtcacccaattgaggcattcacttgttaagaatatgccttacagagatacacagctgtcaattttatcgatgggagagtttgatggaggacttgggaatttaaagtctagacatatggctttgttacctagataggagcagtgttttacgaatgaaccacatgcttttcggaggaaagtcattatcacaattcgtggttcttcagttttttattggacttctgcttcaagaactaatttgggtcttcaaagtgcttgaatgaacatctcaaagctttggaagcaatttaatgctcttgctcttttcagattgggtaatgggagaagaattatgttttagaatggtatttggttaggaacttatttccctcggctgcttgctgtattttaatctcctaattgactttttcggatcactgggacgttccaattggtgcttgatttctttcgtcaacacttaatgaagaaatacttgagtttcaatcattaccatcctcagtttcagcagtttctattgattctagaatttggtctcttgaaccttcaagtattttctctatcaaatctttaaccacacgtttcgtatcttctttgccaagggataaagagttgtactcaagagcctttggaatttcaaggccaaaacggataaatattttgatatggattacgttgaattacaaccttattacttcagtccatttgaggacatccgatacaaccttattacttcataggtgttgaaaaagaaaaaattcatgaagtgcttaatggcatcagttcgccagcttttgccttgtgggggagggaacacttcttcatatattcttctatggctcctttgctaatcagatttcggtatgattgctttctattttgaatatccattgaacattcttcaataattttagaaatattgttacttgcttactggaattgtgctacacatcaaagccggattgttttcagtaaatgcagttagaacaattaaactttggttggaaaggaatgagcctatcttccatgataaacttttactggagtttgaatgttttgaattcttgaagtcctctacttggtgttctctttccaaattacctggggggttcttctattcaagtctagtgtttcaaaatgcccaaggctcactaaggcatatttgcctctaaagcctaggcacaaggtacacaaaaaaggtgtgggattttttttcgcatatcaaaaaatatatgtatactatatatatgtttatttacacaatcaaaacatagatggatagaaatgagacttaaaaagaatatacaaaaaacaaaagatagataagatttaaatagtgaaacaacacaaaaacaatcacaaatacaattctagatcctaaagatagaactcatcttcactaaataggtcttgatcttcattcgttccatcattcgacttataaccatccatatcttctttgttggtcttatagtcatccaaattaactggtgtgagggtggtggtttgtggaagatgaagatgaagatgaagcgttagtcttagacttcatttttaaggtaccgacactagaataatatgcaggtttttttgctctagcaactcttaaaatgtcgccccatgttaaagagtcgttatccaaaacaagatcctcctcctcctctgatcgtcaaccattctttcaatcagtcactcattactatcatctatctcttttaaagagatatggtcgaggatgttttgaatgttatgtctgcgtttcagtgctctattatattttatgagtaataaatcatttagacaactttgagcaaatctattccttttcatgctatgaagctacaagtatacataacaaaattttcatttttaacatctagaggcactacaagtaatagagatacctaacctatcaaaaacgctgcaattactttcacatctcaagacaccacaagtgaaacatcaaattctcttagcaaaattttgcaagttttgagttgattgtgtgacgatcccaccattccactaaagatcaaaactatattagtagctttcaattcgaaatgatattcaatgtttaatcaaagacttcaagttcaagttaactggagatattttgtctctgtctaattgctaaaggatgtccaaatagtctttcagctttcttgtatttggttacctctctaaagtggtttgtcttgaatgtccaaggaagcacccattttgttatgcatgtataaaacccgttaacaatttcatcatcaacttgaacatttggatttgaataataaaattttgggtttagataatatctggctacatgcaaaggaggatgcaactgaagcttcccattgttgatcaattactgtaaaaatatttttatacttttcttctttaccattgaaggatttggcgatgacctccttagctctatcacttgtatcccatcccataacaggccttttcttgctatccactgagtacttgaactaaagggccggatactttaagagcaaaaacaatggtattccaaaaactttaagagcaacaaggtgtttaggggcgtggagaggaaccctagtgaggtttggtttttggtgaggtttcatgcttctctctgggcttcggtttcgaaggtgtttttgtaattattatgtaggcagtattttacctagttacctagttggaaaccctttctttagtgggttctcttttggggcttgtttttttttggatgcccatgtattctttcatttttttctcagtgaaagccgttatttctataaaaaaaaaaggttgtcaacaaaattgtttgaacaaacttgtatgaggctgttcattgtatggaagacaaatttgtcttttgtttaaaaataacttatgttaagtagcagctcatgaactatgaagtgtggcctatgtgattctctgaccctttacttttgtaatttgatcttgcattatatatcttcatttattgatgttataaaattagggatttgatatgtatctctcttctctctttgcaaagattgattatattagtgatttgtttgtggaagtgcaccacgcgttttgttacaaggaattaatctattagagggtcccacttataaaaaatggtaaaatagtggttgacatgacaactttaaaaaatgtctataggatgtatgaatattagtggttactttgttctaagtttgtagacctttagaaagatgttgggaatctacaaattagtttgcaaacaacaaacgcagagtgagcaatagtatccttacatactagagatatttttaaaagttgtccaccactattttgccagcagcgccccaattcatggtaacaaaaacatggtgtacttttgatgcctctcttgttttggggagaagaaaatgtttcttgttgaagtacaaagaaaaagaaaaaaaatgatattcgagttgaaagcagatcctaatatctatctatcaaaagcaaatcacatgaatgggcttagagtcattcaaaagttttagctgcccatatggattatactgtgattggttgaatgctctacctaataacatgcgcactttggatgggctaatgatctaacaatcatttgtttgctgatttacttggcaaagctcattctcatcaggttctgctttgaggttcatat

SEQ ID NO: 7946 - DNA, 811 bp, Cucumis sativus
  Intron number 11 from transcript Cucsa.048530.1 (locus Cuc sa.048530) derived from phytozome v7.0 (chr-ID scaffold005 42; pos 3212094 to 3212904 reverse strand)
ggcaaactacatcaaagtcgggccctttgagaaaggtaagtctgcgatttgttgttttggaaagctaataaattttccattcaactcaacacattatcacataagtaatctgctacattacttactaaccatagctagtttttaaaggttttttatccacataactattgttctctcaatgtgttgacggatgagaaaatcttaagatgtttaatctctcaagtcaacatgtctcaagtttttttccccttatagtttatttttatttttatttttaagaaccatagctgattttaaaggtttatcgaaatttatgactgatatattcttccatggtctatctataaacctgtcgcagcttatgtacaaaacttcgaatatccttatagcaacaaaagaaaaagaaaaagaacacttgtgctaatagtagaaggtgacagtaacctttgataatataggaatgcttttaaggacatctttctaaagcagtatctacaaaactgttataagtaaaacatgtcagaagtaactattatttttaaatacaaaatgattgatcagcttgacgagtgcttgcaatgatacagcatctcaagattccactgcatgggaagaaatttgcatactagattctgttgattttcattttaatacttgctctagctcgaatatttacgttgttttattcttgaattgtggtgtgcatcttaccacaactgtttcttctcaaaaaattctctgtagcaaagcaactaattcgagcttttgttattcagcagaagctttcacccaaggacgtgaactttgttgg

SEQ ID NO: 7947 - DNA, 1085 bp, Cucumis sativus
  Intron number 1 from transcript Cucsa.167310.1 (locus Cucs a.167310) derived from phytozome v7.0 (chr-ID scaffold0115 4; pos 676888 to 677972)
aaaatctacaccttggcatactcttgagtatctctctcaaacggtttgcttgagttcattattaataatataataagtattagtaggctaaatttaaagttagaacctgtgatttggaaattttcgtctcctagatttttcatgtgattagaaaaactctttatggttggactactatttataagaattatatttcagcaaaccataaagggtatatatatattttaagtttaatagaataggactacatacgcatacagactaaaccctaacttgctctagatcataaggattcaattttaattagtattgaaatcctaaatctctgaccatataagacatagaaccttttataatgttttatgttgaggttgagaagttatttaatatccatgtacttatactaataaagaaaattaaataaagaatattttaaaaaagaacaaaatcaatcaaaataggtttgcaaaatttaagattttatggtatattttgtaaatacttaaaccattttttcatttataataattttcattaaaataattattaaaatcaaaatcaattaaccatgcccgaatgattataggatacttaaaaagattgttctttttgtgtctcataaattagttaaatgtattcaaatatttaaagtttattaaaattatgataatttagtgtggttaaattacaagtatagtaattgtacttcaaatttgtatgattattttggttactaaatttttaagagtgtattttgataggtctataaactttccttttgtgaaattaaagctttcaactttcaacacattggtgaagtgttggaactttagaaaatatctaatagctgttcaatattcaattttgtattcaatatattggttttggacataatttattagatataaaattcaaactttattaagaaactagggctaaccttacttacataacttgatgaaattatcccttacaaatgtatgagtttggtcatatttgatatactcagttattgatgattgattgtaggtggaaatatttcaagtgaaggaggcaaaccaaatccaacagcttcatttctctca

SEQ ID NO: 7948 - DNA, 8141 bp, Cucumis sativus
  Intron number 1 from transcript Cucsa.291710.1 (locus Cucs a.291710) derived from phytozome v7.0 (chr-ID scaffold0276 6; pos 264989 to 273129)
tttgttggagctcgaagcacctatcaagatttgtggtatctttttcctacaacactacttgctttctcttgagatttactatttcgttttctttgttgatattgtaatacacaagtttgaagtttttgatttgttgctgctgcgaaagggtttggagctttcttagtcgtacttattgaattcttttggttaattggtcttctggttgacatatttgaagtacttgatttgcggggttttatctctttttctttgctctgttgttatatagcagtactttgtcaacttcttttagttttaacatcttttgtcgaataccatttgattaattggcacctagttgatgaacctgcaaagctttatttatatatgatttcggcaagatgcaagtacttaagctaagcttattttggtctgacatggttgtattattgtctaagaagtatggacacaaatatgagacacgggcacggtaacacaccattttttaaaaatctagaacacgacacggcaaagtcatatgtattaaaaaaatatataccatttttatggtaaaaaaattatagtaaatgcattgacgcatttatatgcttaaaaaacttagtttgatgtattatacacttaaaagttattattattgtcatatatgtgtctttttagtctatttaacgagtgttctatgtatgtccaatgcatttactgcactaacacgtgttcgaataggtatccaccaagtgtctcacacgtgttggagacagacacactagctaaagtaaagtgtctgtgcttcttagattattgtatattgttaaactgctttgccccattcaggcttcccattggttaagtggtccatggtttatgaacctgaggaggtctttatgtggatagaaaatgcaaacgcagatacatgtatgcgtatattattgcaatattcatacattgtgttttgcatggaagctttattcatgtttttcttttgttcatttttcattaatctagtttgtcaaacgcttatttaagtactttaagcactgtggtaaagtgtgttgaataacaaatcacttaaatgttcggttttgcactattataagagtttttgaattactttttagctaagcacttgggccaaacacattttagaaatactccttcacaagtactttacgtgatgtggtgtgtaggtccatcaagttttatggtatgtacaaaccatggcttttattttctcccttcctccctactttatgttttttttaaaaaaaaattggtagaatgaacgattttgattgaaaatgaatgaaagaatacagaagggcaaaaccataaaggaccatactgttggatcaacgagagccttgagaataaggaaaggttggaaaaaaaataaaagaaaataacaaaactgggcttcaattcgaaaggctgagagataaaaatggcactttactaattgttaaaggcattgatgaaggaagtctaaacggaggcattgaacctaatcagagcccaaacctctcccaagaacattctttatcactaaagactctcctatttctctcaagccaaactccatgaagaagcaaataatgttttccagaagagtctaaaccctaaaacaataaacaaactaggagaacaaggctgtcaagggaagtgcaataaactaggagaacaaacttgattagcttgtgccataaattgttaggttcccaaggaaagtgaaataaccatttagccaacaaaaggctgctttacgcactctcatatggagtatgacccctcaaaagaaatcattctcaattttggatcagtatgactttttgaaatttaaggatggatggagctttaattcaatttcaattaatctcttcattacttgtttgttcccttttactttttggaacttcattttcaagtctttttgttggtcgattgttccacccaactatattctttctctcttgcatatgattatttttggtcatcctttcaagaatgtggaaacttttatagcataatgtcaattaggcttttctttggtcactttggcttgacaggacttaacgtatcttttctaatgccaccaaggaccatgaatctttcatctcttttgttatgtatacggcatttgctaggggtgttcaaaaaactcgtaacctgaccaacctggattactcaacccaaactgtaagggttgggttagaaaattggaggaaaaaaaattgagccggatagttgggttgaccctgcctaacctgattatgtatataatatattatataaacttaaaacctaaaagtaaaccttcttttgaatggacattgtagacttggaatttaaatttggaccatttctagatttgtgcatgtcatcttgcgcaggggccatgctaatcttctctgtattgttccaattttatcggacattgtagacttggaatttaaatttagacttggaatttgaatgtgtaacatatgtatgtcgtcttgcacattgaatgacaatttgttcactttgcatattggaaaagaataggaaaatttgtctaaattatgtagaaatgaaaaaagtaaaccaacccgcctacccaacccggattttttgggttgggttgacccttgcatcttgaaccaatagggttcattttttgccaacccggatactttaggttggtctataattttcctccaactcggcttatgtacacccttagctcttgctatgtgtaaattgcttcctcctttctataattgtgaattaagggtttcatgtgggttgtctttgattttgaaatgatacaatcatctgttttgtttggttaaggataatttatttattagtctttactccattttggccgtgcttgagatcatttaaggatttaagattgataaggactcgacaagatgtaaggtatcccttacaatattactgaatgaagaaaggcctaaggcagtacactcctctctctctgtgagagttctcttccaaaagctgaaaatgaaattcctcatctaccctaatataataccttccctacagaagatgttctcctcactcacaatggtccccacaccccaattttcttccaacatcccttactcctccctcgattaccgcttgctggctcttgtactgatggatgattggtgatctaacacaagatttctctatgtaacataagttgtatgtcctgaagctgagatggagagcaaggtaaggttggtgccatttcttatatctatctagatcttccttagggcagaataagttgttggtttggagtatttggttcgagaggaataggaagagtttgaggggttcgagaaatctcgagagtacttgtggttaattgctagatttagcttctactttggcatttgtttttggaggcatttgcaattattctttaggtttggtcctttggaattggagccttttctgtacactttctcttgcttttcaatgttctggcgttgattttttcatgcttataggaagattgtctgtaagggaagtccctttggctttttctctgctgtctttaccatttagcgttcttcaaatttatttatgtcgattttgttctcctttttctctcgagactctccttgtaaaacatatgaccatgtagtccatgtattatttctttattttttaatgggtctttcatgggaggatcaacattattggcctgagatcattttcttttcttctgtgactccgatggtctagtgtcagtaaaagttctttgactgatacgaagttaatattgatatgtaactaaatttaccataatctactaaagccgtttgagttcaacggtgagttaacttggtatgattggagaggaccatatgtttgaattcctatattgtcatgtcattccttattaatattgattttcacatgttggcctattctaagcctacaagtgaggggagtattaaagtgttgacattatacaaatagtggtgaatagaatgaagcatgttatgtggagtaggggtggaaacaattctgtttggtggtcaaaccgaatcgaaccagttttattttccaacacatgtgaaaccaaccgaacccgatttatcaatttgaaccgcaccaaacggaaccacatatatgcaattcagttcagtttgattttggttttcaaaaacagagatgtgagggagatatattgaacagagagatgaagaagacatgttagttgttttgttttctttcacgttcttgtgggttttttccttcattgagggggagtcttttagtgggtagtttgagacaatccactttcattcctttgttttgtgttgttgctgctctggcaaagacactttccgatttattgtagtatggttagatgtcttagtttcttattatgagtttgaggagaagaaagtgatgtatagttaggttttttttcccgcatcatttgcttttggataagtatggaagataggtttatggaagacagattgaatgtgatggtgatggagataagggagatagattgaatggagatgaagattgaatgtagatggatgaagacgggcaatcgaagatggagataagggagaatgaagatttagatgagggagaatcaaagatggagggtgaggctgtgagggagaatcagagagattgagagatgcagaagaatgggttgggcgtgggagttggcaagcaagacaacaagttaacccttatatatatattgaagaaaaccctaatatacatgtgtgtgtatcatttaagcagtttgattttgttttcgaaattgaaaccgagccaaatcgaataattcggtttccatattcctttaaatcgaaccaaaccgcatttttcgattttggtgagattttgatttggtttgtttttgcaattttaatgaccatccctaatgtgaagttgttgatttgctggagtaatttgagacaatttttttagaggcttttggtgtgcaaagggctcgtaacaggtcttagtccatgatttaggggacatttgggcccccaagttgagtcgtgtggagtaagttattatattattacactcaaagaccatagtagctaatttaacatcccaaatagtttcttaggtgttattttacctccattttgaataaggtggcttctctttggcaagctacttaccttgctgtctcatagaacctaaaactagggttgtcaaagtgtaaaaccaagtgtgttgaaattgaattttagtgtatcgtgtattgtaagttttgatttgttagataacatttaagcatgtgatgcatataaatataaaagctgaaaatagagaaataaatagttgtgcattaatggatacaaaatatatgtaaaaacactaaggggttgtttgagcggttgacttgatttggcatgtatggaattcatatgtctggagagtttatatgtttggagagtttatatgtttatccttggagatgcagagttgttttgtcttaattcatatgtttgtatttggggtgcaaggttgacttcatatgtccggggcgtctggttgtgtgtttttaactcttcataatctttctttgtgattaccatttttaaaattattatttgattgcattttttaaaaaagtttttctcatttttttaaaaagtttttctttctttgaattttttgtttttctttttgttaatgaacaataacaacaattaaccaactttatttttctacaggaatatagttaaaaaaccaaagagaaatcaaaacttttttttccataaattttctcatcatattctttttcttcttcttcctgtatttttcctttatcattagttttttttaatgaaatctcccatcttagtagccgatgtgatattactacttttcttcaacaattactgtttcaatttctccaaatttggagtattatcaaagaacaaatcccaattttttcatcatttcttgctagaaaaggctctacaaaacaaatccctattttttatatttgttatttttgtttgtttgtttcttaactatttgttccaccattcaactgtatacatacttttctaaattcttaatactcatttgatatgtgaattcattttaaatataactatattgcacttaaagtagacaaaatgcaattatttataaggcaaaatacacttttggtccttggggtttaaagttaatgtctatttggtccctggagtttcaaaatgaaccctttagtcctcaaggtttgagaaatagttctagatggtcctgaagctactttgactttttgttgactaacggtagaatgactaggtgggttaactgatattaagctagctaatttgacaatttcttttgctgatttggcctctctcttcaatctctcttttccatcctctcctccaacctagcgagcccgactattgtttcacttgtcgtcgtgcatcgactagtgaagaatgctggtaacacatctcttcttcatcctctgtttcttcttcatttagatttgaaggagaagcttcttcattcttgttgttgaccttcaaagtttcaaagtttagttccactatgttcttgttgaccttcttagatatgaaatgtcaatctctgtgttttgttttgtcattatggatattattgtttgctatgccgattgttgcttgactgtcacaaagtattttaaataaacttcgagtttctatccatagttctttcaaaagcttttgtgtcaatcatcccttcacaagttagacctcaatattcaacatctgtactacttctgggtacatcagactattttttgcttctccaggtgactaagttgcctcaaacataagagcaatatcctgggttattaaattaccgattgacctaaaactttatgttgatgggcgaaggaaaattaagaagacccaacaagcggaaactaattttaatttgagaggaaataacactgcgtgggcttgagctcatgactagagacgtccacgggggtggggtggggcaggggatgccattccctgtccccatccccatgaaattcctctcggggaatttgtagggatcgggtttccctcaggaaaatttcccccttttgtttaaagaaaccaattaatttaaatcactagtgtaggaaaattctaattaaataattaatctatcactaagttgcttattatcgttagtcttatattacaatttgaattttaaagacaaattagtcaaattttggcctaagaaacaaatcaacttttttgtagaaataaataaacataaagcaatttgtggtttgtggtttgttgggtgtgtgttgtgctatgggatatttgggggtagaagaacaatagaattttcaaacgtatggatggggaactctgttgaggtttgattcttgttgaaatttcatttgttactttgggcttcggttatgaagtttttttttgtaattattctctcaaagttggaattcattcctttagaaggggtgttatggtgggcctttgttttcccttttatgtcttgtatcatttcatgttttcaatgcaagccgtttattctatcaaaaaaattgaaaaatgaacgctgccggaaaattacagtcaaggtgtccaaacttgttttcttttacctcagcttctgtgcactttgaacattgagcaaataaacattcttagaatcattaaaatgaaccaagagtcaagaccctctgtattaatatgataaaagcattcatttggggttatggctaaaggaacagaagatcggggatctatcttaaatttggctaaattttatgctacccagcatggattcccctaattttttttttttttttttgtaattatgatctctttgtaattgattaaattgagtatttttttaaaataaagaaagtaaaattaataattatgcacaatacatttattagttagtttgtatcctctgatgaggtgaacatgtcaaccatgaattttgatgtattgtgctgattctgtttgatggctggtttcattacacactttgaggggcttgcttaggggagggttcaaattggtttttgcaagttccatttcttcttagttatatttgtcttcaataatcgttggtcctgctaatgttgttctatttgtgatctgtaggtgatatac

SEQ ID NO: 7949 - DNA, 1750 bp, Cucumis sativus
  Intron number 9 from transcript Cucsa.332770.1 (locus Cucs a.332770) derived from phytozome v7.0 (chr-ID scaffold0326 4; pos 585918 to 587667 reverse strand)
agctgcttcgtgtaaccagcattgacattgctctggtactttcctctatatcatgagtccgttcctttattgctaaattttcacgtggactaaaaaatatattcatgtcctacacctatctatcctagttgatattttcatatctttggatgtgtgagtttactagatcgatctgagattatctcttttagacgtttgagaccttgcttactctacataaggacatgagtgattcaatcagagagttccttcttcatcccccttttgtgagaaggatattttttttgtggcctattgggatgctttctattttgtgggatcttttggtaagcgtaagaatagagtgtttagaggggtggaaaaggaattcttttgatgtttggtcgctcgttagattccatatttccctttgagtttaaattttgaaaaccttttgtagttactccatagatgctatctggtatagttggagctccgctgtttttgttgagcatgtgtttttgtatgcacttttatgcctttatttttttctcaatgaaagtggctgtttccattaaaaaagaaaaaaagaaagataagaaaaaaaaaagaatgagattcttacttttatttcaaaaagagttaaatgttctggaagtcccttggtagacatcaatttgtttctagaaaaaaaaaacttttcattatacatcagtctcaccatttgagtccatatgatcgttgctgaagtcttggtgaaatggtccaaaagtgttctgtttccatatcttcatatctcaggccacttttaccattattagacaaactattgactctatttatggccaagatagcagttgatgggtggtgacggagtcttggaaaaacaaaaggagaggttggtttccaactactccacataaagcccacaataatgaggtaggttcggagttttggattctttggaatggtgggtgtggtgttgtattttctagtttagattttttgttgtccttgatgggaaaccaaaaggagtttggtctctcaaaaaggaattttttttgtatgcggccactaattttgctgctcacaataacagttggttatggattcagaaatttacacgttcctaataatcacgcgatataactttgaggttcttttacagtttctctctcgtttcaacaaagcaaaactgtcagccacgttatggcctcctcaaacaatttcttttagaaaaggaattcacttttgttagaggtagaggaaagcaaatgaaatgatggtcaaactttctgcaacgattttcagatgttggaatttcttgtcttaatggcatcctattccttgctttatatgtaattagtaaaaaagcccaagcattctggtggagttcatcaacctgtaaaaatgtctgtttcctgattattccaatgtattgttgagtttgaaatatttcagcacattgtttcttggcttcttggtactagctacttggagagatttttgtcatcttcttattatagtttcgtgtttgtcatccctcccttctgctacttgcctctttccttctctacagaattattgaccttcgtgggctgcacaactctctaatttctttcttgttttactaaaccttgctcattatttcaatcaaaaagagaaactcagcatcatatatttatcaataatttcttttgggttatcttctctcatcgttgatcctgacatttcaggttgtactaaaggaaaacttaattctttcattatt

SEQ ID NO: 7950 - DNA, 1011 bp, Cucumis sativus
  Intron number 7 from transcript Cucsa.025200.1 (locus Cucs a.025200) derived from phytozome v7.0 (chr-ID scaffold0034 5; pos 77829 to 78839 reverse strand)
tggtatgttacttaactctcttgatggttcattagaaattagtattgggttattacttgctgtttgaagtaaatgtagcagaagaatatttttggttaattgagattgaaataacgattgaataaataaaccattcagatgaattgaaatcatattgcccatgcaccctatgcaatttccattagatttttacttgtgatatctgtacaactaaaccattgctttttacaaccctcgtttagatcgcatgtattgtttcatgagtattagtagtaaatgtccaggattttagatatatgagataattaatgtacttatgtgatgtttaatgtctaggagttaaatatctatgtttgttttacaaattttgtatttgcagtaaactaaaatgaaataattacttgattagatgtaaaaaaaccatccatgtaggcatgaactaaattttgtattattaaatatactgttgtattaattaattatttaatcagttaaaatataaataaatgaaatttttacatcgaacactaattgaatgtaatattgattattaaatggtctaaaattaatgagtataaaatcaattagaatattaataattaataataaaatttgatattaaatagttaagaatctaagatgatataaaatatcaattgcatatgtgtagttgaaatttattgaataggaattatatgttaatatttaacaattaattcaaattgatatacgtctcacaaaaaatcaaattggtattgattcattagtttattaggttttattgtagggtattaaaagactcatgtcaaatgggtataggaacatgagttttagaaaatgaattctgtaaaacaaataaggatattaaatgcctgaaaactcatagcaaagcatgtgaaacaaacatgccgttagggtctattttcccctgtttttaatggatagagagattaacattttgtttttatgattacaggatcttgctattctactcctttgcgtgataaccac

SEQ ID NO: 7951 - DNA, 530 bp, Cucumis sativus
  Intron number 3 from transcript Cucsa.350710.1 (locus Cucs a.350710) derived from phytozome v7.0 (chr-ID scaffold0350 4; pos 186517 to 187046)
agcttcaacaagtaaagctactagaaagtatcccggtaaagatctcattttctcagaaaatttattaatcacataggatgtcttcttttctactataagttatttgatcgattgaatgaagcacatataaaagacccaatcacatagaaaaaaagacttgcattgtagttcatacccaaatttctgaaaataattgaacatgcgagaaaagaagtagaatttgcttcttataaagagctctaggtaatttaccccaagaaccttaacttgattctctaaaatatgacctccagggaataaataaagcagaatgcagaataaggtctaccctgtgaaatggcttgtaataccttgttgatgaatattggacttaaatatgtagattctgggaatgaagggaaaagttttagtatttctaattgacttctgttcatgcgtagtgtgcaacttatctagtaaacttttgatatgcaattatattatggttgttgtcaggtgaaaagaagaaatatcgtaaagaagcaattgca

SEQ ID NO: 7952 - DNA, 2731 bp, Cucumis sativus
  Intron number 1 from transcript Cucsa.184550.2 (locus Cucs a.184550) derived from phytozome v7.0 (chr-ID scaffold0127 4; pos 231444 to 234174)
ctgagcaatacaccacaaatttcctcttcttccaggtataactgctcgttctttttcatttctttcttcttctttaccaatgctgccttaattttgtttatacccgtttcataattttcccttattgttcaataattcttggattttttctgttttgaatcttcggttcttctttatcacccactttttctttggttgaattcgacgccggtttaactttgaaagcaaatttgcggtctaatttattcttttctcccctagtttgtggatgtttgagtaaatgacacgattatgagttcagtcgagtttttatattgtttcccccctttgtaaattttaggttttggtataatttgtgattgtgtgtttggattagatgatgggtttatattgattcttgcatacggtaggttgttggctagaatttccttgatattagagtctgagcagtttaactcatgcggatatggcctggaagtttgatgccatttaggcagtttaggtgcaagaacccgggatcatgcacaatagatggagcttgttaccgcattatcaaaacgggttattgggataatactctattctgtttagtttgagttggagagtttttatcgaaaatctcttgcccttgactggtatcagtatcttgtactaagtctgtcttaaatctctagaccagaggttttattaagtcttcttcttcattctgataagttaaaggtttctacattgcttttcttggaaccttcaaatggttgagtggaaaactgtggatcttacatcctaattaataagttccattatcatgtcctgttgaataattctgccagattttctcttctctaagcattgccaattcaagcttaattctctagactcgaggttttatttagtcttattcttcttcttgttaagtatgaatatatttcagcacaaagggtttctacgttgctttttttggaatcttcaaatggttttttgtggaaaactgtggatgtccttacataataagtaataagttccattatctgttgagtgattttgttcagattttgtcttctctatgaattgatatgttttggcgtatctcttttcttcatacatatattattgaagcagactaggaaaagctgaaatatttaagaaagggaagatctttctcttattcttcaaaataagtaggtgagaagacgaggtcaccttctttcgttgtttcaatattcattagtttgcttagtatatggtgacaatcttttggtctcattggaatctttttactcatatacagcatgctctatttcgagggttctttgaagatattatttttaacttataattcttttagtaacttttaatattgttagtttcaactgtgaacttggaactcgtagatgatgtatataattgcactataagaggtctgatcttgtttctagaaccagaaatcttccgtcttggaagagtttggcagaggggataaaggtcgagtttagaatgatgtcgcatataaagaaactagtgtggaaaggatgagatgttagatgattagttaatttttatatagtcaagttattagattttgttgatttcttttttattagaatgttctctcacaacttgaagatgtttcttctgtgttcacggaatggattccctagttgttcttgatcattggcatgctttaactaacttttttgtatcaaagatattcttgaacctacattgaaatgttaagggtttgaagttacatcacttattttttttaaaaaatgtccaaccaaatttgtttatcaattttccatagttgtggatgcttattatctaattccggtgcctcgttctttgttaaaactttggcttgtatgtcttcactcttcgctaatctctttctaaccaaaaaagaagttaataataaaaataaaaaaagtattcactaatctcttaatatcctggtacttacgtttgcatttcttttacatatctaactttattgacttgagtaatgaatgtagagtcattcattaattgagacatgacaaattgtagtttttcttcaggctttgtaactgaagctcacagacaagtatattatttgcgcaatttttttgggtagctttataggttaagaggtaaacttgagtactagaaactttatacaatttatttacttgggaatttccttgtatcttttttccttatttggaaagtcttatcatgaaaaaaacacccattactgatgggaatgaaagtgctcttttctaattgttggccatttattggttaatttcacattatgagatttgaatattggttagattagtcgtatcattattatacaccttttctttcatttgcttgtttattcaaacagtttttcttatttctggatgggttaagaccctagttttggaatttataactatctctcattgactgcctgaattagttgcctctcataacgactttgtccatagataccacattgtaggagtacatccatcacggagttgtgtgatgaatgttgttttgcggcttaaaaattcaattatcagtatgtgcaaagttgctttcttttcatcttctaaattgttacctaatgttggatagtgattatcattctgtatttcaatcacatcaaactttgagaaggtattgactggttctctaatgtttgaatattcttctttgcttctcaggatacttgctttctaaataagaaacaaccagtggt

SEQ ID NO: 7953 - DNA, 8790 bp, Cucumis sativus
  Intron number 2 from transcript Cucsa.313390.1 (locus Cucs a.313390) derived from phytozome v7.0 (chr-ID scaffold0299 5; pos 2557364 to 2566153 reverse strand)
acttgcctggattcacttatcgtcgagcactcaaggtataattttgttacttgtcgagttagattataaaaaatatctcttaacaaaaacagtcaatatgcttctttatttgtcctatttttcctctcttgtaatctccagttctctcttactcttctaatttttgttcactgtttgacttaaaagaagagatgaaactagttgattcagttgaggtaaatgtgtagtgtagagtacttaaatgtcgtaatgaggttgtacatacgagttgagtgcgttttttgaatttttgaaagtactttattggtatttttaacactaacatatacaaagttcatggtccatttcctcattaagttattaatcaaaaatgtcttctaaacccttctttgttcaagcaatttaagtgccaaagtacctgacatattgccaacttatatatactacatttgttgtatataaatatatgtagagacaatgaatttgcatatgttaattggtaggcaagaaataagatagaaaagatcctccgttgtgtgatagagaagaaaagaaaaagatttgaaaaggatgatggaacaactgaagtgtattctctcttggacaaattgattgtggccaaaaatgagaatggatcaaagtcatacagtgatgataccataatagacttgcttcttggaacattttttgctggccacaatactcctgccactgctgctatgtgggcacttctacacatctcacaaaaccctcatatcttccaaatggcaaaggtaactacttttctctttaatccccctaccttatatatattttgtatctagtaataatttaaaatctctttaaaaaacatgtgtcacatgctaacttgtttttgggtaactagctagcttgcccaaagcataggtgcaactcaactggctaccatctaatatttttctttttctcttgaaacagtttaaacaattctttttcttcgtattgaaaattacttagctttcatactttttttctgatttgctatactttttctacctaattttttatataatggaaggattaattaagtgtatgttttagaatgattagatatgttcaattttgttctaacacctgaactgtaatactttctatttttaactacaggaagagcaagagtcaattataagacaaagaccatctactcaaaagggcttaacttttcaagaaatcaagcaaatgaaatttcttacgaaggtgtgtttttctttctttcttttttttttttcactacacatatatattttgagttattgaatccatactttcaattttaaaacaaataaagtagagaaaaatatatagtcttagttcgatttattttttttgtttcagttcatcaatgaagtactgcgaagaaatactgtcgcacccacgaactttcgcaaggcaaaaacaaatgtaaacattaatggttagttgtttatttatcgtttcatacagtatatataattattactattgtttcttaatgataatttcttgtgttctttttaactactgttttcttttttgtttttgatataggctacactattccaaaagggtggactgtacaaatttggagtgtagctgttcatatggactctcaaatatattcaaacccacaagactttgatccttcaagatgggatgtatgttttactattctcttattatttgctaaaataaaatcacacattaggtaaaataaaactttctttttttaaatatataaaaaaacgtgaaccaaaatatttacaactgtaccaaaatgttactatctattagtgatatacaaagacaaagtaacaaatattgataattattatttaccactgatagacactatttgattgtttcaaagaattcgtggacctcacagtttaagagttcataactttccagacttctcgtaactttttggagttttaaacacattgttaagagtgtgttcataactttccatacttctcgtaactttttggagttttaaacacattgctaagagtgggttgatgtactaattgaaaaatataaatgttgatgatgtttgtaaaattggcagaattatacaccaaaaccaggagaattcattccttttggacttggaagtaagttttgtcctggaagtgaacttgcaaagcttgagatgactattttacttcatcatttcgtcctcaattacaagtatgtatatatgcttctttctttcttctgttgaaactaaaaattaaaagaaaaagtgatagagttgtttttctgtttatgtattgttgtagagtggagcctgttgaccaaaattgcaatgacactcgcttgcctagtgccaagccaatgggcctttgcaggattgttagggtgtcacagtaagggatggatatatttttaattaacgtgtgaaactaaactttattttatcagtaattgatatttgaatgtatggtcggtgaagttggtgcttttattcaccaacttgtactcttataataaaataatatatgttgtagttttattaattataagtgcttgtaatattccttggaagtgagatcgatctccaataattcctctctgtaatgttaatgtgttattttaatgttcattaatctatcattatgcttgcttctttaaatagtattgattgtttgcataatatttctcattagttgctactttaatgttcaataattctggttaaatttcactctttaagacatttgaaagttgtttaagttatatctcttctaatttttttttattgagcattttttcttaaacaaatcctaggataggaaatttaggaatctgtttttcaacaattctccacgtgagagatcatatatgttccaaagttgaagatttgatcgcaagaaaaaatgattttaattaatatttttttaaaaaaaatcactttattagaaggttattcattcgacggattttgagaaattgtgctaatttctcactttcttaagatgcgttttttttccaataaacctaatttattgaatgttctccacttattttatgtgatcattgcttcaaatattggagtaatgaatcgtaaaataagatattaatttttttaaaagaatatttttaatttaatatttgaatatttttaatttaatatttgaaatttggcaacctttgaactttcaaactcaactctagtttttgcaggtcatttttttataattttatttaattttaaaattgtttagtctatttcgatgtccaaacacatcgtataaaaggattggtggcgacttttcttttgttttattttaaaattaaactcattttgagaacgttagccgctctgcgtcgtctcggccacatggcgacagatttatcatagaaatttatcataatataagcatcatcattaataggcttctattaagaattatcattttataagtagagatagttgtaaatataacaagtgatagttacaaatttagcaattaaattcaaattaattaaacatataacacaaatttaaaaaatttgcaaatatagtaaaatttgtcaaattctatcaatgatataagtctatcagtgatagaccatgttgcaaatattggtctatcactgatataccatatgaagtctatcagcgatattggtctatcagtgatagttttgctatatttgcaattttttttaaatgttgctatatctttaattattattgttaaaatagtcatccattgcaatttctcatttaacaattaaatttaaaataattaagtatataacaacattttttaaaaaaaatcaaacatatcaaaatttgtcaaaatcctataagagtttgtagtaatctttaacatatgtgacatacttctttttttaatcaaagttggtattaatcttaccatagatcaaatataaaaaatatatttttttttcaaaattacttttttagttttggaagttcaagttattttggttttaacttcctaatactttaatctatacattttacttatattaactttgacgagattacaaatgtagatatatgaatagagacttcaaattttaatttttaaggccttctttccttaactatttttttgtttttgttttgaattttaaaaaatcaaatatcactcactccacctttcaaatttattgatttactatataccttttacgaaaacatgttctttgttttgaaatccaactcgagtggtgaattaattatatactttggaaatgaagattcttttccaaatatttcaaatccctcgatttttccttcttctcagattttctccaaacgagacagaccaaacccaagcttgttaattccgatttcgcacagcatatctgcttgctgctgcactacacaaactcgaccaccgccaggttctactcagtgctgccgtcggtccaccttgccacacccttcctatatccaatgttcccagctcgctcactcagttctcgctgcctcacgctgctcagctctcggttcgtaccgccatggtcactatttgattatatgtcaaatattcttacaaatggaactattattatattgtatgtagttccaaaccaacatctaaacccaacccatatatatcttacctaatatttattggcccgcccatacctatttaatccatgagctagaacaaaagtccaaagcaaagaagcccaaaacaaaatctcatgctgcgaagaaaccatagtagtcactgtctttcttctctaacagatttgaaggtgaagttgctgctgggttctagtatcgtcttcttcttgctatctcttttatcttcaaggatttatcgtcgatttaaaggtgacgttgctaacatgggggcgtagatggtgtaaattctcctatatgttaatgataacttgaatatatatatcagtcatagatatttatatcagtaattaaattataggaaatagacttttgtggttgtctcctttgaaaaatattgctacatatttcattgatcaactctaaaagtgctaacattttggtagcaagaatgagaaagatacaaattaaaatatcctccattgtgtgatagaggagaaaagacgaaaaagttgaaaataagaaaacaagtaaagttgattttcaagtggacaaattgattctgtgataacaaatttctttgatcattgggagtttgtattaataaattagtcaagtatatcaaagggtttattttacttttaatatagaacgaatttattttattttgtcaatataatgaaataaataaactaatttgctcgacactaaatttttggtatatgaaccttatttgggcgaaactcctataaaaggtaaatttagtagctccaaagcccatggagatctatcatcaaaggagtcgattggtttctcccacatattaaataaaaagtaaagagtagtgattccttctccttctggcatagtctttggcatgaacagagtcctctctcacaacacacaatcctagactgtatgcactcaccaccaaaaaatggaattctataaaatatatgtgagaatgttgataattcataatggaagctttatcctagaagaccgttgagaagtgtggaatcgactctttaggatgaaatgaaaatctccctccacccccgactgatatcagacaggaccttcctatctggaaattggatttcaatggttgcttcacggttgcttccattaaacgtgttcttcatgacatcaaccaattagaacaaaataattttgattcggagatttaccaaaatttatgaaagtcgacggttccaaaaaggtgcaaattcttcgtttggtccctcctacatgagtgtattaacacagttgatatgttacaaaggagattctcaccgtggagtttgaaaccttcttggtgtgttctatgtaaagcagctgatgaacacacatgaatcatttatttatctctggccccatatcaactgagttatggaaaaaagttggtgctttgcttaatatatctttctcctccgataataccactatccttagcaaaaacatatgcagttcaaaggctaaaacaaacaagcaaattattctcttcaattttgttgctatcattctatggactatatggaataaaagaaacaagaggattttcaacgaggaagaaagatccctctttatgatttggaaagagattcgggagttgtaaatttagcaattaaattcaaaataattaagtatatagtaatatttttaaaaaattgcaaatatagcaaaatttgtcaaattctattaatgatagagtttatagattatgttgtaaaaattagtctatcatcgatagatcatacgagtctatcagtgatactcaacgataattttgctatattcctcaaattgccatccattacaattaccctaaatattaatgttttctatttcatatcttgggtccattgggcttctctctagtctttttgtacttacctcttatatattaatgaagtgaaaatgatgaacgttctaagtgagtgtccaccaagatgtcttggtgcacccactatagaatctatagtatctttttttaaaagcaaattgctcacactagtaaaaaaaagaaataaagatgagttttgtcaagctttggatgcatacccatctatattttaaatgtctgtaattaaaattgctctttttctctgcatatagaagcagttaaaacataaccatgtaaatatgtgttttgattctttattcttgctttatgttttttgtttttttcgtttgtcgatatcccataatattttgaatgtgatagcaaatagctagacacgtgccctatatacctacaaagctcttgaactaaacaacacaaaagaatgatagttggatgtggtaattgaattgacagcattattcattagcacacattacaaaacacacttctcattgtgggttaggaaagagctgtggatgctaacacacaaggttctcaaagaatggagttgatgaatgtttgtgttattattggagttgttttagggttctatgtgtttgtgagaagattcaatgaaatctggtacttgtttaagttaggaaggaaactcaacaaatctcttcctcctggtgacttgggatggccttttgttggctctactttctccttttacaaagcatttaaagttgagggtgatccatacacctttattcacactcttctcttaaggtatctatctcttcatctctctgctcctcccaatgattctaaaataaacaattaatagttgttcttacttaatgtttctttttgataggtttcttaattgtgttcttagagctctacttggtttttaactgttcccttttttgaaaaataaccttaatagctaaacactgctttcacgcattagtttatatgtatatgttatgtatctgtgtttttgcgatttattttatgctttccccctactttatgctaagcaccatgcattagtttataatattgtattaaaaaaattggggaggataattgttatgggaaaaaactttaatgcaataatctatacacttttttttgggtacaactgttgtgggatgagggatcaaacatctttgattttagaagggagtgaatatcaattattgcttagttatgatcactttcacggtagatttaaggattggtaactatgattgtggttgttattttgatgcagatatggaagagtgggaatgtataaaagtcacctttatggaatgccaacaatcattgtaacaaatccagagatatgtcgacgcatatacttagacgatgaaagattcgaaccaaattatccaaagtcagtgaaaatattagaaacaaatggtgatttctcaaagattgatcacaaaagtggatataaaataatggcatctccaatgaatgggtctgaggtattgagcaagcatgtagaattcattgaacaaacagtggaaaaggggttggaggaatggagtagcatgagaagagagcctattgaattggtggatgagattggaggtttacttttcaaaataattttacatattttcttggggaatgaaattgatggtcaagccatggctgagcttcacacattgtacaaagaattgggtcttgtaattatgtcctttttgccttatgatttgcctggattcacttatcgtcgagcactcaaggtataattttgttacttggctattatacaaaatatctcttgacaggtcaaaaatagatttaaaattttaaaagtttaaaaatacccttattagaatggttactgttttgtgttataaatacccttgaattcatataaaaaagttgtccttattgttaatatatgaacacaaatagtcaatactgtgcttctttttttcctattttttctgtcttttctttttcagatctctcttttactctcctttttgttcactgttggacatttgtttgacttcagtttaggtatatatgtgtagagtacttaaatgtcttaatgaggttgtactaattatagtagttgagtgtgttctttgagtttttaaaagtacttcattggtattaatttttacacaacatacagcgtacaaacgttattttctcatttagttattcatcaaaatttcttctatacatctttccaacttataatatgtatagtatactatagggaaattaaaaatactacattatttttgtatatatgtagagataatcattttgcatatgttaattattggtaggcaagaaaaaagatagaaaagatcctccattgtgt

SEQ ID NO: 7954 - DNA, 577 bp, Cucumis sativus
  Intron number 3 from transcript Cucsa.212710.1 (locus Cucs a.212710) derived from phytozome v7.0 (chr-ID scaffold0154 3; pos 497924 to 498500)
ctgaacaacttagggtaactcctacactttccctctctcgatcggttggcttgaacatgtcgaccgactgtacgttttttagtctttcttttatagttgtaaataatatgattagacctatagtcgtcgtagattgatccaattttcagagagtttataaacgattgaatctatcattgaatagattttactatatttacaattctttaaaaatatttttgatataaacggtctcgtgtatcgaattaactattgtttatacttcatttcacaattttgataataattttagtattttctcaaaattttactggttattaaagccaaccttaattaggttgtattgagccttttaaggttagtttaggagggagtttcttgaattttttatttcacttgggtcagttgactcggaagttttagtgatggcaaattaggagttctaatcattctaaaacggtttctaatttcaatttgatagaataatcttcatatcattttggtaaaacctcataaatattattcctaaaaatggtgtttttgttttttgttttgtttatatagcttttatacaact

SEQ ID NO: 7955 - DNA, 2165 bp, Cucumis sativus
  Intron number 1 from transcript Cucsa.321110.1 (locus Cucs a.321110) derived from phytozome v7.0 (chr-ID scaffold0308 0; pos 961828 to 963992 reverse strand)
gatttctctttcactacccttcgttgtactccgtaagaacttatttattttgaaacccctttcttttcttaagctttttttgtcgacgtttctttcacttgctctgatgggttttttgtttcttaactctataattcttagtttgattttttattcttgattcttgattctgtatttgggatgcttttgtggctggctttactgtttgaatgctagtttcttgttgttgaagttccctggaattcagtgaggatcattgttttgtttattcacgtcggagaaatggagagacctgacgaactttaaagaataggatgttacttaatcgtgcaactttgtgtttgtataatatgaaatcatagtccataaaatccaaatgaatattagcatttgactcgagaacgttgatcccaattgagtattataagaacatgtcaaagatttttaccttgtaaaaagagatagagacatgccacaatctttaatgagtgtttgagtcaaaggtgaagtgagttattataactaacgcacgacaatccgaattattcaactcatatatattatatgagttgtgttggattagtttaaaatgtggattagtttggataaaaaattttggtttttttgttgggtcttaggtttagaattgaaaatttttgttcaatccaaattaataatatatattttttattatttatttaaaaaagttaaagttggaagtattttgttaaatgatcatgtacgaagttaaaagatcctatgaaaagttaattgattatgtaagaagtaaataatcatttaaaggtagaaaactaaatgatcgtgtaagagggataaatgatcgttgggttgaaaattaaaaaaaaaaactcaatccaacccgacaacccaatccaacacaaccaaaaaacaatacaacccgacaatttttcaattaatttatgaaatatatatgaattcctcttttcattgttaattgattttgagatggaacttcgtacttgtttaatatgttggtggtcaatggtagggaggtaagtccaacctaaataacctgacaactcgaactacccaactcatatatattacatggattgggttagattagtttataatgtgggttgatttgaattgaattttttggttttttctgttgggtcttcagttggggttgagaagtttggtttaacccaactcaaattaataatatatatctttttattatttatttaataaaataaagttatgagtattttgttaagcgatcttgggttaattcaggttgtcaatccaaccaacccaaaaatatgggttggattgaaaatgtctcctaactcaacccatttacacccctagtaaatggtgataaattatttgattgcttcctctacaagaaaagctaccatggatatatatatatacccatttatgaaacttcagttgatgtcgacgttgttgtcgtaaagtttcttttgttcattgtatacttgccttttgctttttctaaagtagaggaaaagttttggttagttatacaagttagatataaacattaacatgttttattgagagattttaaagcaaagttgacattagaaaatttttattttattgttcgtcacatcaacatgattgtgtttcaaatccaatggtggagtttaccaaaatcataaaattatttagaaaagcaaaatcacagaatgagtagaaggtactctttgtagtctataaagcattgacacatcaactagtatgtatattttcgtcataccaactctgttcaaggttggattattgttgtttgggtgagttgctgttaacctgccttgaccatcatacataaatcattcgatatatattaaagatgagaacatagtttacaattcgtattagttagatgtaagaatcaatgcacaaacaatatcttcaatcaccattggcatgagacattctgtttgaaagtccgaataccattgtcaaacaattgctaaaggcttgttgtctttgagaaaaacgcaccataagctcataagattagctccactgttcctgcaaaccaaagaaataacgttatcctttttccggtcatataaaacacttgaagagttctattgatatgtttttgatgaacttctttttctactcatggcaggtataggagatca

SEQ ID NO: 7956 - DNA, 1220 bp, Cucumis sativus
  Intron number 4 from transcript Cucsa.331920.1 (locus Cucs a.331920) derived from phytozome v7.0 (chr-ID scaffold0325 6; pos 104948 to 106167 reverse strand)
ttcccatcagtattattactgccacaacaaatcaggttagtttggaaagaaagagtctttacatttgttctcctcttgcattccttcaattggaatcgtattgtgcaacaaccacgtgaattcttttcttaccactctcggtatcagtgactggtcttaacttatttatctgctagtaaaattggttccttccttaatcctcgtttggtagtaattggtttgttttgttttgtttcagaggaaatagtcattagcaaacaatttggctttaaaaatagaaagctaagttttgaatagtattctaatggaaggagttattgcattgtaaccttttttttcttgtaaacaggtgtattttggtaacactaatcatttttcacaatgtcttaaaaagccctcttaggcgcgtgccttgagcacaaatctaacacctcaaaaagcaaggctcacaaataaggtgaaggccaaggccaatattttatgtgaaggccaaggcttaaagctcacggctttggcgctttttcattatttaaaaaagtggcaataattgagatttttacttctttcttagctaaaaaatcaaatttactaagtctaatacaacattttttgtgtttagggtttttattttctttttccatatttctacttcaactatgctttctcttcttaacgtagcagttttatatatagtataccccacgatttttattttttggcgccttgaactttaaaaaacactactttaagaaagatgtgagggggaggatttgaacctttgatctcttggtcaagaatatacaccttagcttgtgcagttttgtcacaagaaccgaaacaacaagaatgatattgatgaaatatgaagaataattcacagaccaaaatgtttaacttcctccttcccccatccctctatttataactaaataccataacaacctcagtagctaactattaatatatcggtaagcacattcctatcactatgctcgcgtgggcgatactaccttgtgattattttgattagggtttttgaaaaagactattgaattcatgcaatatctttataaaaaataatgaaagttttcaccatttacatttggtagctcctctgttctgctttacatttttcaactgtctttgaatgttaaaacatattctcatgttttgaacaatggatcaaaaacagactcctgggctgaacatcattacggagt

SEQ ID NO: 7957 - DNA, 8711 bp, Cucumis sativus
  Intron number 6 from transcript Cucsa.055860.1 (locus Cucs a.055860) derived from phytozome v7.0 (chr-ID scaffold0060 2; pos 26887 to 35597 reverse strand)
tgggatagatatcaacccagataaatttgaagttggtaagtacttctagtctctcttgaataaaagctaagtaataaaatcctgaagttcctctctgttgcaggagcccatgtctttcaagggattatgatcaatcatgtgcatgcattgttattaggactaatagtttacaatagtcgataagcattttaaataaaattattgtttattaggttgcataaaagtgtatccattttccatatgcagcaaaaaagtttggagtcactgagtttgtaaattctagaagccttggggataaatctttgagcgaggtatgtacgttatcaatgaggttgaatgtgattcagtttcattttcccatcgaacctgcaatcttagcaacaaatgattcttactcttcactattgttttacgcaatttttcttgaagagttttactgataggtaaattttgattccaaatattatttattgctgtctcctctctataaggcaagagctttgtttatttatgatacttgaaattaagtaaataaggagaagaaatatctttgttgctaccttattaaagtggatgtgaaatgatttccttcttcatgaatggtcaaggtgtttcatgacacttcgaaactagaacaaattcgtaagatatatcttgttaaggttttcaccaggatgtcaagtgctattaattaaacattttgtgaatttgatccaatggtaagattgatttcaactaaatacttcttatttcttaaccccttatgatgtcgatgctgatcaggtaatcaatgaaatgacagatgggggtgcagattactgctttgaatgtgttggagttgcttccttagttgaggaagcattttcatgctgcagacaggtcctccaatccctctctgtttacattttctttgttcaattttagctatcaatgggatggaaatgcgaaatattcttcaagcttataaacttgtcatcatattctttagtaaacaaaaacatttagcaaaatattgcaacaataacaatatcttcttcaagcttataaacttgtcatcatcatacttcatagaatctttgaagttatgtgcagttattaagattaactattgttatcattgtaacaactcttatggtaacagtatgatttaattacaactgagtacataaatttgacgatgccacaacttctatttgattccagggttggggaaaaacaattgtgttaggagtagacgaacctggcgcagttttgagtttaagctcttttgatatcctttttcatggaaagagtcttatgggatcgttatatggagggctgaagcctaaatcagatgttcccactcttcttaaatggtacacagataaggtaacctactattgccttttgctgtgaatttcatatacatcataccatcttttttctgttaatgattttagagaatcttccaactgtcagaaacttgagctggataaatttgtcacacgtgaagtaggttttgaagatatcaatgaagcttttaaaatgttcattgaaggaaagtgcttgagatgtgtgatttggatgaaaaaaatatgagcagcaacatcatccggttgtgtcgtttatttgtcaataattgatttctatcaagaaacttctctgcatgttccttgtgtttttatcttgaacgtttgtattcgactttacttctatacaagaagtgtgtgtgaccctaaattttgaaagaactgttttgatgtcgtaataaaaacaacacacaccacgagaatgaaaaatggaatggaaataagagataaaactaactaataaggcactaacttctacaagtaacttgcaatttttcttcatcatttcaatcaaggtatcgaaccatataggaggcactatcctaagttgaacacaccgacattttaaccatcttaggagtgtcggtgcttcataagatcaaacaataatttaacttcaattttgtagtcacctattaagttgacgtgacatctttattactatattttattttatttcaaatatgaaaggtgaaggttatggaggggagacaaggggagacagaatagactgtagtttagttttggtggggaaaagaaagcaagttgattggattcagagtaaattttgagtggccaacagtaatagaatatcaatggatctcaaatgtgaaccatttatttttgtaatgagtcattttgaatattgggatttttttctttttttctttctttttttaaaaaaaatgtcatttctgggtaattaaaaaagttgccacttttgtattatttggatttatgggaaattcttactaagagtaaaagatggaaactatttaaatatatatatatatatatatatgaaaaatcttgaatcaacttatgataatttaataaattttactctattttataattcaattttgttaactttttaaaagaaaattccaaaattttgtagagtaagggtaaatcaaaattctccaattaaattttggaatccattaaaatcttgaaatttcaataaaaagaaaaaaaatatctctatggttctaagaagtgatatattttctttataaaatagcaaattttttttattgataacatgacttatgtcactacattttctaaatcgcaaaaatgataaatttaaaaatgaatagttttatgataaatttagttacttgttacgacatatttgcaatataaaaagaagtgaaaagaagtgttattcactgtttttttttttaaattatcacatgcaatcttcaatttaaaatcttaaaacattaaacaaaggtttcaaatacaatgatgagatacacatcatgatttagagaaagaaaacaaaaataaatacatataagaacattaataaataaaggtgggtagaagcctaaaataataataacaacaacaataatataaagtaccacattgaatataataaataggtggagagtaatttcaaccacataatttataaataggactgacatacaaaaaaaatatagcaaactttattaaattattgttagtcaatctaaacttgtttgtgttatattttataaatagtttgaagttttttcaattcttagtttgagttttatactatggtttttttttgttttctataaaataccatcaataaataaaaatatatgcaataattgtaaggtacaaatagaaagaaaattgatataaatgatgaaatcaacctaaatctgattttgtaagaaaaatggtatttgtgtaacataaaggacagaaatagactatttagaaggggacaccctatttcacattcttcttttatctctttaccacaagaaaaataaactttttagaaaagcataagagatatagagaacatgttctttacaaattattttctagaatagcattgaatgttgtttgagctgcacacaagatgggtatcatcaatcatggtgtgtccaagtttttcctttgaaaaataaaataaggtgacattatcaatgaaggtgatctataatctatatagcaatgtatatatatttttaaggtgcaaacctcataagatatataacgttctacatgacaatttttaataaggtgtcccatttttttttctttctaatttgtatgataatattttaattctggattgaatttgaattgacaagagattaaaaaaaattaaataaacttaaaagtttttcaaaaataaaaaacatagtttggattgttgttaaaaataaatggtaaccatcgattaattccactaatgattaagaaaacaaaatgaggaaaaaagaagtcatcatcgcaaatcaaaggccctaatcaatttaaaactccaccaatgactaataaaaaacgtggaaaaataagtttgaatcaattgattgtatatcaccctaaaacctttgcaaaaatattatattcaaaatcccatatttgaaagcaattttaaaaactaattaaaagtggcaaacaattaaatttagaatcaattaggaattgacatacaacccgaattaaaattaactaagtaaatcggagaatttcaaaaatatcatgtgctttttttattgtctgtttgattaaattaattattttagttctactaaattaagtattagagatagtggtagatataactattagaatcaaaatattagcatatataacaatattttaaaaaaattgtaaatatagaaaaaaattgtcaaagtctatcactaataaactatattgcaaatattagtctaccactaatagactttgttatattttgtaatttttttttaaatcttgttaaaatttatgtccattataattactctaaatattaagattttggctaaattccaattgagcaaaaaaaaagtttaatttagactaaatactacataaggtcaaagtccaacatggttgaacccaaaaattagatttataaaccaaccaaattcaaatctataaagcttactataaacagagaaatattcctttgaagggtcaatagttctatatgtttagagagaattctccacaatcttaaagacttaagttcttctaagactttaatttctagaacatcacacactttatttatttaaattaagcgaacacattcaacgaaaagagaattaaagaatcaatttcaagacatcaaaccacgtcacattaaattaacataaacaaaagttcaactccactaaacacattcttgtgcaaacaaaatcaaagtaattttgagttattataaacatattttagtgattttaatcatttaaaaatcaccctcacacctacactaattccttcaactatcaataagaaacacttaagtaattaaaaaagagatgctacaaaaaaacgattattgcatacgctagtaaaacttaaaaagatttaactacacacaacgcgctacagtatatagaagagttggtatcaattatttaaattttaacttaaccagaaaagtgtatttctaaattttataaagttaaagtaattgtttttagagatgaaatgggacatcattccaaatattagtaattcaaaagtggatgtttgtcattattttcaaaaaattattatttcaaaaggaagatagtggtaagttagtgtgtttttccaaattggttgctaatttataaatgggaataacaaggtcaaaaaatacatcatttggccaatatattacaatagaaaattatcttccttttccttttctaatattaaaaaaattcttcaaaaggcaaattttcaaaagatgtgtctatatatttttaatatccactaattgatagaaacggacaagtcaaaatcccaaatatggaaaaacatttcacaaaccaagaaaccattattgcaaactttaactcataatttaaagaaatgcttaccaatgcataatttcatcactttcttactcttttcaagattttaataaaaatggttattcgaccaagaaaaaaaaaacgctaaaactaaaagaacttcggttcattttagatgcacacatctaatgtatttcaaactatcattcgtcgaatgatatattattgtgtgatgatcttttctctcttcaatacttgtaattgaaagtaggatgattatctataatccaccttaatcattcctcaaaactaaaatttatactttcttacaaatcaaatttaataaatgaaaaaatatatatgtaatagatttgttaaaaaggaatgttaggttgtaagtttacaattttttctaaaacgagtggtttcattcctaactttcaatctaaccgaccactcgacataaaattgttatacaattgaattttttactaaaaataaatatattggcatttatgtcaatgcaaatagttaattataagacacaaaaagaaatatgcttaagttcaaaaaaaaaaaaactagaaacaaaatgactgctatacaaaggttaaactaagaaaaaatagtttttaaatggatgtttaagatagatatatcttactttaagaacaaatttttgtttgattgtaacaatttctatagtatgactatgacccatttgagtgagttgaattgtaaaaatgatagtgaacgttgttgaaatctatcaatataataaaatgaaaaactttaaatacaatcttacaaatttacaataagatttatcgacttctaaactagaaaataaactttagtctccaatcaagatgatattgtcaatacttaacatggtctaattcaattatgcgaagaaagttcaactcctaaagctaacctttttctttaaaaggtaggaatttaaacgaaaaattgtaagaatttaaaagtgtttcgtttgaaatataaagatttaatgcaatttgttgcatagctagatggacaaaccaattaacgactcaatatgcctaacaaaccacagaatttgagtaattagataataaaaacaatttttttctaaactgcaacctaaaagcctatcatgttaaaatcacttttatgacagttacatatatgattctggacttttaaatacatattattttttacattattgtaacaaattttgtaagtatgattaaaaatatgatttaagtgaatttaaaattgataattttttttttaataatttgaagataagatttgatgtttttttaaaggaaataaagaaaaatactaaaaaatgcaatgagtaaagagatacaaacgtatttatttatttgttcacaacttgttattatataacggaacgaagattagccatcaaattccaattccccacctccaaatccaacgatataggatacatcgccggactccaaggactctcctcatcggaaccctccgtcatggaaaataactcctcgcctgcaactggacttcagcctatccgctgcagaggtacttcttctctgcttcacttgtactgtcttttccgtttcagtttttttttacccaatgtctcttcttcaaatgttcgatgcttcattgcgttttaaatttgttagctgctgtctgccggaagcctggagagccgctagtgattgaggagataattgtcgcgccgcctatgcctcgtgaagttaggattcggataatctgtacttctttgtgtcatagcgatctcactttctggaaattgaaggttcgtcttctaatcattctggttttttgtgttaattttgtaggatgaactagttgttttactcgattttttaatgttccatttccgaaggatcctccggggatatttcctagaattcttggccacgaggctatcgggtgagttccacgtctccttttcaactctgtaaaatcatttttggggatttaagtctaatttcaacttattaattaaaactatatgttgaagttttggatatgtatgattgtgatttaggattgcactgaacttaattaaaaatgcttgttcctgtattgctttgtgaagcaaaacattcaaaaatctaaaagttgatctgaaaataccaatacgctatttatttggtactatctatttattgtttgttgttgcagagtggttgagagcgtaggaaaggatgttcatgaagttaaggaaggagatactgtaatcccaaccttcatggctgactgtggggaatgtaaagattgcttgtcaaataagagcaatctgtgtacaaaattccctttcagcgtgtctccggggacgcctcgatatgggactagcagattcacagatttaaatggagaggttattcatcatcttttgtttgtatcaagtttcactgaatacacagtggtagatattgtcaatgtaaccaaagtagaccctgcaatccctccaaacagggcatgccttcttagttgtggggtaacaacaggtcaacttctaattcattacttactcctgtgaagatttgaattgtattctcctgaatgcttttgagttttcgtatatagttaattagtggctgtttaattttgcacaaaattagttctgttcttaaaatgctgctagtccagtttcctacttcaaaacatgttatacctcataaagaaactttttttaaaaaaaaactcacaaaaaaacttgacctctatttggttaggacttcaatttcttgagaggactgcagccttagttttcttattcttcctctatatttctgctcaaatatcaaataaacaggggaatattttgtgaaattatactatgcttacttgtgtatatttgaatatgttgatctggttataggcgttggtgcgacatggagaacagcaaatgtggaaaagggctccactgttgccatatttggacttgggtccataggtttggctgtacgtatgagctgtttattgactttgtttcaatataagtttaacgcctaaaacttcctggtttacttttaatgtgataggttgctgaaggggcaagaatatgtggagcaagccggattatcggtatcgatgtcaacccagagaaatttgaaactggcaagtattttcatttctctattctttcttaaatttttaattgtttgaagcaacttctctctattgaagagtcgtgagtttcaaggtaacaagtccaatcatgtgaagacattgttaatttaaacttaaaaaattcactggaagcatttaaagatcatgttattattaagtagtcttaaaaaatgttcatttcccaaatgcagcaaaaaagtttggagtcactgaatttgttaattcc

SEQ ID NO: 7958 - DNA, 3513 bp, Cucumis sativus
  Intron number 6 from transcript Cucsa.155960.1 (locus Cucs a.155960) derived from phytozome v7.0 (chr-ID scaffold0113 9; pos 149393 to 152905 reverse strand)
atcctcaagccaacctaccagactttgttgacaaggtatgtactctatttgtacatagctttggaaaccttaaagtttcttcaactcattaaaagatcgttttttgactctttgatttttaaagctcaagatgcgataaagtgcaatagtctttcggagcttaagcgtaagacataaagaaaaagcttgggtcttttttttaaggagcactatatatgaatgttctatattaaaaacagaaagcatggttgaagagaaaatatgaaaaaccagatctttaaacacaagaaattttgcatttagacttgggtaaatttgaatttttaaaaaataataaaaaggcccaaggcgcattgctttgagccttaatctttgtcaaacctgctcttggagttttccacttatttggtttgctagtctttcaacatgtgctattctgatttttttagtttattaaatgaatggagaaaatttgaagtcaataggaaagaatcatatgacaacaaaatttaacaaatctaattttaaaaaatacaaaaggtacatcattcgagaaaaaggaataaaagatacataaatttaacaaatctaagtttaaaaaataaaaaagatacatcattcaagaaaaatgtataaaagatacattattgttatcattaaaattaattaataatgagtttattgaagaaaaatgtttgcataaaaaaaatattccaaaatgaaagtggaaaattgggagatgaataaaaatcattttaatattccaaaatgaaagtggaaaattgggagatgattaaaaatcatttttatgttaatgttttaatgtttaatgtaggtgaattttcaaaaatagcaaattttacaaaatacttaccatctatagcaaattctatcatagttattgatatgctatagtgatagaagactattattgatagaattcaaaattttgctataacttgtaaatattttaatttcttttgctatttttaaaaatgtcctttagtgtattctgtaaaatataatatattaaaaaataatcttataatcaatgttaaattattgaattataaccgaactttgctttttaacaaaatatactactttcatttaaagataacaaaatacttaccatctatagcaaattctatcatagttattgatatgaatttcttttcaaagtttacattatttcatgtcataagaagaacgtattcatcaaagaaaacatggaagtatctattggatggaagagattagtacacgcacttgaaataattatattgtcatagatagcaaaaaaaaaaaaaagaaactacatacgaagtatagcaaaaacattcaaatgagctatagagattttgatagatttgtctatattttagaaataatttcaagaaaaatttacaaatagaagaaaatggaaagtatccgtatcctattgaaaaaaataaaaaattgatactttgggtttgagttaaaattttaggttaaaattttagttattcatttttagttatgcattttgtaggggcagtaaatatttgccaattcttctatttttaaaaacttccctaatttcactattttgctattttcaatatgcccacttttaatctactgtggatgtttaaaatcaaactaaaaattactttttcaaatataacattacacattactttataaaaaacttagtacaattatctaatatcccatgtcatgggaaaggaataaatttggtgtggaaaaataaacttatataactttttataggaaaaatgtgattcatcaaacaactaattttggagaaaaaggttgagtgtggaaaaaaaataaatagcatacacaagatttttataaaaaataggtacagagtgatgattatttaaatttcaagtgttgagtaaggttgctagattatttaacatttcaaacttttcaaattctaaaatttattgcaaaataataaatttgttatgaatttttaatagttattggataaaactatttaaattctcaaacttttaaaattctaaaattaattaaatttgaagttggaaaattatcaacactagaacatttgacaaaatatttaccctacataaaaaatcaagtgcaataaattttgtcttttagtggttttgttctatgcagggtaaataatttgtcaaaattatctatttttgaaaaaacccctttaaagtcattatttattaggacaaaaatgaagaaagtactttcatatttctacgaaaagcatcctattacttttaattataattaataattagattccaacaaaagttacctaattcaaacaaaataaaaatattaaccacactttgccattttgtatcattttacaatgtccaacatcccatatgttacattctaattaaaaaataaattccatggctacataatgtaaacatcccatctagaaatacatgcacgaacatatttagattccatgtttacattctaacaaaaaaaagcctaagatgaatacaacaaaagcaaaaggttgaaagagaatgatcatttgatttcttcttgtgtaacttatgagcatgaatggagaaaagataagatatttatacccaaaaatttcaaagggaggaaattgaaaggttgggagatagagaagagttaataagagaaaagggaatgtgaatagttgggagataaaaggttaagagaaagatgaaaagaatggatgaggaagagaggagttttgaattaattagagagaaatgtgagttttttctagaggtgggggagagttatttttgtccatctagagagtgaggagtagtggaaggagagaataataaatgaataaattaaacaacagaaaagtaaaatataaatcatcacatcactcaaccatttagtaaaatataaatcatcacatcactcaatcattttattaataaacaactaaaaataaattaatttaatgaaaaagaattaatttaatttagcaattaactacattaattttggatttaaatgacatatttgccaccaaagtagtaatgaaaaaccttataatgaaaggacataatttgaacaaaaagtttctgctcatccatgctttatatatactatagattagatattgattatttatgattcaggtgccaaagtctggctctatttcctcctttcaatccctccattttcttaggtcaaagtttcaatgcagagattcatagacagaaataaagctaggattatagttttaaacttctttgctgtactttggtcatgttcacaacgctggccacaaaggttcttgtcgtatgttacacgagtctgtcattggtactaaaaatgaatgtttgtaggaaaactagatataattggtggtcggaattattgttttcagttctgtgcatgggaaattcatgagtggtataatcattttcaacttcataaccttaaactcaccctaaatggacacaggcctctctttgtctcactcatctgtaccgtgtttctttcgtcagt

SEQ ID NO: 7959 - DNA, 5247 bp, Cucumis sativus
  Intron number 1 from transcript Cucsa.362180.1 (locus Cucs a.362180) derived from phytozome v7.0 (chr-ID scaffold0361 1; pos 150673 to 155919)
gtgggaattctatcaaaatcgagtttgccagaccggtttgtttttgttctgatctttccgttgtgttaggtttaattggatttatgtgtctgtataacatgactcatgtgccattaattactagttttgttttgcaatttattggttttgcaccttcttctgtttgataacgcgaccactgatgatataggcgtaatcttcttcttacgattaaagttttctgtttttttgagatccaaaatcgaatttaacaaactcagaatcgatattcatggtatacatagcgatcaaatattcttccgaaaatagtctcctggactctctcatttaattcaacttgtagatgatagaggaattaatgattcctctgcatcctaaagtttattaagttattaagcggatcatgttcatcgggatttaatgaagaacacgagatgcaaaacttttcaagcttcaaggcaaagctagctgtacatgcgaagagacatgtttgatagattcttaataattgggataatatatcaataattggtgtagcttaggaagatttttcgatataaacctttcaacctgatagcattcggctgcattgaaactatgtgtaatctaatcatcaaaacgatataagcctcgcaatcatatccaacctcagggaaaatttgaatttgttgcttaagttgtggtaccaaaattacaaactcttcaaaagtattagattatttaatcactctattgaatgttataagtaatgagactgggatgggtgtgttctctggtggcctttctttgtcattccctcttaattaaacatgctatcattaccatctagtgaacaaataggcttcacttttgttttcgtagctttttatttggtttacaataagaattctcaggaggtcaactcatatcatatgtgcaagacgatataggtataaagatcagttagctataggttagtctagtagcattatttagcggaacaaaattttgagcttatagtgtttgtaaagtgaagcagattgaagtgcaacacaaggacaaaaaggatacgacggctttaacgaggtgaagcacataatgaatcaaatatgaacacatatacagtatcaaaactcgtatgaaacatggggcaagggaaataagaattgatctttaaagacaaaaacacggttttatatataacaggattttcaataacaaaaaactgaataattaccaaagtgactacacaatgatgttgcaaagacctactagctaaaactcatcacaactaaatagatcattatctcaatttcctcagcattgaacttcttttacatcttcctctttcgtatattctctgttttgtctttttttttttccttttggttttggataagaaacgtatggagaagcagaatttccttgtttctcctcaagtattgtaaggaggagagctttgagtgagagggctatgcaaaggatatgaaccaacagtttcttctttttgttatgctatttgcaaccttagttccttaaataatcattgcctttagccattatgtacacgctcaacaaggatgggccattcttcttattattttgttattaccaattctactagttgatggataatgctgggaagaacattgagatccaaggagtttctaatttactgggtttaagaacatagtatataatagtaaagattaaaaaaaattaagatgttgcttcgttggtggtggaaagtgcacatgcatgatatttggtctgagtgaggtcctggttttggttttttattcccatatccagaagtaaaggttacatttctgcatttatttcaatagcaattagtcttcgtgtcttagctccgctacttgtctgcctaaaagaaaaaaggtgtgttttcaatttgtcctgtttacttgaggaagtgttttaacctggaacacttcagttaatagaatactcctgtttggtattttttttagcatactgagccttcaatcttgatgtttgtttggaaatagctttccttttaatattagtcattgagcagcactctgaccttgacctaaaatcttcactgtcatgatgattttaggacgaaacattagtgaaaatatagaacatgttatcttttacaaggaaaattaaaataaaatcaagattcaagaatggatgtaggttttttccaactatagagattttaaaccttgaaggaagaaatacaatgaagaatcacagtacaatggtgaaacacagttttctttctttcttttttttaataaactgagaaatgcttgttcttatagacaaaacagaagacgtctcatctctcatcatattaaaaaaaaaacagaactgatgtaaaaagggcttccagtttctaataattaaagcaaggtttttgatacaccataatatctttgtggcttgaactttgccaagaagctcagtgttgtctactaccaagctacctacaaataatctaagattttgttccttccatgtcgtccagaaagtagctttaaaagtgcagccccataggattcttgcttttcccctagaacaatttcccaccgaagcttcaagtgtcaccaatatgagcaaatcgttgattactaataaccattttttggttcatgctttgtggctaatgcttgatgtatttataaccttacttcaaatgacacgtaaaatactctgaaataatgactatttccctttgggatcagctttggtaaaccttttgtagtgattacaatgttcatacactttttctgtttacatttttcctggggcttcgattgtatcctttatatttaaataggattaaactgccatagttggcctggggactgtaaggaaaactcacttctgtggtctgattgtgctagtagaacatcatttcctatgatttctccttttctgggtacaaaaatgtaggatacgtggtagtctcactaggtggatcaacatgtgattgtgaattcattttcttgaatgtgattgtgaactcactttcttgaatgtgattgtgaactcacatttgaactaaattgtttgtttgtgaaacaaagtttaaatctttgaaatatagttaatgcatagcttttttgtgagagagaagtggtcattactctcctttaatggtaatcctcttggagagaaggaatatatttgcttcgatacaaaagaaatgctccaatactgcaagagctactatatttttcagggtggtactctattcccttgaaatgtccctattgccttattagatcatttgaggctaatgggcctatctagtagttctgtgaatcgcatatattcttggtggatctaccaattagagttctcatcatcaactttatgtagtattcctgtagttgttaaagttaattcttttatctgactataccaaaaaatacagaattctgagcaagttattgagaaaatttcttttattttttctttaatgctatggatgcattttattgagagataggcttcttgctgattagttttataaactggagctgacaacttattgttttcaggccaaaccttgtaggaatttatgggtgggtggtattagcccagctgtttcaagggaacaacttgaagaagaattttccaaatttggtaaaattgatgaatttaagtttttgcgagatcggaatactgcatttgttgagtatgttcgattggaagatgcatcacaagctttgagaatgatgaatggaaaacgcattggtggagagcagctccgagttgattttcttcggtcacagccaatgagaagagtaagcttttttcagaatctcaataagcatcaatgttctatcttagatatgttttcagcatttataaactaaggcaattaattttcttcttttttttgtatgaacttcacccttgatttctacttctcattgggctggatttttttttgtccttgtatgttccgaactataatattatattatagtcaactctttcttctttctgaaaaatggacttggagaagggaaactttgtgtttagatttattcaacaaatttaaagaaagcttgagagggtcttgcatattattagtgtctgttctagattggtgcgcatatcttctttcttttatcagagaatatgttaaatttgagttccttcatgcttgaacaatggaatgcatatcattatttgaagatcttcttttatgtcaaacttttgtattcattttaaaattggtttatgtgactgctactttctctctatagttaaagcaattaatcttaatctctttaggatcagtggccagatactagagatgggcatggacagcttcaggctagaaatatggggatgggtgatttccaatctggttataaaagaccactggtaagtcttattgacatataatcgacgatgtttcaccactatatttagacagcaattctttaaaaattaaaatatgtgaaggcttatacgtacttgcacacattactggtgttgaagtaacttcaaagaacatgtattcctaggtcctgatggtattttctaaggttcttagaataaaataaatgacttttgtattggatcaacgatctttctccatcagataatatttttctcatttttgtaaccttctcatggatcaagatcatcaatacactgaaattgaacctttgatcgacaattttaagaacctcttgaagaaccaccacataagaggtattcttttaactcctagagatggcaatggggtagccaattatgctcattgagtgacccaatcagaagtttggtagaatcatatcctttgtggtttcattgcactctcccacgagatgtcggatggattttctggtttttgcttggtttcgttcttgtattttctcacactccaaataataataaggataactctcaaattatgaattaaagttagtttattgattcttgtaatcatatcattgtaaccacttgacaagaatgtgggtgtgtgctcctctttgggattgttgcaggagcagaataacatagtgtttagagggtcggagagagatcctagtgatgtttggtcccttgttaggtttaatgtgttcctatagacttcgattttagtgatcttttgtgactattttgtataattggggctcctttctttagttgggcttagttcttttatatacccttgtattcttttcatttttgaacatggttgttattatataaaaaacggcaatataatcgtttgataaccaatgcagc

SEQ ID NO: 7960 - DNA, 828 bp, Cucumis sativus
  Intron number 1 from transcript Cucsa.025300.1 (locus Cucs a.025300) derived from phytozome v7.0 (chr-ID scaffold0034 5; pos 150716 to 151543)
cccataatccggtaattcagtttctattttcttctgtgtgtgtgtgtgtttttttacttgtttcttttcctgaattgatgtttgggtgtatttccattttctactgtcttagacactgaggtgttgttggattgaattgaatgtttgttgttttttaagcgttataaactggatgtgttgggaaaaagaaaaacctctcgttactaccgaagaaagtaataaaactaggaatacaagaaactaccgaagaaagcaataaaactagtaatacaagaattaatgtggaaaaactccaaaccagagaaagaaccctgggcatattatttacaatcacatagaataattctctttcccaatccaattacaagacaaagcttttgtgccataccactcacccctcttaactctaatctcaaattagagaatattagtagggaatttaactagatttagcacatttaaagtgtttttaacggggacgatttgaaactactctcccaacccaattaccagagctaccacctgaagcttttgtaccataccacccccacttttaactccacctcaaattagagatactagtagggaacttaactagagttagcacatctagtttaaagtgtatctaacagggaccttttgaaactaaagccgtaggccactttttaatgttgggatcccatcactcttaacttttttcatgcgagacaattgcacttctaatattttgtcaaaagctcaacatgatggattgttgagaaattttcatttggaggaatcttgacatatgatgggttttttgctttgttttaaggttaattggtatcc

SEQ ID NO: 7961 - DNA, 1004 bp, Cucumis sativus
  Intron number 1 from transcript Cucsa.161980.5 (locus Cucs a.161980) derived from phytozome v7.0 (chr-ID scaffold0114 4; pos 1734774 to 1735777 reverse strand)
tccctcccacctctcatcggcgttggctcagtccggtgaggttctctgtcttcgacgagaattcgctttttgtttctcttcttttcctttttcaattcgcgaaatgctttgtgtgtttctgtatctttcaatgtagaactctacttagaaacggttttttgttttctttgtcgtgggtttagggtttgaattgatggttattttggttggatcattttaatttacaacaggatcagtcaacgttgtgtagtgaggggttttgatccgtgttctttgggaaattcaactcgtaattttttaattccgtttgaaagaatgattggagctgtgcatttagtctttgtttgattccgtatgattctgagaaacttaagggaaattctgatactacgggacataggaaacctcatttctttaactatcttatctttcttttttctgaaaatcgtgttaaacctcttaattctggttgaaaaagaactttgcaggtttttcattaacgactcgagtaatgcatatatcttgagaaagaaaggggtcctttatatcggttatgtgatttttttccttcattccttcgttccttcgttccttcattcctccttttctttctttctttctttctttttttgttgtggtggtcatggtgtggaggaggttatataggtggaaaaccaaagctgtatttgcatgatatcgtggagtgaagctgttattaacttatcgcatgaagtctttatttgatcttccatttgttgtaggtgtcttaaactttatttggatgtttcgatagtagttgtgtatgaatctatgatatgcctaaagagcttagataccagttaaattaaatgcaagatttactacttgtaccagtatggtatttcatatttgtgttaaaactatggctaaacttctggagttcatttactacttctttaatatgattattgatatatatatttttttcagattggcagctttgtggattgacagagttgcatcaa

SEQ ID NO: 7962 - DNA, 4177 bp, Cucumis sativus
  Intron number 2 from transcript Cucsa.321510.1 (locus Cucs a.321510) derived from phytozome v7.0 (chr-ID scaffold0308 0; pos 1303292 to 1307468 reverse strand)
ctatattcacggtaagaaactgatctatctattggctacactgttactctgtttttgttatttatttcttgccatgggatatcagttttagcgaatgtcaatttgtctatcatggattattcgtgtttgtgtgtgtatgtgtggtgtgttgaatcttcacttccatctctgccctttctgagtatagggatgggattatgcggttgtggtggggatacatcccttataaccttggaacactctagctagaaaaggaacgaatgattctcagaacacaatattcacttaatgtttcgaaaggaactcatattagggactgaaagttgctatttttttggtttgaaagaggcttatgtgtatatgagagtggtgatgttaagatttaagaaaactcgagatgatattttcttctctctatgtaatcactgtgatcagtaatttttggtccacttaaagatttttataaattctttgtagttaaattgaggcttatgtattgcaccactcttaggataaaaaatcctttacattgctttaagccatttaaaacattcaaattttatatttggattgatttctagaggggttgagactgcctggaagatatatggttcctcgataggttctatagtctctctttggatttgatgtacaatgattttgtaattactctttaggtcttattttgtgagatctgattccctttttttgttttagtttggcttttttgctaaactattttgaggaatgcctcttgtatgcttctatttctttctatagaagctagaatatatatcatctttcttgtgaaagatggatttacattcaaaagccatcaagtgcacctagggccttttgctttgctcatccttatcgtctaagaagcacatatactaagtttggctagcgcgtctgagtccaacatgtgttggacgcttgagcactccgacattagttggacacatattggacacttgttggtgcaatgaatgtgttagacactaattgtacacagtgtttcaaggcgtgcgccttgggtcgcttaaggcgagaggtgaggcaatctttggttgttgcggtttgaatgcagctaaggcaagctccttcaaccagacgctcgcctaactgttccctgttgttgccttgatatgccttttccctaagataagatcaacacctgtcctcgtttccctttttttttcttttgatgtatcaaaacatgagaaataaaaaagcctagtgaaagagacaagaaaaaaagaagtatagaaaaaaacaaaggaatagaaagaagttccctctttaataaaagaaaagacaaaggaatagaaagaaagaagaagagaatggttggaaggagaacaaaagaacgtaaatagttacagaaaagttgataataaatagaaagaagaaggaaaggcagtagaaggagagtctaattcgagacacaagttggctgcatgaaaccgccatatgacattattactaagaactaaggagaatttgtgatagcttgaaatttccatttggcaatttcctcacataagtaataaatacagggctttatattcaggaggcttatagggcaagaagttggttatcgtagtcctaggttattatagttggtttataatagtttgtgttttaggtgtagattatttttgtttaagttataatagtatgtatgtgaggtgtaaactattttaagaaaaagaaataatgaatgtaaaatagtaaaaacggtagcaaataggagaggaatggggtttgaaatataggaaagtataaaatagtattcactgtagcaagagatggttattatagtcttgaatatgcttgcccaaacggctccttaaaggttgcatggttaatgggtaatattaggcttgccccaaggggtggttattagcaaataggagggaaagggggtttgaaataattgcgtagttttccttagaaatgtttaaactcattatataactgattgggtggagtattttatgcttctctttctctctttttattataaaccgaagtttcattaaagattaattaaaaaatacaaatgtttactgcaagaaaaaagcgagaaacgaaataaaagaaattacaacaaaagggctgtaataatttagaaaagtgatgataggtaatcactaaactccttactcattgacatctaaaggtaggcattaggcttaatcaagatttgcttctcttcaaaagggctttgtgccccttttaaaattccccaccttgcaaattggacttgaaaattgatctctataagacctgcgatctctgagtaacactaacacctgcctagaggttgcatgttcaaagctttgagtgagcttaaataaggacaaatcctcaatatctccaaagtcagagtcctggggtgggtatgcacattattttattttatctatctatttatttttaatttcaaaattgacatctctataaagcgtgcttcagttcagaagcacccttacataagaggcacaaatgaggtccaagagatgcaagagttcaatctttaggtaagctcaattatactgaatctgtcgtgtatgtattgccaggcaaaaaacttgacattatctgaaattctaaccttccaaactgaggataaatgtagggtgggggctgggaattacataggggagaggaaaaagaactatgagaaatctgtgggattaagtggtccatatacaaacatctctagtcttgggtgatgaaggaagatgtcatgacctcacttgtacaagatctgttctattctatagattgtacaactattgccttgaattctaagaagatgttgatcttccatgaaaataagattgtacaactatgccctttagttctagttttgatttagaggaagtaaaattcctcgtgactttgattttggtttcattcaaaaaacctcataccaatggagatatttggagggttgtgttaggataccatctaacaagaaagtttcaagagcacaaaattctcaaagataaaaatgtattgaaatataagagaagttacaatatatcatagccatttgagaggctacactctcccagactcctacaagggaaatccctaaccaaactcactacctctatttataactaaaaccgtcaataaagtccttagctaattactaatatgcccttactcataaacatattaatattcctaatataaccataactagggcccttacacgttgttgtctctaacaagtggtatcggggtcatgcttttgacctagccatgctggtaaaattctcgagtgctaaataaagaagtgtgtcttgaaagatagctatggtggagatttgtgatagagctctacaggaatagtggaatactaatgacaacaggagttgacttgaagagcttgatggattgatggccatttgaggggaggtttgatggtcatttgttcaaggagatgattgttgggaatgtgtaagacccctagttacggagatagtttgtaggaggagcatattagtaattagacaacaatttgttagggtttagttataaatagtaatttccttcgggaatgttggaaaagtctagggcctcttgaaaggctggtgattatttcaatatattttcatatttcagagtttttgagtagttttgttctcgagtattttcttgttagatggtatcctaatagaatgtaataaagttccacactggctaaatacgatcattgacttttgatgatttcctaagaagtctcatcaacttttgtgcctcctatattttatatgatttatcaatggtacatggaatatttgtttggacaaaatttttattgatggtccatcaagacctattaacttttaagataagaattacaacaattttcaaaggtcaagttaaatttgattcattgaaagtttgtggtaaaaatttgatgcgtcttgtcaagttagtggtaaagattgatctttccccttgaaaatttatctcattcatcaaatataatctgggcatttagaataggaatatcggcttatgtacatattttgttgttgatctgtctgcagacagttttgcctggtaggttagggaagacttgtggttttgttagtttgaggacttattatatgattctgatatttttgattttatgctgcagtgttaaaagcaa

SEQ ID NO: 7963 - DNA, 4264 bp, Cucumis sativus
  Intron number 2 from transcript Cucsa.111880.2 (locus Cucs a.111880) derived from phytozome v7.0 (chr-ID scaffold0095 3; pos 551042 to 555305 reverse strand)
tctcagaaagcacatttcttccaccccatttccaggtatttcaaatacccttcacccattgttcatctttaataaaaaaaattatttccatcccattttaattaaacttcatcatctatgatcctgttcctgttcctgacttcctgtctgtttcttttcttcattcatcgacatggtttccttattgctggaattcttgacattttggattcatgtgctgctgctgtgttgtgtatatctgatttgttttcttgatagtcacaagaacaagaattattgggcatatacttttgtgggtttcatatattttaatttttattggtcaatttattgtttatttattattaatgaatataatgattcctgcatggatttgtgtgagggttgttgtcccccactggccactcccccattgtgttgttttgttggtttcccttcattctagcatcgtatgctcatgtttatgtttatatgtccatgacaggtgttagaagctagctccttctaactatgttcatgccatgtgtttgtcactgagtgaaaaaagcgcactttcacaaaacaggataactttttactattttcctcttctttaaatggttgtttcaatgtttagccaactagggtttcatggggtttggtgaaatgccctaggcctaattagattcctgctaattagtgttcaaccaactaaaacgagagtaactattcctttcctttgccctaagggctataaatataatatttacctgttcaagacaagatttttaaaatttgtaggtcacctattttgaaaacctaataggtgagctataaattttaccgttgtggttgatgaaatacataaatcatatctttatatcttatattatctttgaaataacattagtttattttaaatcccattttagcgaactactaggcggagttttttttttcatgcaattgcatagggtgcttaaaattatatttaaacatagggatacaatttgcagatctcatagatcagagtgtcacttgcatgtgcctgacaagtcaaacagtcaacgttaaatctcttctatgccattagattcgtacaagaccatagtctcagaaatattatgcacgctaaatttaggtgaagaagccttggtgtccaaactaatgtatctattaaaagataactggtaaaatcgaaagaagttagatatataaagtagaatggttggcagggagagtaaaaatagagcgtttcaagttgtggataggaattgtaggtaaggtttttttgttctttttgcttattattattattacttttttgttctatatattgtaggaaaccctttttctaaggaatttttatgtagatttgatcttttgtatgccctcctgctctttcccttacttggaaggagttatttctataaaataaaataaataagtgggatattaatagtgagtttaagaccatttttgaaatagagttctcaagatgttcaagtacttcactgagctcggtagtgtgagcttgtaaccgaagacataagtattattgaagtggttggatgttggttcggtccacaaagtagggtcttactaggataatctctagcctgcctgttccaagtagggagttaggccttggattttggcaaaagtccagggttcgctgccactaaagaccgagggaaccacgtgagactggtttcacagaggagtgtactctcatctttacaaaaaaaaagtgttttacttttttgaacaatttaggcgtcagcatatagtacactttgaccctttgaaattttttagaaatactttactgtcgtgtatttcatgataaatttgaacgacctatttaaaaaatagaggatagtaaaaacaaacggtcttcaaaaatcatctttgccactgtcatgcatttgaactcacctagaaatgaaaacctaattttgtaaataagtaggatacatattatggagttgattgcaacgttggccacgatcaattcattcttagatgagtgcaatgcttgtaagaaattgtgctatgcatgtgcatgattcttctaaacacccatttttagactcaccatatgtaggcaaaaactactcgtgcgtttgtatttcaccatcactgagccagagctgaacttagtctaaagaagtaggccaacgaaaaaagatttttctacaaagacatctttcatttcttaattatgaagaatttgtttttacttttaacattcttcaaacttctgcatatctcaatctcacatgataacctatcatactctaaaattttaaaagtcaaagaaacttatagtatattgaatcttagataggtggctattgttggattgaaatcattccctttatgttctctattatactcataggtctttgaccactagaccgattgattgataatatttaaaagacatcccaaatcttacaacattatataaattgctatcctatgatcatcacattagatctagatgttagatatctttaagttttaagttttttgaatgtttgttttccagagctttagatggtaattttctttctgttgaaatatcttcttgaaagaaatagaaatatggagtacatctttagttctagacaacttgtagtgagcacataacacaagtttgagcatgctagtttctctcacatcaacaacttgctaagaatagaagaacatgcttttgagccactctgctttttccacttttcgtctcacattttattctgatttttgtagtttgacattcaaatttgattatttatacctcttttgtggtcaatatggaataaattacatgcaaatcagaatttagcttagaaaagtagaggaacagctttttagggggagaagaatcgaagttattttaactttaagaaggaactcattttaggaaaaatcaaatatagattcttctctacgtaactttagggtttttaataaaagaaactataagaagatggttgaggaaactattctctacagtggagattgttctattgataccccagtttaatcatgatcttttcggtcttatgcagttgctggttctaactttgttctgttacttaagagaacattgatggatatcttcgagaaaaaaacaacctaaaaaatcaaatatatttgtctagtgtcatttactactaatagacattgaaaacaccctacacatagacgttaacattgtgatatatttaaaaatattttcactatttaaaataatttccttgttttttagtaatattattatacgtttaataaagaaaattcaatcaaacaagattctagaatcaaggtcccttgtgggcgcctgactttgggtaaatcaacaaatcattaacatgaactgaagtttacaacatttgaaatcaaggtccctagttgggtttaagttgtaggtattattttaaaacactgattagctgttcagttaaagagaacagtcagttgatcgatgatggaaaagtgtttaattatgaaccaacagtaaaaagaaaagaaatctttaggattttaaaaaactttgtaggattgaagttccctttttctttttcgtggtgaaggtgttgtcaaaatttaacactgcatgtgtagttgaatgcccaatgggctattgggcttaacaaaataaaaatgctattgggtcatatgagggggatcaaacagatctaataaaaaacaaacaaataaccatttaatctaattagcattgctatctactttcattttattttattttccctctagttggcactctcctaagttctaactagacatattcagctggctgttcatttaacataccccatatttattttcttgctttaactgaaaaacaatcaaacagccctttcactgtcatgtgtgattagaggttgaaaacaacgagtcccttttttcatctgaaattttgattaagatcaagagaatcatttttttatatttctttaattgctgatatgatagaaagttgaatgtataatggagatattattcatgaactttttggctttctttcttttttattcaaaaggaaagctaaaagtaaaatgtttgactttgtgctggttagagggcccattcaaacggctgaacttgttaataggagctactatttttttaaaagtaaaaattgaactagtcaattggagctattgatttttaaaagtaaaaaatgctattctttgattcttagttattgggtactacctttctttcttttaacagattcaaagccttccgtgag

SEQ ID NO: 7964 - DNA, 8117 bp, Cucumis sativus
  Intron number 4 from transcript Cucsa.029800.1 (locus Cucs a.029800) derived from phytozome v7.0 (chr-ID scaffold0039 9; pos 8623 to 16739 reverse strand)
ttccgaaggggctttatcttgacagagcaataaaggtattctatttttctctttgttgattttttcatcatgcatgcaaattttgatactctcccttattggctctaattgacatatttgttttctactgtttggttgtcactcaataccctcttcaaatttggtttacatctattggaagttttcggataatagatgatgcatcataaatgttgatttgaatcaaacatgaaataagataggtgatacacatatgaattacgatcgaaaaacaagatcttaactttatcttggctgttggtaaaattggagaagtcttgttgattatgtatatattcttaaaatacttcaatttcctttctcatatatttcctgttatgtgtagtgtgcaacaataggtatatacacacatacacaaaaagtcatcaaatgtattgggtggttggttacacacactaagaaaatttgacttcaagtttgagcacaagaaaggaaacaacaatcgagttgccgatgctcttagtcataaaggcaagcatgtgaccttgtgcatgctaaccccattcatgcgagtaaagttgataggatgatgcggggcatcatcaaggagttcattccgaaggatccctttgcctaggttgttattgctttagtcaaagctggtaaaacaagacagttctgggttgaagaaaacttcttgttcataagaggaaatcggttatatgtcccgagagcatgggatctgaggaagaagttactacatgagtgtcacgacaccttgtgggttgaccattttgggtggcagaggacttatgtgttgttgaagaagggctacttttggcctaatatgcaaaacgatgttatgtagtatactaagacatgctgatacagtaaagcaatgcttagaatttttcatgagtaatacttctgagatatctgttattaatgagaggagaagcctttttataggctaaaagtttacaagagttgttagaagttagttgttttagaactaacttggagttgagttagtttacttatgactaactcaaaatacaagattagtaactcaagatacacaagttttaactaaagaacaactaatcttaaaaatacaagaatggtaattcaagatacacaagaattagctaaagaaatactaaagaacttaaagaaacatcaagaaagaaggatgttctacatcaaacccctctcgtaggataaaactcgacctcaagtgaagattagggagctaaagagaaggaatctggtgcatagtaaggtgacaggtcagaaacattgaaagatgggttgattctcatgtttgctaggagatcaactcggcaagcgttggggctgagtctttccaatatttgaaatggacccattctcttgttggtcattttgaaatgatgaccagcaggtagtcttgattttcgaaggtacaacataactaggtcacccacttgatattccttaaagcgtttgtgagagttgacaattgttttgtaggagtcaatagcaagctctagatgactcttgatttcttggtgtagcttggaagtacgttcaaccattgcttcaaccttcatactgacatcaacaacagaaggtagattagctaaatcaaaagtgacttgagggagactagtatatacaacctcaaatggggacttatctgttgatcggtttgtcatgtggttgaaggtgaattctgcttggggtaaagctaagtcccattgtttaggcttgtccccactaaggcactgaataaggttgccaagagttcggttggtcacctctgtttggccgtcagtttgtgggtgggtggcagtaccaaatagaaggttggtatcgaatttcttccatagggatctccaaaaatgactcaaatactttacatcgtgatttgacactatagttttagagattccatgtaatctaacaatttctttaaaaaataagttagctatattcaaagcatcaggagtttttttacaagggatgaaatgggccattttactaaagcgatctactactacaaaaacagaattatgacccctttgtgttctaggtaaacctaacacaatatccatagataaatcctcccaaatagtagaagaaataggtaaggaagtgtacaaatctgtattttgagaattacctttagctgtttggcaaatagagcatcttttgatgaagttagtaacatccatattgagttgtggtagctaatcgcagccaaaattttgtctcggccaaagtgtcctgctaatccactagagtgtgcttctttaattattgcttctcttaatgatgtatgaggaacacacaaatcatcacctttgaagagaaaattattaacaatgtggtaatctttacaaggtttatggttagagcaagtttcccaaatacttctaaaatcagtgtcagtagagtacaatgtaggaaggtgatcaaaggcaattatttgagattggtgggtgctgagaagtataccttttcagctgagagcatcaacgaccttattagacttacccttggttgttctcaagctcaccttctcctaggggattcgcttcatcaggatctgcgaccttattagacttaccctttgaatgtgcgacgggttattgtgcggcacttgctctaaatcggtgaacaagtcagttatactaaatccgaaagtcactaacaaactctgagtatgatgttgcctcccttcatgtcttttttttgaaaaggagacgagcctcctaaattattattaataaaagatccttaagctcaaagtacaagagtattatgttaagagcaagaggagaaaattcagtctacctctacaacaaaagctacaaaacaatttccaaatagaggagatcaaactaaacaatgaagatatcaagctaaacaaaaccatattcgaagaaatctaattacaaagcatagtgcaaaatcctctcataaagaaataaatttaaactaaaaactttcaagaagatgcaaccagctgccttgaaactacctaaccaaattaatccataatccagaggaagctcgaagaagtcttccactattcagcatcggctagaaggatttacttgtcacccatacgaagagaaattcaagaatgactgaagttggtcttacattgaggaaaatacattaagctactgaagaatcaaattagaataattccacaatcagcaactaatgattttaaataatctggtattttacaagattggggacaagaacgagtagcagacggcaactttgcagatcttggctcttcctcgcattgaaatagggcattgagatcagttcctcacattagatcttggctcaaaatgtttttgactttcaatttcggttgacttgtccaaatgctccaattcctcactacgaatattgaaaggagagttgaaaaaaggagcgtaattctgtcacgaaagtagggtctttccactcttggatagctcgtaacttatcctcatccattcgaatttttccatattcgatgacgtgactaaaaaaattgatacgttgttgggtaaaagcacaattctctttcttaacatataactgattctgtaggagctggtcaaagactaaccgaagatgaacctggtgttcttccaaattggagctgaaaaccacaacgttatcaagatgtcatcacaaactgatctagatacttgtggaatacctggttcatcagggtgcaagggtgcttgtcaagccctatatcttgttacgcaagtagtctttggttcgtcggttgtgctattcgaacttggtaatagcttgatcgaaaatcgagttttgtaaagtatcgagatccattaattggtcaaacaaatcggttatgatcgggaggggtacctgtttcgaaccgtaactttgtttaaagctctgtagtctatacacaatcggagtgtccatctttcttcttctgaaatagcacagtgcccccataggatgcttttgcttgtctgatgaatccggcagctaacaactcatccaattgtttcctgagttcaactaactcaggtggagccatttggtaggcattctttgttggggctttggctcctgggacaagctcaatctcgtgatcaatcccccgtcgaggaggcagtgacttcggtagttccagttacattatatcaatgtattcgttcagaactttctagatttctactaggacaattccaacttcaatttgctcatttgccaacgggatgaccataaagatcggctcctctctattgagcctgtttttcagttgcagggctgaaatcattcaccccacttggttgcttcatctttgcttgtaccattgtcaagttactgcttgttactactagacaatgagccagtgggcttgggaatgactttatgttgcaagaggaactccatgtcgagtacaacgttgaagtcatgcatgcaaaccacaactaaatcaaaatctcctatccatccgcttaattttagagatacccttttcgataggttagggtcttcaacctgaaaatcagtaaaaatcccaacaagagagaaacagagatagtattctgtgatatttatgttactaatccaaaatatgagtcacaatgaagacaagaacatcaaagaacagaaaaagagagtagaatatggaaccaactccttagagaaggctgaaaacttgtccccaataaaagccacagcagcctttactacaaaaaaacctatttcccaaatccctaaacattctggctttatactcactcatcaccgtggggcccatcaggtggaatcctctctttcagcaacatttctctaagtcccggttggtagtattcccttgtgtgtaatattggaggtctaacaattctgctcagctaaaaactcaccttgttttcaaggtggaaagaaggaaactgctggttcatcaaatttactgattcccatattgcttcacttttcggcaaccccttccactgcaccagcctattgtttgctcccatgtcactattccatctcactcccaaaacccctttcgggtagacttggagctcgaactcttatgtgagggcaggggcaatgtgttgaactctatgtttgctccaatttaagcttcagttgtgaaatatgaaaaacattgtgtatattcgcttctggtggtaatttcagccggtatgccacttcactaatcttttccacgaccttataaggaccatagaacttaggagctaacttctcacaacgcttcctagccaaagagcgttgatgatatggtcttaatttcagaaaaacttcatcactcacctgagattttaattccctcctatgcaagtctgcgtgtttcttcattctatttttggcaatcactaagttctcttttaaagtgttaatgatcaaatccctctcttggaggagctgctctgcactattattcggtgtctttctatccccaaaggaaatgagcggaggtggtggtctaccataaaccactcggtggggtgtttgtccttgtggaagcgtggaaattggtgttataccatagttctgcccgtgggatgcatttatgccatattttgggttgctcatttcatgaacatcttaggtacatctcaaaacatctattaactctcttcatttgcctatcaatttcgggatggaatgctgtgcttcttttcaaaactgtccccaaggctgaaaagagttccttccagaagtttactcaagaatattttatttcggtcagttataagggacttgggaaccccactaataactcttttggaaaaaaatttcagccacttgcttggcagtaaaagggtgctttaggctaataaaatgggcaaacttgctcaaacgatccaccaccaccaatattgaatcataccctccggctttgggtaacccctcaatgaagtccagtttgcaggctcaccatggattttccaacatgtctcacgagtaagtcggggtttgttacaatgataacacaatactagaggtttgttacaatgatcacaccatactagaggtttgtttggtggcaaggaagccttattgacagtagcttcaagcatcattgcagatgtctcaacagaatttgttcttttcttgcacaacataacgcttcgacgactttcctcgttgtgaaccttagaaaaagcttcactgatggaggggaggggttttctactggtaactccacttctaacttcatcaaattcatcattgaggccggtgagaaatttgtaaacacagctgtcatctaccacaagaagtgctttatccttagttgattctcattcgtaactgtcaaaaagatctaagtcttgccaaattcttgtcaacttgtgaaaatattgtgtaactgtatctcttgcttgtcggatatcacctaactttgagattcaagtccaacactcgtgattgttcgtcaagatgtgaatacatttggttgacattgtcccataagtccttcgcagaagagtaacacatgtaattagaacgtatttccagtgatggaattgaccaaccacgttatgaccatggaattctcagcatctcaagtagcaaacaacggatctgtcttaggtgatttgaacattgggaagttgacagttgtcagaaactttggtcattgatgactttttgtcagacagtactgattctaaacagcaccactaaccaaaaggggagttagaacaaaattaactcacaaagacagcagctgcctcactgaaaaacactcaattgacagtctccaaagaaaaatccccacggaagcgtgaatggaggaccaaaagcgctgatgacgacaatggaagaccggatcgaagattagcaacgaccagatctgaaaaaaaaggttgacaacgaaatttttttgacggccagatctggaaaaaaatcgttaatgattagatctgaattcaaagatgatgagcactagggtaggtagacgacggctgaagcggaagaggtcggtgtcagcacaacaattagagttgatgcttttttgtttgatgctctgatgctatgtgaatatttcttattttcttatcattattacaatggcacgaaaccctaaattaaataaaatacatcctaaatgaaataagggaaatatagatataaaaggaaagaatccttcagaatagctaaaacaaattaaaccaaacaaaaccaaatattatggcataaatcaattccaacttgtgctcaagtatgccaccatgatttggcgtttgatgagggacatggtggcaatgcaagcccgtgcctccatgtcgatcccttggatcttgaagtatcctttggtgtcccataggaaatttttgatttcctttgtctctcaaacctttgaatggcaacagttttggtatctttactttggaactagcattcttcttggaaaacgagtttgccgataccctttttactaaagaaagtttgctatgtgtcatcccaagttttttcttcaacatcccgacattgatggccatcttggaggataagtcctccaacttggcaacaatggctaccaactcttgctcatttggttgatgaagttttctaggctgccttcttacaagaaagcaaactttcactgagagaagtgataaaatgcacaagaaaaaagatcattaaacaatgggaaaggactccaatctaagtgaataaagcccaactgataaaaaaacgttaaacctaataacctctcacagctcatgatgccctaagcctgataaccctatttcattaaagttattggacttgtactttttttcgtatactatttttttagtacaacaatttggggtttggacatttgaatctctgacctccggaatggaaggtcatgtcaattattgttgagctaagctcactttagctattgaatttgtacttttggagcagagttttatgtattaaactcaactaaaataattttcttgaaccttttgagatcattaaagcccttatgttagttgatggtgcaatatacttcgttattattgtataattcatttattttcaaggttcatgttcctgataacttttttagaaaaaaaaaatctgttgatgtcggtgttggtactaggtggcaaaag

SEQ ID NO: 7965 - DNA, 854 bp, Cucumis sativus
  Intron number 5 from transcript Cucsa.178440.1 (locus Cucs a.178440) derived from phytozome v7.0 (chr-ID scaffold0122 7; pos 672118 to 672971 reverse strand)
agcttcactgctatttttatttcttctctaatttagttaggaaattacacaaacttctgaattttattaataaacaatcagttttactttcctatattgcattctttaatttttatacttttatatttttatatttttatttttgtggtgatcatcgcgtgcgttttaacattatttttttcttttaatgtaattttatttcgttgaaatgaccccaactactcaattgatatatacatacacatggtttagcgatttaaaaggttaatggtttaaatatgatctcacgatacaaatatttttttcttttgttaactcttgctcgaatacatgaaatgaacgtactttggttatacaataaaaagaacgaagattcatgacgaaaattgttgtcaaatcaacaattactgaatagaaaaacgaaaaaattgggcacctttttagcagcctgatcatccccataaagaatttggtcattgaagaaatatgttggtttaataacagtgtgttaatgtttttagaacaatacaatacgttgtcattagattagaaagtttgtatatgcacttctatgaattctatgatcaaaatcgtaaataattaaatatgtacaattacaaaaaaaaaaaaaaaaactaaaagagatttcgggagcattgctcttgaactctcacaaaagactaacaaattcaaggcgttccaacatatattaaatgaaagcttgaaggtccaacgccaggatagttttgttcaatgatatcgaactcttggttggaagtggttaaaatatatcatcgttattcatttgttcaaaatgttctttttagattaaaaaaagatacaaaaagaaccct

SEQ ID NO: 7966 - DNA, 1091 bp, Cucumis sativus
  Intron number 2 from transcript Cucsa.109210.5 (locus Cucs a.109210) derived from phytozome v7.0 (chr-ID scaffold0093 4; pos 126624 to 127714 reverse strand)
ctgtaagttgagcatcaagtgttacacgttcttttttttttttttttttttttcttattattcttaatattgataagttggtgtttctttagttgattgaatcaggttaattttctgggtttatggtgctgacgatgaaatctatttatcagctctgttggattttttctttttcagcagtttggaggattgatcgttttttgcaacgttgttagtgaagaaaaatattgatagccgtagaatctgatgctttttaccttttttactgaagaatacacaatttatagctccaatatcaccatcacaattctgttggaaagtaaaataatggattcgggattatcaaaaatcaactcgattttgtaaatgataccttatgattttaaacactgttatggctcgaaatctgcaaatcataatattatatctcaattaattttcatgaaactagtacctatacaatcgtagaagctaccaaggttaattccattgaagttaccactaccacctttaatgggattgtagtgtttcttgatttactaattcacagcaatgtttgaatctattcgggaagtaggcaaactaaatgaatttcatctgtagtttccttaaccatttatccattgacttttaaatgatgcagaagaacacacacacatatatatttggacaattcagcttttctcacaaaattgccaactatatgaactcatatttgtaccaaccaggtggttccactatttttatgaatagcatctactgggcaatttattcatgtttacaaatctttcatcactttgaattctttccagtttcatttcctcataccataacacacttgcaattatgccaatatttcttttcttcaaagctatgctgggtattatttgtttatttttggacatgtcattcactgtctttactgcattggattgtagtacaagtaatagctcttactacacaatctcagtgtttgtttgtccagttatcattgaagtgtatgtatttgttagtccatcataataattgttagcttataatttttgtttatttcaggtgtgcatattttatcttgttctgcgagccctcga

SEQ ID NO: 7967 - DNA, 1660 bp, Cucumis sativus
  Intron number 6 from transcript Cucsa.397600.1 (locus Cucs a.397600) derived from phytozome v7.0 (chr-ID scaffold0415 8; pos 5536 to 7195 reverse strand)
ctgcgcattcaggtaaatttttcacacctcatcttcaattagattatggaaaatattttgatttccgtcactttattttattctaataaggatttataacttaaatgtcgtatgatgtcctttatctagtttggcgataaattaactgaaacttagcgaaagacttcataggaaataattgaagcaactattttgatggataaagtaattagtgttcatttcatcatatttatgttcttttaactcacagctagtattctgggattctgactcttgttggtttatgtagttaaacaataccaaattgaattcatttcaattttttactttctacttagttttcaatgagctgatagttacttaaattactcattttagctgtatattaatggtaactatctcatcatcagttacgtacttttgtctcatgaaaaacattagccataaaagaatttttgccaacaaatttgcatgtgtggaaaaattcaaagttcttgtgccttctttgagcaattcaaggtcgactcccgccatcatatcattgcctcatttggaaatcaggctttgtagctgattctcacgtgatcttccaaccattctagcttcactgcaaccatcctcccttttcaagttcagatcacgaaagtctttatatcataaatgttgccatattggcttatacaattatattccagaagtcaaggatgttatattgtattctgacctaatctattgtgacaaattatgtgagcgttagtagagtagcaagggacaaaggggaattcattcaaagaatctttattatgatcaaaggttagtaaaagagatagattccctatttatagaagaactgaaaacaaagttgttacgaaaccaataattaatcaatatgaaggatgtaaagatcgacatacagatatacgtggttcactaaaagtgtgttagctacgtccacgaatggagggagaacaaatattattagagagaatgtttatagtataatacggtgccactagcttaaagagtttatatattgcacttttctaaactctagaatcaaaatcgtgaacaactcaattacaaaaaactaaagagcttccgggggcattgcccttgaaccagtaccatggcgcgccacccctggaccccaactcgctgactggttagcgagatcctagtactaggtcgttcgtagcactacatagctaattcaaggcatatcaaaagaagtactaaaaaattgaatgaaacttaaatatttaactacgaattaaccctggctactagggcactccctacatcagttagtgttttttattacaaaaaatttgtattagagtgtaataaggttcagttcacaaccatgatgcaattcttaattccttcaagctcagatttttttctttttaatctagaacaaattaataacagtactgattttgtcgtccaaatttttacattttttttccatatgctatattttggtgattattgagagacaggctggtggaataactttccatgttatttctcttattaatttcaaactaggcattgctatttctacttgtggaaaactgaagaacctattgttgtaccctttttcttctcctgaaaaattgcagttactagaggatcaacgaccaacaagagggacttc

SEQ ID NO: 7968 - DNA, 1401 bp, Cucumis sativus
  Intron number 4 from transcript Cucsa.232780.1 (locus Cucs a.232780) derived from phytozome v7.0 (chr-ID scaffold0198 9; pos 599965 to 601365)
ggacaataacaaagtatgttcttttatcctgatgattttggatgtgatatactgattttgagcatagttttatttatgcagagtaactcttgtttggtattatttgctccagttgttggctcctttatatacctttccagaatgaaaacagggcacttggttgagtcattagaatcttctgccatcaaattaacattctctttgatattggacgtttgtttcttatcggaaaaaaaaaatccctggaatcaagtttcttgtacacgagttttcttcattattcacttagcgattcagttgtgggaaaattatattagggttaggacggtgaagatgccacttattaaattctccagctgcagaaacgaaacctttgtgaactaaacatgaataggtagttcttgaacacttcctaatttctatgttagtaggaagttttcatgcaagcttgggaaacacaagccaactgtattgccaatgcaggaatttaaccatcactgactccttgaaattcagatcataagaaatcagataaatgctttttgcctgttggctgttcagagaatacaatggtggttgggtaaacttttcagaatagagttttgatgatgaactttctgttcattgtataaatagggctgcaaaatagtatgtaactgagagatgagaagcctgaattactacttggctggtttggtggctgttgaactttatttttggtggaatgacgtcaaagaagagtggtactcttcagaaatgtacggttcagcagtttgttcatgttatttgatcatccggtggtaaagaaaaggaagacttttaggaagatgtcgaacctattgaactagagtccatttttggttatagctgaagaaagtcaaatcttttgattttagtatttcttttgtttgtacgcagtgtaggaggattctcatatttgttattacattggtgatttgtttcactttccattctattattaattaatcactgtttttttttgccattaaagaaagaaaatgaaaacagaaattttccacagtaaattttccttgcttttctatcatttgttcaagtctggcttatttgtaacgttagcttttcagtcaatggagttctttcttgttttgccaatgttcttgcacaataaacagctcaaacctcatttgacgatgatttaatttttagttttctgaatttgaaattcatgcttgtttcctctcaagttccaagctatgactttcaacttccttacagaaacacttgaattcttagtcaatttctaaaaaagaagttatcaaacgggacttaaacaaatatttacctttttttcttctttttttcctctctcttgtgctcactctctttactttttcctcttctgtcactttcttaggtcgg

SEQ ID NO: 7969 - DNA, 1532 bp, Cucumis sativus
  Intron number 1 from transcript Cucsa.256990.2 (locus Cucs a.256990) derived from phytozome v7.0 (chr-ID scaffold0222 9; pos 4401341 to 4402872)
gcctcgatattcttcacgatccgtggtttaacaaagtaagcctttcgattctcgttcgatttcggtatcatttcttctttgatttgatcctttgtgagatgcggtgcttgacatcgttttttaaccggagttatttgtttttgtttttttgaaatggaatctgtgcgtacttcagtgattttccaagctgataatctgtattttgaattaagatttgaggggttgatcaattatctgtgttgtagttaagtggtgaaaacacttgttcttagaaattgtctaacgaaataatgaagtactactcaaattcgtctataaatctctaagactgtaactcactatatgattattgacaaccgttctgattcttgagcatccgaatgctatccttggattctggatcgagttggggtaattttgtgaagaactaatcatatagagttcagcttccttttattagttgcactaagtaccgagtactgggtctgcacgaaaaagttcgggtatccaggattattagatcaatgttcactgtttataaacttcgaaataatcatatggtttgtgaaaatatgaattgggtattaagttctgcccaattattggctgaagttaaagagcattgtagggtcggatcagattctgtttatttaattttaaattatcggttaatgctctgcattttttttgtttggaatgtgacactattatagtgtttggaatgacactatttttgtttatttaattttaaattatcgggtaatgctctgcattttttttgtttggaatgacactattattgagctttcatgatgaagaaaagagagagatgccataagtgagagtcttacatacgttattttgaatgttaaactgtgtaatgctatttgaaaataatatcataaacaactatccctcggttttttcccaataataactttatcatatggaaagaatccgattcattatttgtaggtatatactggatagagtttttgttcacttttatggatatgaaattggaaaaaaatagtgttgttcccaagtactagatcaattactgtcaaaatccaacttttattactataataaacaactatccctctttcttcccccaacaactttctcatatgaaaagaatgaaatcgtcattttgtacgtattgatatgacgaattttttgttcactttcatggttatgaaatgaaaaaaagtgctatcccaaattctagatgaattctcgtcaactattactattacgtttaatgacttcttcatttcattgaaagaagggaaaggatttactatgaagagtgccttttccttttcaaatggttctcgtatcatatatacttccaacccaaagaagtacaaaactattatggaatttggaaaattgcatgttatgtgatttggagctagtttgatctgtatttcgattcttattttgtttcggtataagtgccgtttatggacccattcttctttatcatcatagtagggaactgcatttacaatcacagaacgtgacag

SEQ ID NO: 7970 - DNA, 592 bp, Cucumis sativus
  Intron number 4 from transcript Cucsa.207710.1 (locus Cucs a.207710) derived from phytozome v7.0 (chr-ID scaffold0144 3; pos 529244 to 529835)
tcttctttgtacttttccagcttgtgcgtccattggtatgtgttgtatttctcttttctatttgtagtggatggttttaatttctttagtatttttcgaaatctaaaatcactattttgcaacatgttcaatagtatgtaatttaagtaattaaaatgatcaaccatagtaaggcaaaatttttgttgtgtttatccccaatgggaacaaaagcaaacgtttttagtttctggatgctccgtaggaattcattgctattttttccaccaaaaaatgttcattctgaatcgcaagaattttttattttcttttttctttttatatttcccaacattttgtctgcttaatatcattttctttccaaatatgctgattctatctaattgacgcttatgatttggaactctggatctgcaattatttgcttgaattttctcagttccaattccagttgtagttatggtcacactcacaagccaaacctatgatttttttcatgtttaaatcaacgactttcacatgcttacttcttcattgttagtggcatcttgttataggggaggcactcttggttacatctggacttgttctc

SEQ ID NO: 7971 - DNA, 685 bp, Cucumis sativus
  Intron number 1 from transcript Cucsa.114750.1 (locus Cucs a.114750) derived from phytozome v7.0 (chr-ID scaffold0096 8; pos 109742 to 110426 reverse strand)
cttgctctgttcttggtcagttcttcatttcatttttgttttctttttaatctctttttgtcttgttttccccttctgttctcgattttgatttagttttagtttaatggtgttagttcagttgagctgattgatgcttgtgaggggagcgaatttcaactggggatttggggattttctgctttagggagaacgagctggaatttagttcaatggttttcagattcaatagtggtttgatttgaatatataaactatcggctttctgatgggtgggattccattttcttgcttctttgactatttgagtggtttttggacttctcatttttttaaaaaacttttttaatgaatcaatgaggctttgaataaatttgtgtttgtagttttgatgtctactaatgccattgttagtacgtcaaagattgggtataaacaaattgaagaataggaacaaagattactgtgagattgaaaatactttaagtctttacttttgaaatatatctgcttattcagatatgtgattctttatggggttgtttcaatcttatcttgtcattttgagctgttgttgatattgtcttcttggatttagttaggcggattcttttccatttaaaatggcttaactttacagctgagagcaggtacttccaattcacattctgtaccgcaaaagccg

SEQ ID NO: 7972 - DNA, 4039 bp, Cucumis sativus
  Intron number 1 from transcript Cucsa.011090.2 (locus Cucs a.011090) derived from phytozome v7.0 (chr-ID scaffold0015 4; pos 408300 to 412338)
gcgaactcgaaattgggcatttagataaatttttggtgagaatctcggttatcttggataggtcttgaatacccattagaggtttgttgtaagaatttatttacccatgattttaatgctaaattcgagtttagaaagccttattgtgctgtctagcgaagttaggatgattttgacaagcttttggatactttcaatgagttttcttggaatttgtttaatactcatttagttttggcatgaacttgagttacccttattgtttaatatgaaagattgaagacttggagaactttgaagcattgatcaacacatctaagttctgtttggacaagtttgggtaaattcttaagttattgatctgttaggttgatattgagattgttaatggatctgaatctctaaagtattgatattaggtataagagcgtattgacatgagagacccaattaagtttggatattcattgtattaagattttagatttcaagtttaacaaattgaaaatggagttttagacaaaattaaggcatttgagaatgattcgagttaaatctaggaagtggggattatggtcattggaagcataaacgagcttgagttgaccctatgaggtgtgttgagcatggttgagtcaccttgacatatggaataacttattattcatataactattctgaaccaaattggggagagcgtattattctagaggatcgagctattgattgttagcggttactttcaaatatttgatatgaaaatttattttagacgtatggttgaatttggtttgtgaataagtgtttggcataacttttttttgacataattgtattatcaatgatgatctttaatgaaagtttctagtttttcatgaattctctgttatgtgaatttgtaatatctgtctttgaacagggtttgatttaattacaatttacgtgagttatgatccaaatgtgattttataatgaatttgatgaattatttggaagctgagataagtagctttggtttttctaatattttgagttcttgaaatttgtgttaaaatatttagtttggatttatcgatgagaatgcttctgttttgcttattaagaaaaactttactttagctttggattgcatgaaatgattgggtatgaaatgtatttatagatgatggtttatggaggaatgtgaagttttgttttcgaagcacaacactggtgtatcatggtgattttacccataggctacgtgaatgtgttttcataacgccacctacggttgtcaggggattctagggttgagagaggttgtaacgtagagatctaggaacctgaatctaagtgaggaggtgaatggagattgtggcattggcttcgggccttgattgacccttggagggtagctctatgtgcatataggagcctagttatcgatgatgtcgaaactgtgattaagttgcaactgttgcaggtactgaatatgtgtgagctcagtttggactcatgttttcttgttgatatggaacatgcgttagcttcttgactgtatattcagtttattttgttgtggtagacggagataaggacagatttgactgtgaatatgcgtgagttcagtctggctgcatgttccctttggatcatgtgtgagctattctctgccgtatattcagtgtttttctttactgtggtggactcggatatgacacagggttcatggtaaatacatgtgagctcggtatggccttatgtttcattgttgacattggcacgcccgtgttatgctttgccgcgtatttgccatagctcattgtgttcgacttggatatgaactggttaatatatttctagacaggcttgttacagttttataataatgtgtttaaaaaactttcctattttaaatagcaaaactatgtataatgattacttaatgaaagtatgtttttacatgccttgtttttttttaaacatgccttgtttttttttattagcttaccactcactgggcgttagctcacattttcaaatgtttttctcttaggtagtgattaagttctaggtgcctattaagccatcaaatgccactcatttctgttagacatctgcgacatcatactacatgtatttgaagagtactattatgataggttgaattttttagtgaatgtcataggatgtttgttttaaatacctttacttttggactgtaatttattttagagttgttttatcaagtttatacatgaaattttgtttggtatttggatgattttgatgagtgtgtggtgagagacttggaacttgtttgaaattgtaaacgttagaagtgtgttctccttttctttccattctaggtgtggttagcccattcttaggggagactttgtcgaaatttttataaggatatttgacaagtgctttgagtagaaccttcatgagggaaaaatctacaatgtggtgtgacagatttggtatcaaagaatggttttgggaaacctaagggttatgagcaagagtttggaaatctagaggttttgcattagatagttagcatgagtaagttgcttggaaacatgctcattgtggtctacgaccgaacttgtgatgctcttgttagtttagacgtgggactaacgaatttgaagttgaagccaaccgtgttgagaagaactttgatgagcggatgatgccttgttcggctcaagaaattgtcgtcggtatgagagttatgcaagataatcccacgaagaacttcaaagttaagtgtttgaaggctttgagagcaacaatatttttcataaaagactaatcccaggaatgtagaatattggttggagatagcatagaactgtttggggccctgagttgtctaaatgaaaggaaggcaagacttgtgatagaccaccaattattttacaatatagtaggaggaaaaagggagcagttgcacgtgaacaagagaagggaaatgaagaaagaagtggaaaccaccttggtggggaccacggttagttacatgggagagagttaaaagggaaagaaggaagggatgggaggggtggttagtcagtttctggaagtggagggctgtaatttcctggagagcagggaatgcagaaagtgttcagtttctgtagtctgtagcaagttatttccattatagtgaagtccttcactgttttgttgttttatgttgaacttggtttatctttgtattaggtcttgtgttgtactttgttttcaagactgtgttagtactgttttctgtaaaagtttggctgataaataaattagtagaacacactacttggtgttctatcagtcccttagtgaggtttagggggtgtgtgctttattgtgagatgtttaggtgtagaggaacaatagggtgttttagaggtttagaaaaggacccaagtgagttttggttcttagtgaggtttcctgtttcattttgggattcagttttgaagcttttttgtaattattctctatgtaacatctttcttgattggataccctttcttccgaagcttcttttcttggattaaggctttggatcaaaacggtcaaagactggtgtggtgagcatgtgtctagaaagtctaatattaggggactcgaggaagaagtacaattcattgccaagacaacctcatatatgctaaaaccaagtatatatattgttccagtacatcctgctttcagttgtcaatttcacaaatttttttattgtctgaatctctctctaagttttgaaacctctatctattcatgttctgctaggcttgtgctcagtaaataaatatggaagtagaattgaactccttactgatcatctgttcgattaagaattgtttttagagaacgttggattaagaaattcagaagtgatttaatgaagtttgtttgtacagtgtatataattcatgcttacagcgatagaaccctgatgttattcttatttttcttatagcggcaatatatatatatatattttttttattgtcatttgaagttgttaattgtatcttgtaggaag

SEQ ID NO: 7973 - DNA, 1654 bp, Cucumis sativus
  Intron number 1 from transcript Cucsa.081310.2 (locus Cucs a.081310) derived from phytozome v7.0 (chr-ID scaffold0081 7; pos 161989 to 163642 reverse strand)
ccgtggttggccctgcttagattttttcgccaaaggtatatatatatatatatagatagatagatagatggatgtgcaatttaggttttttctttcccgatcgattttcgtttagtggttgattaatgcgggattgatgattgaaagtggtaatttttaggcgttggttgttctgttgcttgtattatgattgggaatttgtgttcttcgctgttatttcagagtgattgaatttttttgatgttcttctaaattggagaggtaaatcaacgtctttttgttttaatgctaaaaaaactactgcttcgttggtgcatatggattgggatgatacctgtgatagatttgatggtgtgtgaagatctaattcgaattgtttcaattgcagaacaatggtgtccttgtctattctttaaggttttataatgtaattagcaatctggtcttataaagatttggttgccaagttttttttcttgagttttatagttctgaagtgttgtagaagcctaccatagggtttcatttattgtgacaaggttttgtctttgaataatgttcacatttgctgagaaaggatgagtatatatgatcgatcagatttattatcttactgtcttgatattttggctgaatcttaattcagaatcataatttgcggttgcagtcaggatgtaaaacatgagagggaacactgtatgatatgtttatggtttatgttaactagttactagttacatgatttggtagttttgagttgtgattacttgaaattccaaatgattgattgttgtgcttttgataacacatttggattgcaattcatcaagcatttactaaattacacagaatatgaaatccttggtcatttgctctaacccccaacttcttgatctgttactttcactttatttaattccagtttctctttttcttgtgattaattaaaccttgttccagcggctgcttgagatggacatttgcagaaggaatttttttttttaccattaacttttctttttgtatacgacacacaacattgtttctaccattttgcaatttgtgtggccatgctagtcttcattgttaccagatgtccttaagggactatactttctctattgttgcctaacttttatctgtcgcccaatctatagcctgaataaacatattccactttttgtaattgtatagtttctcaacttttatgaattttgctctttctatcttggtctttcattgtttgtattgtctcagtgtattcatttatcttatctcattcaagtttgaatcttttttaaaaaaagtgtattcctacaagcctcatgcaatgattacagtaatgtaagcccagtatttcacaatcaagcgtgcaaagagatttgtgcttattgctcaattggtgatgagaataggaaccaaaatatttccatctgtttgagcggttaaattgattgaaatttcgtcttgacaactaagtttatttgcagaccatttagttttttttttttttaatttccatatgcatctaccaacattttgtactactaaattggtggaacaatgacatttttacttgaatgtagaatctatctctggaccaactcgattggctccagtagatactgagttggaaacctcaaacgagttggag

SEQ ID NO: 7974 - DNA, 1268 bp, Cucumis sativus
  Intron number 4 from transcript Cucsa.108790.1 (locus Cucs a.108790) derived from phytozome v7.0 (chr-ID scaffold0093 1; pos 1064536 to 1065803)
ggtatgtttgttctttaactttttaaagaatcctaatatctatttgttgaactttttgaagcatcttaatataatcaaagctaagtaacgataaatatgcagaatcagagctttgaaataatgacttctaaaaccaaaattttagtagaaaatataccccctaagcattcgcttacattctatttccaacccctcatccaatgactaatatgcccccagtaaccttataatcagtgttttggtatagttacactgtacacctaatagccaatttgataggaacctactctgaagattaggaactgaaatctattacaacatttaaaataatgaaagttctaagcattcaaatgctttagttctgaaaactaatcccaaaatatgcatcctccttaacctctcaatcggcttcatgttcaaagatgttttttaataacatttgtcgatcaactttttggatctttttttttttttgattttgatgcatagtaatctatcatgttggtttgcagaaattgaggcagaaactcacctttttttttaatcaatggtaatcaaggattatcattctgatgaaaaaggattccagagaaaaacccagcccaatcaacctggagactgcaagcaaaaaaatgtcaaaaaggagccttagctgtttttaatcaaggacaaaaggatgatggataattacaaaaacacatagaagtaagaaccagcattacaatatgtcaaaccccatatttcctcgaccaattagcaaaaaaattaacttcttgtaataaatgacctttattttccggtggatataggagaactttatttttgaggacagctcgacgtagaataatattattcattttttgaaacatcaggaaggaaagttacaagatactgaaagctttcaagtttttcatattgtcatttgataattttagtagttgtgaaaggctccaaaagagtcatacttaatcttacccagtggttaagttagaaggagaaaaatgtcaaatgtcacaagactcttccttgcccattaggctgatcatcttcgtttttggaatggaaggttttccatttcttttcccaaaaaaaggagaagaggaaaaagaaaagataacttgttaaatgcaagtattgagctttctttaacttttatcgttgaacaatttcttgtatggaacagtcattctcaattaaattccagttgctgtagttctataataaaaaataaattccatttgctgtagggtagccaatttggggggaga

SEQ ID NO: 7975 - DNA, 1291 bp, Cucumis sativus
  Intron number 3 from transcript Cucsa.160990.1 (locus Cucs a.160990) derived from phytozome v7.0 (chr-ID scaffold0114 4; pos 1059566 to 1060856)
gggcttcagttcctttgctctggagtcgtgttcaggtttgtaattaacctgaaactcagtttagattgttcactcagcatgagaaatctggatatggagaagtgctacattacagaataacacgtaccatttcttttgagctatatatgtagtacaaaccctatacacatatacttacttttcctagtgtgattcttttattctacatcttttttgcccattctacttttaactttgaagctttttattgatagtcaacacgttcttctacatttgtggaagcctcttccaccaaaaaaaaaaagaaaagagggagcatggcagttatgtttgtgtgtgaagtagtttcaaagtttcattcaccaatctaagaaattccacgattttgcataaattatttgtttgacatcaaatgtttaatctagcaattgtgaaccttgaaagttgaggcagcatagacaggttgatgcagtagatttgagattaggacaaatctatttcaaaacaagggatgaacccatccctaaggttgagagaacactctacaacagtgttctatttcaaaatgatattcaaaaagctcccattaaaattcccaaggttgctatttgtagccttacgaaaaaataatgataaacatatgaatttcaataactaattaaacactaattgatttgaaattaacaactatacaaacataacctagactatagtaattatctagcatttcatcctgcatcacgttttacgaatggctttttcaatgattagttttggctttcctttatatattgcctatgtgtgactaaaatttactgtctctctgcattttccctgtttttacgacaactttatatatgatgctcttctgattgtccctttagtgatagaattaactgctagctcttctgatttttttgtgctccctgttttcttacttgatgaaccatacttgttcacgtattttggtttttgttatttcgccaaattagctaatagtttaggtgggttttactgaatttactattctagccgatgttaatttctgagtcttatgtgccttgtaccttagaaaatattctgtagatatcgtttgtttggatggcttggtagttggtttgaaaaatgatgctagaatcatattgtgcatggcaagttctcattcgattcttctgatgtatattttctttatgatggtaatgctggaatgagctctatcgacaatcttaatgttggttctcaatactattaactaggttcaaggtcagattagccttctatctggcggagt

SEQ ID NO: 7976 - DNA, 1180 bp, Cucumis sativus
  Intron number 2 from transcript Cucsa.281990.2 (locus Cucs a.281990) derived from phytozome v7.0 (chr-ID scaffold0264 1; pos 131467 to 132646 reverse strand)
ttgttgagctggatcaaagaggtactagcctaatcttcccattttttttctttgtttcttgttctgtttgtggtaaatagcaattactccactggcttattctgtttgaaattaagtgtgcttgtttcttgtctttgagatcctttctttatatcttgattaggtagattactatgttctatttaattgttacggagtagttagagaatttgtgcttagttttattgcctctagcgtcttgaaatggtgacttcttaactgaagttcttatgtattaggtattgtggcctgatgctctgttaaatgattcccaaattgaaaattaacatgtttgttcgggatcagctattcttctcaaattatttcgattgatttgaatatagctcaacttatatagaagtatatcattcaccaagaggttttaagtttgaatcctcccaccttgcacatgttattgtacttcagatgaaaaaagatgcaaattaatctacctaatcagaatcacacactcagatccacccctgaacaatgagttaggcagtgtgtccttctggaaggaaattccttataatttatgtgtgttcttttgagagttaggagagggaaggcaaagagtgggagatggtagaggaggaagaaagcagcaatgaaagtgagcaacggtgtacaagggtgtgtctggttagttggtgcttcaaacgtgaaacatctaatttactaagaaaaagtatagacaagggacaattgtaaatatagcaatcagacccaaagtattagtagatataacataataccaaagaataattatcccttgaagcgctaccatgggtttactgtttaacaaatgtattttgtggttccaattcttctttttagttgatatggaggttcaaagcttaattctctcaactgcctggcaaaatgattatcaacgaaagcagtggtttctttaagagtttatgcaagcttaggtttttatatgctcttgtattttttttcatttctttctcaaggaaaagccattgtttctaagaaaaagataaagcaaaacgactatctgtaggacatatatctagttcaagtttccatatctgtttatatccagtgttatctccatgctgttctattactcatatcctaaaagttaattattcctagaatgtgaatctgtattgcacag

SEQ ID NO: 7977 - DNA, 4024 bp, Cucumis sativus
  Intron number 1 from transcript Cucsa.228190.3 (locus Cucs a.228190) derived from phytozome v7.0 (chr-ID scaffold0193 3; pos 135315 to 139338)
ctgttaaattaattgttcaaggcaaaaacttggaggtattttagcttcatttttgttctacaagtttttcttttcatctgtcttcctactatgcttaattgttcgcgtctttagcagtttctatttcttctcaagtttgattcagtaattattatcataatcaataattgtcacttggctgcccccacaaaactctctgtctacctgtttggtaccccattctctatgctattccaatcaccatatctcttcactcaaaccgtaattttattttctccaagttattctgctaatttctgcctcatttcttcaaatatcttccatatcaaccattcatatcccttctcaattgttactctgcacaccctctttgaagtgaacgcatcgcataaggatttctctatcatttttcagaatctcctaatttctcatccaattttgatattctatattttcacttattgcagctagaagatttttctttcggtcagagaatcgggtgcattcactttcttctatatcagcatcttaactcacgggttgactcaaaagcttaagttgatgcatttgaggagaaaataacatagcagtggtttaaactcagactcctctggattagataccatcttaaattacccattgagccaaaagtttaacttgtccatgggtgacatcaaatttcaaatttattcttctgtacattctcatcaaacacaaccattttctttcatgattatcagtttccaggaaacacacaatggctacttcatacttctcaatttcaaaccttatctgctcaagggaatcctttgtaaaattggatcacgatttctataggcctctatatttttcacttaatccgagccagacaactcaagctgtatcatcctgcttagttcttgaacatgatactgatagaacactagtgtagatgttttttattcaacttggtaaaagatacttcagtacaaagacagattgatagattattaatctagaaataaaacacaaaatacagcagaacaacacaaaacaacacactcaaacaacaagaacaaacacactctgttatcctcctctcaagcatgaacatcacactcacaaattgaatttttcctctccactcacactctcctctctccatgtaaactaccccttccctcctaaatagctataagattcagtaactacccattaacttaaaactaccccttcacttttgcattctctttcttctctttcgagttccatttcttctttctcctactatattgcagtattatgggaagtctaacattacactcctccaaaaccaccttgtcctcaaggtgaaagtcaggacattggtgttgaaattcatcacagttctcccaagtggcttcatgcggtggaagtcccttccagctgattaagacctcccaattttctgttgttggattcttctggtacacttcctctggtagggccatccattcatgattttctgatatataaaggataaatggatgtgctgttgaatgctctcctatcaccttctttagatgaaagacatgaaataccggatgaatagctgctgatacaagaagagccaatctatatgccactgcccctattctctccagcacttcatatggcccaaaaaacttgggagacagcttctcattcctctttttttgtaagaaaacttatctatatggtcgtatcttaaaaaacaccatgtttcttcatcttctcttttcgaagatgttccttcaaagcccccaaagctatggccctatctttgagttgatgatcaagagtttagttggacgtctcagattctccataataaatcaacagtggtggggagctcccataaacagcttggaatggtgtaattccgatggaactacgataggtagtattgtaccaatattccacccattcttttggtttctcaccacaaaaacatcttaaatatgcttccacactacagttgactacctctgtctgcccatccatctgtggatgataagatgaacttctgtttaacttggtgccagccaagctgaataattcacgccataaattactcaaaaacaccttattctggtttgaaacaattgactgtgggtattcgtgtagtctaaccacctccttcacaaacgtttcagccacagatttggctgtgtaagggtgcttcaaagctataaaatgagcatatttactcaatctgtccactaccactaaaattacttcataccctgctgtcttgggaagcccatcaataaagtctatagtaatatcattccacaccttgtctggaatctctaatggcataagcaacccagctggagataatgttagacctattcctttggcatatgagacactcatcacaatattttttaacatcttgcttcatcccttcccaatataactcccccattagccttttataagtgcgtagataccccaaatgtccccctaaaacagaatcatgataagtgtgtaatatagttggcagcaatgtggatgatttagaaattaccagcctacctttatacttcaacattccttggtgtaaagtaaaatctgaaacatcagcttcattcttttccagttctgctacaatttcactcaactttggatcttttttcacctcttctttaacaaccagtaggtcaatctaatcaggggctgtaaattgatttagatgcacagttggtggcattatagacaaagcatctactgctgtattttcctttccaggcctgtaaattacctcaaaggtataacctagcaatttggctatccacttctggtgttggggttgaatcactctttgctccagcaagaacttcaagaacctttgctctgttttaactatgaatttcctctcaagcaagtaggtctccacctttgtacggctaacactactgccattaacttcctttcataccctggttttgatctcttaatgacaaagatggctgaaataagcaaaaggtctatgtgtttggatcaataccaccccaactccaaaacctgaagcatctgtttcgaaggaaggttgaaatcgggtaatgctaatataggcaaagtcatcatagctttcttcaaagcttcaaatgccatatgtgattcctccgtccacttgaatgcttcttttttaagtagttgtgtcaatggggctgaccacaattttgcacaatgagacctaggaaacccctaacttcccttacattagttggaattaacttcctgtacacagccaaagcagccaacacatgtaataaaagactgctgcctcggaatttagtttggctctatatgtctacccctagttatggaagtattaggattattagtatggttattagaaggggcatactagtaattatcaaagaaatataagtgggagaaatatactattgaaaacatgcaaaaaaatgaaatgataacaaagtttaataaggtgctcatcacactgaacttgcctactagatgcagataaagaaattatctactaatacttgcttacttaatggtccaaactctgttgcttcaaagtgacaagatcacctactaactataaattctaatatctatttctataaattatccgagtttcagttactcaatttatggtaactcaatgtttaaattttaatttttttgtatggccttgaattcctattccttctcaatgaaagcagtttgtttcataaaaaaatgtttaaattttaatacatcaaacattgagtggatttatttttaattgtgcgaaaaactagttgactgaagcagttaagaagcacgtggaagagaaggttggcaaggcagtccagaagcacagtcacttagttagagaagtagatgttagactttcagttagagggggggagtttgggaagggtccaaggattagaagatgcgaggtactctattactcctttattttaaatttatccatatgaattgaaccctggttcttttccaaaaatgtttgtgtttatgtaggttactttattcacaaagaagc

SEQ ID NO: 7978 - DNA, 3178 bp, Cucumis sativus
  Intron number 10 from transcript Cucsa.074680.1 (locus Cuc sa.074680) derived from phytozome v7.0 (chr-ID scaffold007 85; pos 581971 to 585148 reverse strand)
ctcatttagggactttagatcttcactcaaaccaggtagtctgttcatcttcaatagttcttacctatatcttttcctcatttctgtaaatggagaatagagaatagggaaactataatatattggaacacagttggaggaaactttactgctctttgagatgttggctaggctaaaccatggataaatgagcaaagcattcaaacataaataaattctaccttgatttcttcagtctcatccattgctcagcatataaaatatttgcagtatggcatgatcttttaaacttcgtaacttttttgtttaaagaaaccgaactttcattgagaaatatgaaacttgaaattatgtgctcataaaaggaaatcgcaaaaatccttgcaacattttggatgacaattcatttttctatctcgcatttgttctttttcaaattttatatatgttttccgctcaacaaattttatgttctaaattagtactataaaaatttgtaagtgctgtaaaccaaaaaaaggttcattatcttaaattacgagtatttaacttcaaaaggcctaatgcataaccttttgctaggctcagataactcactctattaatgaaatgaaatggccatgaaattcagcaccgtggtctttggttatgggcatactttccattagatatgattagtgtgaataagttacatacaagacagcatggagttctccaattccttagtttgaaagtgaaaaagaaggggggttcaaattcatttttggagcccataaattagtgtggatttggagcaatatcttccacaattcttgattggtgatgtaacataataaatagatacctattttatgatatatgaaggaggaatagtattttacagccaagcagtcatgaatatttttcagaagtattgttagtttatgaggggcatattgaatagtgaaggtggttataataaatagagtaaattggaggggtaggagatggacataccttggaattagtcaaggagaagtgtcgaggatgtcacatcaaaagatgaatatatgtcgcaattgttacgagatacactaatatggtatcggagataaaaatgctaaaattggcatttggttcaaataaaggaagaaaagaaaagatacccaagactggtgaaccccagaaagacaccatcttgagggtcatgctgatgatctcacaccagggagatgaagagaccttccaatctttatgagataagtgggttattcttctcattgccaattatttttgagatggaactccatgtttatctgataggaaaaatgttgcctttgaaaccactaatagctattggaatttgctattatagtttttcttgatattataacacaatttcaattttcgaactttccaatttctagattggggtttctactatcaaaggaagaaagaaagacgttactagttgttttgctagggaagacttctttagcttgtgctttcatggggagtgtgttttgagaggaattgtagtataggtatttggaggagctgtgggagatgatgagatttaatatatatatatgagaaattgattgcaaactagctcaaggattcatatagaaaataaaaaatggaggaaggatgtaattcaagggctaaagtagttactcaagtcaaattggtatgtctacaattgagaatttattgtttattgttatgccagaagaaattcatgtgggatatacgtatatggtataccccagaagaatcaaagaaaactatccaagggagtacacaaatgtctaagcatgaaggtaaaaggttccagtactggaggtttactaatcaatgaatccccgaaacctaatggcacaagagagacaaatacctatgaagaagtgaaagagaagattctggcatatggtggaggtgaaaatatagtaaagagggtgaaagcttgctggcttaaatgtcttcaacgtgtggaagagacatgagttattgataacttgataatggcaggatggggttgaggagctaaatcataaactagagtcctgtttcgaagtgtccccgaattctatcttggggcccactccatggtcccagctctttcggttgccgtgggtgatttagcaggtcttgcttatgtgcgaacatcttccaatccctgaaccaagtctgaccctaatcatttttctattatttgttctttacgaaagagagaatttgacctggtggaagtctccccttaccttattattaaagaaagggtgttaggaaagaaaagaaatctctcgaaagaaagaagaggatactgcggaagccgtacactcatgtacttcacaacttcaagggtggagaagcttctggaattagatagggaccatatggtaatgggcctggactaatttaaacgaaaagaaagccaaactggaaggaaggagtttacatacaatgtgcagatcaggtttagaataatttttaggcagtgggttctataaaagaaaaaaagaaataaaacaaacagaattatttaaaataaaattgactaaaagaccaacaacccttgaggaagtgtgttcttgaagcagagtagtgttaggaacattattaggctacttgggacatgagttttcagcttgttagtggagttgttatgaatatcacattgggggagttggagacagacatattttgggattaattttggagaatctctcaaattcttagtatgaactgtaactttctatattattttaatttgcagtataatttctgacctaatttctaactacaacctcagaattgagttttgatcaacatttttctcatgaactaccaaattccagcctagaaatttagatgaacatgaaataaaataattttccccaatggagaaaatgtatgctacaagcttgcaattcagtacataataatccatataatattgagtaaaagtatcagcaaatcttgcatagacggagaatagtactttatttttatttttatttgtttgctcaggagaagttggtttttcatatgtatttaccatctaatattgtacatgtaaattgtattttttatctttacacatcattaaatgaatactcttaactactttggtaatacttgggtttctagtgaacatgcctccttatttgcagttgaaagagtatccagttgaggc

SEQ ID NO: 7979 - DNA, 557 bp, Cucumis sativus
  Intron number 4 from transcript Cucsa.133430.1 (locus Cucs a.133430) derived from phytozome v7.0 (chr-ID scaffold0103 7; pos 1122374 to 1122930)
ttgtctttttgaagatccaaccatcagatttcgaggtattaataatcacagaaacttttaataacttaatcgtttcatcacaatggtgatcctattttcaccttttatgttttcaaatgcccagaattagaaagcataaattgtttcttattctgctgaattagtgatgaatcactttaaacaacagaattgaatttaatattagattggaaaacttttttggtcactttcatagaagtaatgatttatcctctcaactttaaaacatgactacttaatctttgtactttcaaacttgtagcaactttgtctttggtctttagcatgtaactatttagtccttgtattttcaaatttaatttcgtccatattgtgaaaaatcttgtcaaaatgaaatgtcaaattttgttatgaaatgaattggttttgtagtttgaaaacacatgttacttttgatagcatacttcattttggcaatattttcaaacattaaagttgctttatggacttttaaccctgtaggcaaggagctgtattcccggaacttaaagttactt

SEQ ID NO: 7980 - DNA, 1757 bp, Cucumis sativus
  Intron number 1 from transcript Cucsa.258940.7 (locus Cucs a.258940) derived from phytozome v7.0 (chr-ID scaffold0222 9; pos 5666044 to 5667800 reverse strand)
tggaatcttctctttcgtttttttctcttcttctggttacgattcataaaccttacctaatcgttatacaactgaagtttatttgaagaattttgagaattcttgtgcatttactatacttttttttttttttgaagtcttgagttgtggttgtttgctagggaatggagaacggagtggtttaattgtggaattttgaagtctgaatttaattgttgaagtattgtagtttgttgctgagagaaagtttgagaaaaattaactttaattatacaactgcaaaactttattgttttctggttgtaggcgttgggaatttaaacgactgactttttccttcatctctaactgtaatcccgagggtataagtttgtttcagctggatctttgcaattactcttcttccgaatctctgttgcttagtctctccgaattttctcagtcgtttgtttcagttcggattgtgttctcggccttgtgcccttttgattcgattctgcatttttatgacgaaggaggaagcaaaatttgatgaaataagagaatttgaaacgtgaatttgttaaaattaaactgcaaatgttccagattttaaatcactcgcgcaaccaaccgggggtcttcgtaattgtaacagaatttagcttcttgccctcattttctttcttctctgactcgtatgtattagttttccttggaggggcagtttcgtcatttagcattccagaatttacttttcagttcgaattcggtatcatcatcgagcccttctttgttgaaattccacatgtgtccctttgtgaattggtttttccccagagggccttttccctgctctgtatgctgcgcgcttttgtgtctacagattgatagatacttacgttttttcccctttccgcagatgtggtatttttacaactttgttgtttttttcttctttttaaaaataaatgttttaactttttcttttttgttgaaaaccttcgcggcaatgagcactaacaattattttgactacctgatactatcgtataaacatattattttttaattcagcaggctctagatagtttaattaaattgagctttgtctgtactgaaaatgaagagaaaaaaaaaacctttatctggcctgcggcagcttatgagtattaaaattaactgcaatagtaataattatgagaagtatttggtatcaagttgtcttgtaaagaagtccccttatagacaaagcatttgtggttgctttgaaggatagctacaccctgttctgtgatcttgaaataccaaaaaaaaaaaaaaaacaacatggatggtttagtactgtcagttctatttttaaatactatgtgagactccaagatgtaatttggaagatgaagcgcacaacctatttgtgatttagagacgagcttttgaataaaagaaaacctaggtgagtttggaacccccttcaatatcttaaaatacccaaattgttactttaaaatcattctttctggggagagagactttaaaattcatgacctcttgattgctggttcttatccgtgttccacgtgttagttcaatttagcattcctttctatcttcaatctaactgatagccagttcaaattaagactaaaaacgaagtattttcatcacatttctaaaatcttcgtgcttgatttcttattttcttcttcgctttcctaatttttggattgcttatccatgcagctgcccagctgatcataatcggtgccaaaggtctg

SEQ ID NO: 7981 - DNA, 6031 bp, Cucumis sativus
  Intron number 16 from transcript Cucsa.348670.1 (locus Cuc sa.348670) derived from phytozome v7.0 (chr-ID scaffold034 87; pos 116967 to 122997)
aagtatggtttcttttcaacaaacacccatttatttatattctttataactttattaatcataaacccaaatctttcaactggaacttcataaatttggtgttcggtgagataaagctttaccaacctaaatccttcagttttgtttgctcaaaagatcatagaattttcaattttatgtcagcaggttttaaatttcaattcaaaaacttatgtaaaccgttttaaaatatagagattaaatggaaagcattttaacgtgaaaatctatggaaaaaaacgattagctatcaaacgaacataaatgatcatttttgtgttttctcaaattctataactaatttttctatatcgatagatctctaaattttaaagaagaaaaaaaaaaccataaccaaatcctagacttcaattgtcttttaaataagttcacaagttgccaacataaagtgggtatattttactaaaagtacaaacgtacaaatccccttttgtcacatatggttaaattgaaaatcataataataattaatcttctacttttaacctagatttggaacacgaataatccatacaacaaataatacaatactaactttctgtttttcatcaagatgagacatctaaagtgttaaatattgaacgtccaaagaggtgtcaatctgattaaattgtttggatgcgcctcctgaccctatagttttcccatttcttcctttctttttcttctttattgttctctttatataaatgtcttgtatttagagttcttattaataaaaacatttgtctccgtttcaaaaaaaaaaaaattgaacgtccacattgtcaattcacatgagctataactttcataactcctatttcaaacaaattatatactagggaaaaggaattcatactatcttcaatgtgaaaaaggtaaattttaaaaactgttgaattcataaactaaatgaacaatgaatttatatatcatttgacacatctgtcgtcaaattatggatgggagtataggagtagtactaaaaaattcctcttatattcccacatatcttctgctcacttcaactaaacattctaactttgagagaagaatccaaaggaaaccaaatgttacacttctatcatataaaatttccaaatactaaaatttagaccacaaatatggcaaattaaaacatttcaaaatcagacattattaggaagttgaagatattaatgggaacaattccttattcttttggctcattgttatgtcattagaacataaaaaaggttctaatcaacttgatcatgaagaagaagaagaaaaaaaaaggaatgagaagtttatgggtcaaacataaatgaaataatcagtggtatacacttttaaactaaccctaccaaaatcacagctatcactatcccaaaaccagaaaccaacttatctttgaacgaagcaatccaattttccaacgatataatgaagaatcacctcaagagctgtttgattcttcaccacatgtttatcatgcttgcacatcgagaaaataccatataataaaggtgcagctgaaaagtttaggaaaattgcatcaaatgacagaaacatttagaaaaaaatagcttatgacactaattttttgcatattacgaatataacaaaattaatgatatcaaacggtaatcataggactatcggaactatcaaagactattagagagtcatcactcttaaatttgctacttttgcaaatttagaaaatattatgacatgggctcgattgtcataaatatttttgcaaaaaccccaaaagtttaaccctctatttatagaagatttaaccctgccaatccaattaccagaaaactacttacttaaacctaactaacaactaataaaactccaacctaagaaatcgtagcaccaaaactaaagcctatgaacaccaaccaactctttaatttgttcttttagtggcaaattatggaaccaaactttgaccctgatgacgattagatttataatatgggggtaacatttaattaagaaatagaaaatggctgactacttcaattaatggagacatgaatcaaccttaagatatagacttcctatataggacgtaaatgctagtttgtatacttgtaaattatatcagagaaatattttgtttatgctacaaaagaagaatgttttcttataaagatgatgaagataaaagtctcttataggttgtgctttagaaaacaaacctcaattgttctctgagtttgtttgaatcatgaaagtgacaaggcagggatgatacgtagacatgaagccagaagacatccagttccagtaactcgatttgcttagaggatataatatcagcaatatccttctctatctttgaacaatctgtcttcaagtatgacacaacccacagctatgttgcactagctgtacattctttgcttgccgaatagctggtaaatttagagagatcacttcctctaaccactctattataatttactttgaatgactgtgagccataaggtcgacttagcaaactaatcggcactctgagagtttgtttccggtttcttcttccccttatcaaaatgctgaaggttttctcctcctctacattttcactactgcttttcacatttccatttaaaatggtagttgaagtttcaaccatgcatggatttgaattacacttttcttccacattctctaaactaatcccagcacctttattttcactaaccatacgctcagatggcagagaattattttcctttttagcttctcctagggtgtcaatatcagctggcagaactttcaaagaaatgtcgccattgacattcaaatctttcatgaaatcattagcagagtcaacaggtgatgggacaggatggctaccaggccaaactgtgcctggaacacgttccgatgggttagcattcacactgcattgccaagggaaaggattgggatgaaaagcactggtggttacaggaaatgtactggttggtactggttgggaataaccaggtacggataaaggctgagtgtaagttggtattgcctgtggttgggaataaggagggtatataaagggcatggattgcatcataccaggagttggtggaggggatgggtatggttggtgaggagatgagcataatggattaattgttggcaatactgaagcaggccctgggtgaatattcatgtttactggccacggtggaatgccacgaggaccgggaattgttatattcatggccacaggtgcagcgcgtatgataactggtgatggattaaatggagctgcagaagcagataatttcttattattgagtcctctagtgtcgccagaacttaaaactgatgacttgtcctttgaatcctcagcttgttcatgggagtcaaaattgtcagattcaaagtcgttcgatagatcctccacagcaggtttactttcagaagatccaccaggataggtcgtgctatcctcaggtacattgtcctctacaacttcattcacatcagcaacacaagattgaagtccttctacgggctcagacaccatttgagaagggctattttccacagtatgtcctgtctgagtttcatcattcttctcctcaacttgtttatccttctccaataaatctgaagattccacaacagaaatgttagagatttccttcatttcatttgatttttcttcatgtatctcaactctgagttcttcagcaccagttgtatcactctgaggaacctttacctgcaacatggcaatagtacctggtggggctacagccacttctttgtatgaaggtgattttccaaggctaactattgtattcttcaatgagctagcatcaattggagtcgaggatctaccagaatctactacagaactgaccttgtcagcagtttcagtggccgacaccactgttgcagtttctgtagatgagggaattgacttaaccctgtaagtcaaggttttcactattcttctcccaaatttggaaccttgataggaattcatagaatgatgatccgtataactaccatgggatattgttcttttctttaacacatagaatcgactgtttggattattattcttcagtttatgagcttcactctcaacatctatattcatcttctggtaactaaaaaccttgccaaaagtggctcgacgttgcttcagccgccgcccatatgacccagctgatcttggcctttgaactgattgccagccatcttctccttcagggtggagttcagatatgacatcatctacagtttttggcctttcctcagcagcttcctcagtaacaggctgctggacttcaacgggtgtggtagtctcctcgtctgtactcggaacatcccctggtacaagtacaagtgtctcttcatcagaaacctcttttgaggtctcttggggagattcttcaccgtgtgccatggttgcactatgatcagatcttcccttaagctgcaaggagaaaagaataatgagatgaacaagcaaactacgtatggaagaaagcaacagcaaggttttttaaatgctgtttaatcgatgtaacaaatgacctgtctttgttcgttaattttttttttcttataactagggtcaaagcttttttttcctatacccaagggtacccatggccaccccaagggccagactcgggaggcatcaaaggtttttagtatcaagctcacttgaaagtttaaacttgggagctcaaagacgatatgatcaagagacctcaataccttgcaaacgaggccacaccttggggacatctactcattattaattataacttgaaaaacagttattagtacaatttttgcccaaaggaaaaatatgatgttgaaaaaagtatctatataagatttttttcttaaaaagaaaacaagattcatctgaagagacattttataatagataccccacttatcttttggcatggaggtaataagcattgtgcatcgtcaaagacaattaaatgtttctgccccaaccttataaaaaatttcgatttccatcataaccaagtgtacacatgactaaagttataagtaattaaaactttcctaccagggatcatcaattaaccatttatgaaactaactatacatgaagtcaccttagttgattccttatctaatcgaactatgactaacattaaactaccttcacaatatagttttttctctttgctgctgcatcccttcctttggcatcatgactgggatttatatagtcgagcaaatctgagacactgccaagtttcaaagaagaaacaatgaccttttgagttcaacaacatctggggttggaggattcgaggattcaaacctctagcccctaggattgaaagcatcatatgtctaaatcaagaagaaactataacaataagctctaaagtaatatttctcaggttttttcaattttacaacttgcataatcactaaaagcatcatacagcaggaacaagaacaaattaattttctaataacccaaaaaagggagagcaaacacaatatggatatgaaaagttttaattcaaaactgatgaggtatgatgcaaggaaatggggaaaatgcatactggatttcagatctaaaattatcttttccatgtctattttgtacatgtggtgcaagtgagactcttgccataaaacaggcaaaagatcctaggaaaacgactgttaaataaattacttcctataattgacaaggacaagcacacaaaaattaacttgttccaagttcagctaaccaaaattcatttgcatgcatcatcaagtatgcaaataaaaacaacagagaaaaaaacacaatagtaaacctgtaaaagcaaccaataaagagcatagaattgcattacagtttcgctacttgtcaaattgacctacaagtcaaaaattagaaaatggcatttaccttaagtggcctttactagctattgatgcatcaggcttccgagtaccattccttgcagcttcctgttgt

SEQ ID NO: 7982 - DNA, 867 bp, Cucumis sativus
  Intron number 1 from transcript Cucsa.298390.4 (locus Cucs a.298390) derived from phytozome v7.0 (chr-ID scaffold0290 1; pos 45130 to 45996 reverse strand)
caaaatcctaactcacatcataattccctttccaggtatctcatctttctccttagaattttaatttttgatttgattttatcttttccaatctccaatattgtaacaagcatgttgaaatcgtagcaatagggttctttatatttaacatttcctgctcaccccgatcgtatgactttaatttgaagattagggtttgcccttagcctttttgttttttgttttttttgtttttcaattcaatttgcttcgtttcgacatgggtatatattgtaatcgttgaagacgaaaggtgttacttgatatttgaaattatcaatggattgaaaggaaggctttagggttacggtaggattggattatatggaatgcgaatgaagtgggagtcttcattcccgttcaattaggatatttggccatccaattgcgtggtcactttgtctgcaccgacgttccttcttattaaatggggttttgaccttatgaactttaggacgtactctacttcattccttatgctttggtagatggatttcttattttctatttagtttaagcacatttacagggtgatttgaactgatttgaacctttgacctttttagcgagggttctgttgacctaggtagtcttttagtttatttgtatttatatatctttgagattttggcaggtttttgatgttctctttttccaatttgtgttatgttcaactttgaagtcatagtttgttattcttcgcatttgacattggaaggctttggacatgtaaacaaatctgtttcttttattttctcaacaaatgtttctgacgtgaaaaaaaaattcctagttggccttgagcgtgagccttctttctgctgcttt

SEQ ID NO: 7983 - DNA, 6481 bp, Cucumis sativus
  Intron number 14 from transcript Cucsa.155970.1 (locus Cuc sa.155970) derived from phytozome v7.0 (chr-ID scaffold011 39; pos 206705 to 213185)
gtttgcaaacaattaggggcattggtggacgagaggtaccatacaagattccttacatgaactgttcataaaagttaaatctctgactctgacagtgcattttttttccttcaaacttcaattttgaggtattatttcaattagaatgaaataatagctaaaattttttttcaatggctcaaacgtaaaaggactgctatatttatagtaaagcacaatggtttaacaaaaacagtagctaaccggctgtaagtggctggttgaaggagctgtacaagaactatttgaaaaagttaaagaacgacagacttttgaaatcaacaaataccctttgcaaacataactatctacctcttgggtattgtaaatgttagttcatttgaaatagactttaataaagtactctggcagaactgagatattctctcccttccttgccgatctgactcaacctgcaaccatctctgatcatgaacctgccagtcaccaaacaagacaatgaagatgctgacagtcccatcgcctatgaccattgagaaaaaacacttatccgttgaagccgactgtagacagggggaggaagaatcaagaccaaaaagaccaccattaattgctccttcatctagatcaaactttctaccttcattagctgactgattgctttaaaactttgcaacatgctccccaaaatcaacttttctttagagaaacatgagtcgatagacaaactgtctgggttgaaaagataactatcgaaaagggatcttactgaaatagctattctcgaagtattggaggattatcaagttataggttcctgtgttacccacagataaggctttttcgtaaatcatctcatcaatacacgactgatgcaagctccaagaactcaaagacaaaatctttatatatgtatgcttaactggctggtgcaactaactaaaatggtcttcttatataggagacagaccttttacaaataaggaaagaataaaagcaataaaggataaatatttgaacaataataagtatatacaaatatagaattccaacactccccctcaagctggtttaaagatgtcttccatagccaacttgtcaatcaatttatcaaattgtttctttggtaggtctttagttaggagttaggacattgacaatttgctctgatgtaggaaggtaaggaatacatattattcctgcttcaagtttctctttaataaaatgcttatcagcctctatctgtttttttctatcatgtaaaaccggattatgggtgatagaaatgacaactttgttatcatactccctttgctctctgttatgacaattgtgatcatgagagtacttctcattacaacgaaaacagaggcctttttcctttctcgcttgaaatttcgcatcagatagccttctcgacagtccttccttcttagtttcaccggatgatgtcccccttagtgtgatcatcctcatcggaaagatcgtattacccttattatcactagaactcgccgttgtattacttttaatattataagagttttgaacggggtatttacctccgtcgtaacctttaaggtttgtttcattgcggataatcttccagttttctacgagctgagccaaccgcatcatttgggttaaaccgaccggatggcaaaaatcaacctcaaccttgatccatatcaacaacccattcataaatgtctcttcaaccactctgtcttgtagatccgataatagtgccatcagcttatcgaattggtttcaatattcctctaccgtcgtttcttgtttaattctaaaaaattggtcgcagatcgatccttctctcactaatcagaactgaacaagcaatctttctttgagattcagccaacttgtaaacttgtcgcgttcgtcctatgcccaataccaattcagtttcgagccttcaaaattgattgtagcgaccagtaacttctcaacatcagtcaacttatgaatctagaagtatctatcagcacggaaaagccaatattcgggatcttctcctttgaatattggcatctcgaccttcttgaacttatttcgttcagaacttttgtcgttgccttcgatattttcttcctttgcttcgattccgttttctttacttgtcgaacctccacctactctggttttcattgtcatcgtttctcgtacattagattcagccattttttcactcatcacggaatactctttcgcaatcgactccataaacatcaacgtcatctagtgagttttttccgtttgtgcactgatcgtcgtctacttttcttccatcatcggtaacttgctcaattcctaatcgtgtacttccaatctttcttcgatgtgtttgtaccatcatatttcttcttctcagaacgaccactctgataccaatttgatggaactcctcttgaaatcaagtaacgtatctttattgcttagtatgtaaatttgaattacaagcatatcaaattgagaagatctcaatttgaagaacaatctctctctcctgctatcctatctctcaaggaagagcatgagcctaatatcacaagtgactaactcaccttcccttcttctctctaaactttatttatactaatcgacttatgaattaacgaactcctcagcttattcttcttcacatgtgcatccccttgtggtccctttctgtttcttcttacttctactatattgatgtatgatagaggggtctatcacaatccctccattcttcccgagattgtcgaattgtccttcgctattccttcgatgcattttagcaacaattgtcgttgtttctccaactgaatgtccagtctttcgatactcttcttcaatgacagcagcttctctacaatcgatggtaatttatgcaattctacttgtattcctgcgatctcttggtcgaacttttccaacttctcttcaattcttttttgctccatctccttacagattccaaggtaaaacctggctctgataccaatttgctagaacacttgctaacaagaacaaaatcttaatttattataatgaactataaaaaatacaagataaatccaagtataaggcacttggaaccttcctcttgagtactctcacccatgtcctaaatcattccacagaataacctccctctcacttaccctcccttcaacttgattacaagtttcatttgtcgaagtctcagattgactatgcaaaggatccactatcctgtctttgctccgtttagtataaaacttaaattcagaaacttgatcaatacgatcattaaaatagttaatgaacaattaaaccactacattttttgtactaacatagagaaataaaatgtaaaacaagaaaattcagaacttttgattcctaacaattaacccactacattttttgcactaacttttgattcccagacaaataatattgttatttaaaatagttaagttggctagtcttatctctgaagcacaaataatatttcttcattgattatggggtggggatgttaagaagcaatcaatttttttggatgcttgtgataaataagtctattaagatggtccaatcatccttagacaacttctcaatatccaattactataaaagacgactattaaacattataaactaataatttcaattttgcatctaaaaacatatttgctagctaaggttttttttcttgtttttatagtatattattggtcgagttagtcgttggaaatgaacaaagttggtgattggagttggttgttcaagacgattttcgatgttggccgctagatgtgaccgttgttgaagttgattgttagaggtggtttttgtcgttcttggttgcctaaggtgaattttggtattgattgctagttgtggttgtcatttgtcattgaagttaattatcaaaagtgattttggttgaagtttagcgtagaggtaattgttgaagccctatgtcgaaggtggtgattgaagttatttatcaaaggtgatttttgccaaagtttgtagttgtaggtggttgttgaatgtagaagttggttgcatgaaaatgatcttgaaagttggtcgtaagagtttattgtcggagcttggaattcgtatcgcaaaggtggtcaccaaagttgattttcttcggagtttgttatcagagatggttatcaaacccaaaattggtcattgtagttagtgacacaaagatggttgttggagtatgacatcgaaagtggttgctggagctcgaaatcggtcattggagttagatgtgtgaaagtggtcgtcaaagttggttcttggagtggcaacggtaattgtcaacggtggttaatgggtgaaccaattggggagaagggtgagttggtagtgagctaatatattgtaacaattcaacttatctcacgttggtgtgccaaacaccccctcgttgagatgttctgatgcacctcctgatccataggaattttgcttattgctctatgcataactctcttgtacttggagtattagtctcattcaattttattaacaaagaaacatgtttttcttttgaaaaaaaaaagaaaaaagaaaaaagaaatcatagaagattgctttagaagaaactattggatattatattaaatataccctcacctatcagcttaagcttttcgttgaattggtgacttaagatggtattagagcaggtggtctaagattgtcctgtgttcaaacccctatattgttgttttctctccaattaaagttaatctccacttgttgggtttttcagatatttcaagcccacgagtgagggaagtgttaatgatatttaattaaatttgccttcaacgactagcttaagcttttgggttgaattggtgatttaaaatggtatcagagcccattaagcccaaatgagtgttcggtccaagattggtgaacccaaggaggcaccatcttgaggggggaatattgagatgttgagaatcctacattgaaaacaaaatggactcacactccttgtaagatagatgggctactcttcttgtagccaattggttttgaaatggaaccccatactatcgaatatgaacttttgggttgaattggtgatttaagaagatttcagagcaggttgctacaggatgtctgatagaacaccaagtagtgtgttctatttgttcattaaacaaccaaaatattacaaaaaaaaacagtaattaaactagtcttgaaaacacagaacaactgaagaactattacagaattcaacccaattcaaaataaaacatcaaaacagaaagatacttcacaaaaaaggaaactacttcttaagactttaataactgacactttctgtaattcttgctctccaggaaattgctgccctgtactttcagaaactgattaaccacctccatttttccttccatctctcctttttaacctcctccatgtaactagctgtgatcccattaaggtggtttacacttccatcaccctgtgcacgtgcctttccacttgtcgtccttccgctatattgtattgcaattggtggtctatcaatgttctgcgttcaagcttctatgttgttttctcttcagcccacaagtgagacgcagtgttaaatattatattaaattaccctcacctatcagtttaagccttttgattgaacgggtcatttaagagatttaagagatttaagagaaacaaggtgtggtggttaagctgacatagagaaagcttttgataagattgattgggaattcctggtgttcaccctcaaagctaaagggtaaatggcgaaaatggataaagggtgggtgttacctcatttaacttctcttttattaatagtggttgtcccaagggaaacattggtgctatgagagtccttagacatggcaatccattattgtcatattttttgttattattatgaattgttttagtagaattatgatcgatgcgtgtgagtgggattattaaaggcctccctctgtgtccaccatcaacttttttgctggtgatgtcaccctccttccggaactggatgctcctgcagttgaaaacttttttggccttgttaactattttaaaaatacatcagggttgactatcaaccatataaaatttgagattatggccattaactctacacaatatgttattaaatctattgctagaaaatatgggtgcaattgggtcaatggccttgcatatatctgggtttgccttttttcccctcccttttgacaagccacgtacaatatcatatggaatcatattgttgagaaaattgataaaatgctacaatcatggagccaagcacagctcggtggttaagttgaaattgaatactctaatattcaaattaaattatacgagcttctaatttctatttcatcctgtctctttttctattaccatgctaatcaaagatatttactttttctatccttgtagaggcgctcaagag

SEQ ID NO: 7984 - DNA, 691 bp, Cucumis sativus
  Intron number 6 from transcript Cucsa.117120.1 (locus Cucs a.117120) derived from phytozome v7.0 (chr-ID scaffold0099 5; pos 822003 to 822693 reverse strand)
attctcaggtcagttatggtttactctgcccatttggaaactcactggaaaagattatcaattgaatgagaacaatgttaagataatttctcattttatttatatattcttacctatgtcttaacattatgaaatttcttatataagtgaagggagggttgatgttattatatatttttaaccttgacataaggctttagaagaggtaatgaaaccgtgctgactttggcaagatagttatggatgttttatgcatagttatcttgcaatgttgttttcagaaatcagaacagtgtgtaaaatctggtctaatttgcttgatgaaaaaatagagactgcctagcttcatctagctacacagtctagcttcataaagattatcattaacattctcactatctattatataattaggaagggcatgtcggcatttactttcattggagccttgtatgctggacactattattcttaatatctataattgtacttgcgtaagtagtataccatttaatctcctctgctttctgaatattctggagaatgtaatctactgtttgtctatgggaatgatgctagattctatgatcctaactgaaatctcagaatataaatttgaagcctacaatctgattttatgattttaaactgggcaggtttgactctgctgttttgtctggtgtaaccttga

SEQ ID NO: 7985 - DNA, 6186 bp, Cucumis sativus
  Intron number 5 from transcript Cucsa.221800.1 (locus Cucs a.221800) derived from phytozome v7.0 (chr-ID scaffold0171 7; pos 72304 to 78489)
tggagctgagtaagtccctattttatgtgtttttgtttatttcaacgtctttatctctgatgtttttgtcttccccatgttttgttttcttactctaactatgatcatggtatcctttaatgactcaacttcttttcattaatcaatagaaagtttgtatcctgttaaaacatgtgctatttagttgaaagaaataaggaaatatttgaacacagcccaagtccgtagggaatcttgatgatgtatttgttttagaagtgcttgcagttatacctatgttcatatgtgaaataactagagccttttccaactccttttgcttgttgggtgtgttttctttaaaggtttagggtttagggtgtataaaaggaagggtgtcacaaaatctttttttttttttatatattttttataataataataataatagtactcttattcttcttcttcttcttctctcatagaaagttgaaaatgctcattcatgccttaatctcttctcttcaattgctttgcacttgtataatttcgatatcattgtaaaatatacgttaaggggcttagatattgatattgcaatttcttaacaattgttttttgagtttggaagtatagcacatgtatgaaatttattaagggctgtttggagtgctaggttgagttcttaagtctgaagttcatatgtttgtgtttgggctacagggtcattctatctgagttatgtttggggtattgacttgagttttgtctaagtttggatgttagtattttgtccaaccaagtctttttgtttgttttgttttgttttgaagtttctaataataaatattttcctatgaagtaaactattgattgagttgatggttggagataaccaatagagtcggtcaagtggagttggtggttgagtggagttgaatgttgaaggagatgattgtcgaaggtagtcgatggaggtggttgtgggagtttcactacaaaaagtggatgcaaagcatgttgttaggaagctctctcataggacaataacccatcttggaagtaaaggcatgtcatccacccatgcagactcgcttgaagcacacttttgcactcaacttacatatgtctccctgacccccgattcttttgtttgtaaccattagcattatccctctcgatggtaatggttctttttgaagacatcctacctagaataccttctgttcttctcttttgctcacataacacccaacatcttggcaaacgagcttggttcttactttctgaccattaggattttctttattgaagaaatctagcttcaacccgttactgtctctgatactaactcacgtctgccctagcgaaactggcactctcaacacatttgtgaagtcttcaattcaatcatcgggtcttctctgtttatcatgtccaactccactcataaagagtggctttgataccaaatgtcaccgtcgatacttttcaactgtgcgacaccatgacattacgcttgatcatggtcagccttaagggaaactcaagtcccaattcacttttagctcgaccctttgaagcttcgacagaccttaggcgaggttctttcattctcaaccgaactgaatgcatgcacaactgaattttatttggccatacatgttgcccgtacgtgtattttccctcatgtgcgactctagctgcctgcctctactctagaccaagtcctgaggctcaaccatgcacatatatgaggccaagaccatcacaatactatgtcaaatctcccttcatcgtctgagttccccataacgcgtcctcaatgcttctacatcgcttatcgtgacttttggggtgattcagacacttatcgtggccttccaaaacataataatgctttctgagctgtattctgggcttctaccaacttgatggtcatctatcaggctttaccaggtcattgattgtcatactcccacccgcaacgctactttctcgcgttacgaatgtggatgcgacttgggcagccttggcactcctaagtgaaacgccagaatgccgtgtcttaaaacttaatcttaactcggatttttaacaacttaaaagtatgcaaggcgataaactttgataacgcttaaacttgagggaacttagcaacttttattcaatccaacagaacttattacaaacacaagcttatacttcaacaaatactaaatctaaaacttcaggctctcaacgcctggcacaactcttaacgcttgctttaacacctcattgcctggcatatcgccttaattttcataacgcggtcttgacgactcgcttacctggggaagggaaaacttagaacataagccaaatccttagtgagtgacaattttaggaaaaccttttgggaatatgaggtcatgcataaaacccattttacaagaacgtttcacaatggctcatttcgtgccaaaacattaagcacacattagcctttacttattcctctttgccttgacagtgaacttcctcaaggcgtagaccactgtggtaactcatttcaccattagtatcaccgcaaaccctcgtttaacaccagttgcttatgcgacaggcttgaacacagacgactcaacacgttcagtcatccttctaccaagcgatccactcaacgcaagacaacctctactcttatgtgcacataatagctagctcatgataggaataaaactaatggtgcatacaagcatcacaagaaaaacatactttaactcatacataaactttcagcggtcaagcttttcatattaaacataaatcacattacaacatgtattatactttgcataacaccaacatgactcgacttttgaaagaaagctttgcaaaacttagtcattttctttagaaaagtcactcacgaagcctaactttctttatggaaagcttctttgctatttcacgaacaaagccaaatttgctatttcacaaaactcatattggaaaacttgagaacttttattaaaaatatatggaaaacttcttttcaaaatatagaaaattgggatgtcctaaacagttatgccataacataattgtactatcataattgtcttcagaatcatcaaagcagatatgctaaaacttaattccttgactttagacttgagaacatttagtacgtagagatccaaggattccttagcattgccaatcgtcttcctcaaatttaaatcctgaaatatgcaattatgtgagtggaaaattgcaatgcaatttttcatacaagttagtttacttgtgtaatttttttttatcggaataggtttcacgagttgtttctcagacttcgctgacagttgacaagagcaaaactccttcaccgatctttgttgtcatgacatcaccatgttattttctgctttccatgttttgtatttctgatcaatgtggtctgagattggagtgttgcttgatagataatctttcttttcttttccacatatgaacttcatggagttttgtgaaataccaggtcatctaaagtcaatagtcgttggttgtggatttattctagtttgagtctccagccgttgaatgtagttcacccaattgttggaccaacttttgtaattccatgatttttcttcttcgcgtgtggaacaaattctaactggttgcatcctattggcattccctttctcttttcatcttggatatttgggtgtgcaagattttagattcgagtgggttttttttgagcgtgtttagtttttatttgtatttagctttctactgaagtattgtctttgagtggcttagggtagcttgttatttttctgtttgggtttggttttaggttgtcatcatatttattttgtccaagtatagtctttgttttaatgttagcctgtatttatctttagttccttttgctcttagtataatactcttatactttgagctttagtgtcatttattatcattagtaaagaggtttgtttccatttcaataaaagaatatcataacagattgtgaccatgggagatacttccttccattcaatttgtgattagtagtttggtgtatcgcccctttactaatgtttgaagttaaggatgccatgaaatattaggtttgtaaatatcgtagaggaatacttctggttcttacttggagaacaaaggaagaggaaagaaaaaaaaattatggaaaaaaattggttaccaggcccgaatggagggatcagacctgaaaaattatagcagttgcaggcttgatcccactgaaaactcccaacccgaacttgagttgttgaaaaatcctccaaatctaacccaaataaaataaaaaaataggtgacttgctcatacgtatacaacttgcttagatgagaagaatccgaaagaatttggccgaccgatttgtttcagatgcgaataaaaaaaatgatgaactcgatttgttggatcgatccaaatctgatccaacaaacctgatttgttggagtacatacaaatttgatgccattcgtggagtcaaagttggtaaggcttgaatgctccgatttgcttctgacttaaagcttggtcgattgaatgattacttggcttcaaatgtgaaggtcctagttgcagaaaaaggtagttgtgttatctaaagtagttatcttcccaatcattatgttatgctagttgcgatgagataaggcttcgtgaatggtgttaagaatagatgtggaatcaagggacgtaataaaagaatatgttggtgtggataattgatgatatgaaacaaatgaagaaacaaggtacgtacactggtgtttaccttttcgaagggtaatgggaagatcatcagtttgtcctggattgtatgttgaagaaggcattagtggaagacacatgtgcctcaaggttgttgtggaaggtgtcgggagtataattgaggaatcaatggatgaaaaggaagagactcagaggaagatgaagtagatgacgaagtaggagaggtaatctcatagataaaaagttgttctcctcctaacacggactcaatggtgatggactgaagggcatatccttgagaattgaacataaggagagacaagtacctgttaaagtaggatagtaacaatgataccccttttgaacatgcaaataacccaagaagatgcatttcaaggattttggatctaacttagtacgatggggacaaacatcctgagcaaaacaaacgcaaccaaataccttcgaagcaataagaaacaaagatttggtgggaaaagaaaacgataaggaatctcaccattaagaacagttgaagatattctatcaattagaaagcaagcggtggaaacaacatcaaacgctagatacaaggtgtattcttcaaatttcttccaatctgaataggttgcaatggaaccaattgaacaaattgaccgaaaaagagtacccgagacgaacccaaaagacggaagacaaaatgaagctcccaggtgtggcgacgttgtaggaaagtatcggctgcatgtgaggatgtgaacttcacatggttgttttccaatgaacgacaaaggtaggcagaagcagacaatggctgcgctcctcgtgaggtggatggtgtcgacaaacgacctctcgaactcgatgacgtaaacttaaaccctaaccttatgggagcgtccaacgaagatttgaaaccctaaccttatgggagcgtccaacgaagatttgaaaccctaaattctctgatgccatgtactcaatatgttggagtaaaatattctcattataattcagagtaaagtgacacatatatagggaacatagaaatcctaagcgaggtatgtacaattacaataaaggacagatataaatataaacatgtattataacacctatagtagtatttggaggagagaaatagtagaatcttttattcggtcattttataaggtctcccttttctaacctttttaaaaccctaaggtggatcattgtcctgataaccaagaaatgaatattgttatctctggtcactaatgtttttgcagcttttggactatgttttatttatttccccttccttccagacagcattgctttcatgtttttgagtgagtagttattttatcctaacccattggagatctgactctaaaatattctgaaggtatttgagggattttgaagtagaaactatcggat

SEQ ID NO: 7986 - DNA, 1797 bp, Cucumis sativus
  Intron number 1 from transcript Cucsa.241080.2 (locus Cucs a.241080) derived from phytozome v7.0 (chr-ID scaffold0204 7; pos 1239866 to 1241662)
agctaagaagagcagttcttccccgatttcttcaggttgcctatctccatttctttttccgttttattcactgcttctttaattttcttcgtagtttattgtgttttcctatgctcaatttttcatgttaatcgtcttcgttctgaagttggaagtaaggaagaagcattgtagttctcagtctgcttattatggctttgactaagctatagcaatgatcaaaattcgcctaagctgtagtttatggtgctagtttcaatttctgacctcagctttagaatcatcgggatgatttttcattctctatttttgtcatcaagctggtgatacgttcttgttatttgttgttagtgatctattgttttgttggtgatggtatggtcgtgatttcttcaattgttttcccgccagttatcgttaatgcataaacggagtagtatgagtagatctaacgcctggaacaagttgacttgttacttgtatcaggaagatgtggcctattgtctgaaagagcatttgatttcgatctatttggctgattctgcgtgcttttagtttgacctagtgtgtagttcaaatatttttgggaggggcaccatgatttttttatacttgtttttttttgttttcatattataggtttttgtttgtatgattatcgatatatatcaaaggttcctcttctatactttgaaatttctgacagttacttaagaatttcattgccttaaagactctcaaacttttgcaaacatttgattgccgtagcgttttgagatcctgtacttgtctttggactttgccaattaactaaagaagtttcataaaaaacattttctttctaacagttacttcagaattttattgccttaaagaatctctacacatatctatatgacccgttggtctatgtttgaagtctcttttgggggtcctttatgcgtttggttggaaatagaggtcttgtatgcttgactcaattgttgtaatagcaaacttgtccagctcagatgaccttcagagacttgaaaccaattattttctagatatctgtttgttgagagaaaaagaaaacaaaggaaagagagaaagagaactgaaagaatcatcgagcaaagactagtcttagttggagctagtttgtgcaagcttattctttttaagccgtcagtggattgttttcagtttttcctaatttttaacataaataattttcttttaaaagtaagattatcaaatttgagtttattttatttaatttgagttgatattagaacaaccacgaaccaatccaatccagatgatgtcaagttgtttaaccctcaactgcccattttagtccataatttgtctggtttaggttgatcaggtgttattgaatttctttaacatcctaacccccctttcctggatttgttactgtttagaactgaatgcctatcttgtgatctatcagtacaatcttatctgagtggatatggttcttcatccctttttttttatattatagatattttccttgttatatgagcatttgatatcatctcataatataaatgaaaagttattcctcgttaaaagaaggaaaaaacaagatctttcccatgttatagaacaagtaatattatttttgtctaattttatcttttttcagttttattttctttttgttcctttttattttatgcactttaaaaccaaaattgtgttgcccttaatgtgtgtatgtactagctcttctgatttgaattcaaaataacaggactgctgaggaatatagcagtgctgctctttttt

SEQ ID NO: 7987 - DNA, 1002 bp, Cucumis sativus
  Intron number 3 from transcript Cucsa.300610.3 (locus Cucs a.300610) derived from phytozome v7.0 (chr-ID scaffold0293 1; pos 164957 to 165958)
gttcggtttgtatccttacaacttttgagttatactttgagtattttttttgttattgtacatttaaaatattcattgttttcgtctatacggtaaaagaaaaaaattatgagttaaaaacgcatctatattttggtacttttaaaagtgattgtttctatcacaaccattaattaagtagtcatgaataagctaacaaattaatgatggagagtttggggttggggaagagaaataattagtccaattgacaacgacgtgtcatctacttatttgtcttatggaaaattaatataaacatcaaattatattttttcttttgttttttttgaaaattaattaactctacaaatacttcttctatcatttttaaatctacatgttctgatatttattttttattcaaaatcaagtcaatttttttaaaaaaaaatgattaaaaaaaatagaatatttgacaaaatatttaccatttatgtaaaaatcaagtataattaatttttcttgttggtggtttggttttatgaagggtaaatagttggttgatttttctatttttgaaaagatcggtctttaacacgttaaattctgatttaattagatcaaaaataggtgaaaagaaaagccaaaaaaacccaagaccaaatggatttttaattcaaaatcttttagtccaatcatttcattttctttgtttttgttttttgaaaattaaacttgttatctttccctaaatttaaagtaaaataagttttaaaactagttttttagtttaaaaaatttgactgatagtagatgataattcaagaaatttagagtgagtgagtgaaacttaaaaacaaaaagaagacatttacctggttactaaattagaccatattatatagcaagaaaacttaaaagaaaacttaaaattcaaacaaaaaagttatgaactataacaattgttataattgaaataatttcctggtattttttttctaatttttatatttcaaacag

SEQ ID NO: 7988 - DNA, 2751 bp, Cucumis sativus
  Intron number 7 from transcript Cucsa.106640.1 (locus Cucs a.106640) derived from phytozome v7.0 (chr-ID scaffold0093 0; pos 168405 to 171155)
ccgaggtacaatttgcttctttgtttctattttgagataagattataaaataaagttcattgaataagattttaaaaaacaaaaaaaaaatacgaaaggaacctgaacataaattaactgattaaggcactggtaacccctccctaaagcttgtagaatcattattcaaatctccactttcatacttaaccaataaaaaatgtatacaaaaggggttcaagataactacataattttatttttttaccacaacaaaacttctcattaatgattgacacgctacatttgtctttcgaagaccccaaaaaaatgattagagaacttaccaattacagtttacaacaacatcatttctagaaaaattacaaaaggctattgagttggcaagtgaataagctctttgaaattcaattggataaaaaaaaaaccatgaagttgacgtttaaatttttaattatggtcttcttggtgtttttctggtctatgtagagatagagttcgtttggatttttaggaaaaaaagttttttttaacaatacatattataaaaaactttttttttgtaaaataaatttaaaatttaaaatcttaaatgtttgggttgacctttttacaagtgtttatatgtaaaattgtgtttggtttgtcttatgctaacgatgtttattcttggatcaaattaccataaaagactattaaatattatgaactaatttcataaagtaatatacacattttgtatcttttgttcagaaatatattttaaaattaatcgcacgttacttattacttttttaattacttgaaacaaaacattaatttcattttttttgtattaattttttttaaacaattcaattttagaagcacaaatatcttaaaatgtaaatacatagctgtaaaaaaataattgatttctaacaactaaatataaataagataaataattttttcgagacaatataatatcaactagacaaaaagatgtgtaatttaatcatgttcttcattcatctccatttcacgaactgaatgatcatgtttttcatgaacgttctcatgatttctttcacggatgttaatgcaaaatagatttggctgagagaaacttttgcaaatctttatatttaaatgtatatgaatacacattgaaaaatattcaaagtatttaaaaaaacaaaaaaaacgaccgagtgaaaagtagataaatagtaaaaaagaatagaaaaaatagaaaaagaaaaataaatatttaaaagagatttctcattaatcaccagataaatttggttacctgtgttttctctaaaataatttatttcataatctcatttttctaaaaatgatcgtgaaacacctcaatttattttaaaattttaagacttatgttgtcgctatggttttgttcgttgtcattgtggtttcgttcgttgaagcattttttggaagtatatgcgggactttgtttcggtggcttgaagtttaacaccgttgggctttttttgacttcaagttccttgttcttcgatttctcttggctcatgcttcattttggtcccttttgctcagagatcaacgttcttgcccttatttttggtgttttgtttggcttattatttttggtttttcttgaggatgttttatctttatttgatttttttttgtttcctttgtggagtttggtttctttgagtattagtctttttgcattatttcgacgattttgttttttgtttcttgtttcagaggtttttttacgtagtttctgttccacattttttcgcatcttttctcaataccaacttaaatttacatctatcctcctccattccagcttgcattaggccatcctccctccaaattgttgatttttgcttccatcttacctaccattctcctaaacactgcattgatactagaatagataggcctcagccactgatttatttttcaatagaatacaaatcaaagagacattaaagaggtccccacctatcccacttctcacaggagagcccaggagaatactcgcgcaaaaagatacttcttaaatcaccaattcaaaacaaaagctagcgtgcttgagggtaaatttaattatatattgccgacactctaactcatttgtagcttgaaatattggctaactagtgaaaatcaattttaattggagaggaaacaacaatgttggggcgtaaatacatgacttctttagatcatctactttgataccaatcttaaatcaccaattcaacccaaaagcttaagctagtggttgaagacaaattttcttatatattgctaacacctttctttacaatcacatattctatgtatttccctatcactgtgggttttcacctcaccgacaaaatactgtagaccccactcaatattatgcaaactttattctcatagagttttgaaggcgtcatgattttttaatttcaacattcgtcctgttgatgatgttcaaattataggaagttctgattatttacaagggaaaaacaaaagatctccttaggatgttcttttgtagactttattatggatacttttcgtcatttcttaatttaaaaaagaaaaagaaaaaacaaaacaaaggagcacctgggttgcctctttgaataaatatcttttgcagttgttaggtaaaaaattgcttatgttagtgcatgtaattcatattaatgcgtgaacttgcatgttggcactcatccatttttgttttctttgttaggtgtcaga

SEQ ID NO: 7989 - DNA, 2665 bp, Cucumis sativus
  Intron number 1 from transcript Cucsa.195200.1 (locus Cucs a.195200) derived from phytozome v7.0 (chr-ID scaffold0134 9; pos 151647 to 154311)
caaaggtacatatgttttaatttcaatattctatttcttttaacttttaaaattatatctttatatttgttgcatgaattagggttactacttagagttcttttcgtttacgttattttcgttttgtataatatccaatatgagcaacatcttcaaagattaagtatgtactaatttgtctctacatctcacctcaagtaatgcaatactctcggtatgtgaactctcatgtattttattttatatattctaaactttaattcttagataccattgtagttgattattctttatccatgtatactgatatcttaagacactacgtgttgtgatgcatgcaacttcttttttttgtatcagtaagaatttatttagtccttgaatattatttgtctatttaattcatttgctttaattttgtaaccaaaattttagtgcttctttaaattccataacagtttagttctattgttaaaacatagattagaatagattaaactaaagtactttcatactaaattactttaataatcaaaacctcctttgataatcaatttgttgtttttttttttgtttttaaaaattaagcttatgaacgatttttctccttcacgaatttttcaatatgttgttatttagattctactgatgtttaaaaatccaaccatgttctcaatagttataaaaagaaatataatggttctttcaaaaactagattttatttttagaatttaaaattgatgaaaaccataattgaaaatttgggaggaaacaaccatatatttcaaaaagcaaaaactaattaaaatgaacatttatatatcaaactggaattaattataaattatactgttacatatttgaaatatatatgaaataaattagtattcactaaggcctcacttcataactaattttagttttcataaattctacatattttttcgcacttgattttcgaaaacactcttcataggtagatgacaaaaacaaataaaacaataggcagaaagagtgggttacaaaattaactttttaaaaactatcactttgttttattattattttgttttttaagttagatttgttttctctcaatttcttctaatcacttacatcattttattagaaattacagtattttattagaaattacagtgagagtcttcaaagcactttttttttaaattttgatttaattttttaaatcatgaattatatatataaaaaaaagatgaaatctaagaaattcagaagtagaaggagtacttagatacttaatttttttaaaaaaaaaaacaaattgaggttaatgcttgttcattagtaattgtctatttgtatatttttacgtttattttctcctttacataaacaagcattagtagaaagtgaaaaacaaaacggaagagaaaaatttataaattgaaataatgtttataactttactttaaaaaaaaaaccaaaagtagattaattattaaacgagacttttattatcacaaaattttcccctacactttatttagatatgtgaagctgcaaattttaatgaaatgaaggaataagaaaatatgttgaaataggaaattcccttctgttcaaaggaataaagaataaaattattatctcaactctaatattctattaataattcatcaactccacatttcattttcacaacatgtcaatattcagtgcattttctttcgtcttaaagttgagatgagattttttaaaacccttacaaatcattctgaataaacactaagtttatcaattttgtcaatcactctgatgtgaagaaggtgtgaaggtgttttttgctatcataaaaaaattctgaaacaaagaaaagttattttctaccatgccttctttcatgtcatcactttcttagcatcaaattttcacaaccaaagaattggtttgttctgaagtacatcctaatttgaaccacttatttcaattgctcctttaatcaaatccctgcaaacaagattttactttctctctttgtattacgaacaaacctctcttgagatttgaaccatccctttcattcaaaaacatgaaagaaatttttaggaattttttacaaataaataaataaaaccacaagagcaacaggggaattttcttacttttcaacccagttgtcctaaaataagtgtaaaaatattcctttggttaagaacattttaagttgttactagagccacaggttactgagggaggtcagattttatcccaagattccaaagcttttgattgtaagtttgtaactaataataatgagaccattttattccaaagctcgtacagcaaaatcagtatataaagcacatacctttccatgagcaatgcacaaattgccttttcatctcaatatctctccaatcctttgcatagtattcaccttaatggacatgtttgttcttcgtcaccatggcgtgtagattccttaaagttgataaaaaaaaaaaaaaactgcagcaatatattgttgtattcaccatcaccatgtgagcaggagagagagcttccatgcgtttcatcaattcctttgttttgtgttttgcatgtttttctgtagttgtaactgaagttttgcttcataatcactcagtctgcagatttcaaatattgcttctctgtgcactt

SEQ ID NO: 7990 - DNA, 5882 bp, Cucumis sativus
  Intron number 9 from transcript Cucsa.313610.1 (locus Cucs a.313610) derived from phytozome v7.0 (chr-ID scaffold0299 5; pos 2797578 to 2803459)
tttaattcaatttctgaccagttgaagaagggaaggtaattggactagttgtgctgttttctcttaatgatgcgtcaccatttgttattgaattaagatcttctcatgtgataaaagaagcacgagaaaataagcttttcttgataataaatgtattatttttatatatcttaaacatttaggacacagttctggtttgagttaagtgatgtgttgtatgtttaattgagatcaatttgaatttgcttttcttgacaataaatgtaatgttttaaaaacattttaaacatttaagatacagttttgaattgagttagatgatgtgtagtatgtttaattgagattgatttgatattgcaaggatcaatgcctctacttggtgctctctttctaagctctttgcaaatttttccatccaagatatttatttgaattgggggtgcttgttttttcagcttagcttattttacgccttatgtcttagaatgttgttcttgatgatgtggaatattttgtttccttatactaggagcattagtctcttttcattaatttaatgaaaagtcattttttcttggaaaaaaaagtagaatagtattttgatggaacttttatttgagttgcatgtaaccttttttaaagatgattgaatgtacagaaacaccagatgttttcctttttctctggttgagaaaatatgttgtgctgctattgccaacgtgtggtcaatcattagaatgagcagtataaaagttgaaaaaagaaaaaagaagtgaactatacaaggatattaccaaataagcatgatcttctgcactgtgaagtgctttagttgaatttctttaacttctagttcgttctttatttcaaagaaaatttagagatgattttggtgtcattagtgtatccaaattcgaatcatcttttagctggcaatttgagacttctgtttgaccctccatgggaggaagcgaaatttgtgcatggttaaaaaaggttggatggtgttttgggaaatgatcaatgatttcctcttacctcttggatgaaatttgagaagggaaatggtcaatgatttcctctaaaaagaaggctatggaacctttgttttcggagaatctgactctaaggcgaagaagaaaagaaattgaaaaagaataagtcaaagaagaggaaagcgctcttctttattctttattctcttttcatcttctgaaagaggttgagaaaaggcagggcaagcctttagctggtaatggtctggcagagtagaatgctaggctttcctgactgaactttcttgaactttccatgaggctcttcactactaacactgacaatcgatttgggcaacctttgtttgtttgcaatgccagttaatgtagcaccttttttggagagattaatgaggaattttttatggggagggcacacaggaagcaaaatcaattatctgagtttgggaatgctgcaaaataagaacatggctgtacttgctaagtggggctggaggtttattaatgaaaaaacttcttgatggagacaagtcatccgaaggatccacggaaaagaatctttcaactggcacacagtgggagattctggttacaacctaaaaagcccttggattagtatctcaggagtatggaggaaggtggagcccttagcctcttttaaacttggtggtggtacaaggattgctttctggacagatggttggctagacaatttttccctttgcactaaatatctgtcatgccttgctctgcaacgcgtcctgaacctcgcgttacgacacgagaacgcaacttgagtaggcctgatgcctcaaatgaagtgccagaacgctcactcttattcttgaatcttagcttcattgcctagttcaacttaaatccttaaactaccaagcgataaagaaacatatagtgtccaaaatttagtcttctaattgcctcaccaggtcagtaaactcggtttctcctaccaagcagttcaaatactcaacatcccaactgtaacactaaagttattgatgcgaggctccccttgtcgttctgccattgacaagttgcccaccaagaccttggattctccatttagtgtcagtagtgaggagttcttgggcttcttaaatgattttgatctcaagagtaatgaagaaattaaaggggcaaatctctgtattttatttgatgaagctgacgctattcccttccaagtctcctaagaattgcctaaggatctgctgcccttagtcaatgattgtggattcaagaatttaagaaagaaagtttgaattcagttttcactaaatcactgtggagctccaatgatattggctgggaatttgtggcatctgttgggtcatccggaggaatccttaccatgtgacattgtagcaagatcttggttactgaagttattaaaagaaggttctctctatctatcaaatgcctctccttgtgtaaaaaggtatgttggattacaaatgcctatggcccttgtgaatacagagaaaaaaaattggtttggccaaaattgtcttccttagatgtttgtgcggcagcgacttggtgtgttggtggggtttttaatataactcgatgggcacatgaaagatttccctttggcaggagcactagagatgtggtttccaccaagaagcgagcagatttagagacagactcacccttctgtgttagtattgaagagtcaacagacttgaggtgcccttctaatcacaaggctgttgcggagattgaagggatggatttcaacgctctttttgaagctgattgtgccctgctagtcaatgccccttggtcctccccctaaaatcctcagattttccgaaggacttggtgtccacactcaaagattgtggtattattctggactgagcaatttaggtcattggctggttctttgtggaatcggtaggtttttctcgaggattgcttgcttaccatgtgggttataagaaggttatgtctaaaatctaaagattactcctttcaagttctatcatttaaactgggctttctttctccaagttttatgattaatcagttgctgatcctcctgcatcctccgcattcccatgttctgccagtctgctgttttggttcatttcttgtattgttttttcttcagttttatttcttacatgtttggctgcttcgtacttgaattttcttttggtctttggtttttccttggtcccccttcccctctttttggcttctcgttttttctcattgtataattctcttgtactttgagttttacattaataaagaagtttgtctccgtttcaaaaaaaatgatcgtggcatcatcttggtttaataaaagattgataagtcttactccctcttagtcaataatcgtggcatcatccggttgcattttcttgcaagtctctagttttgaacgttttccttatgagagagatttttcgttatgctttgttttcagtgctcttcgctttggttcagtttagcttaattttttgtttggattttgcttttttaacttgttctttgtgattgtttttttttttgtcgtttttccctttagtattgcccaagttcatctttgtcttagtttgtttggacgattttgtcttttttttttttgctctttgtataattctcttgtattttgagcattattctcatttatttttattattaataaagaggcttgtcttcgtttaaaaaaaataaaataatgcaagagatatcaaacaactcctttttattacttaacatcatgcattgcaaatatacacattacatgctttctttaccacaaatacttaaaaataaagatttcaggccttcaacgcctagcatagcccttcaagctcaaacataaacgcctggctatcgccttaacgcgtagcagctcgccttacctttcctaacttggtctcaacaccttgtaatatagggaagggaaacttaaaaccgtaagtcaaatacttagttgggtttttagaaatcctttttggggcatacaacatgtaaattcattttcataaaacaggctttaatggcttattccaacatcacaaagcacacattagcctctacttatttctttcgccaagaacatgaacctttcccatgcatcaactactgagattcatttcatcagcatcccttggagaattttccgattcatttcttgttgctcaggctgctaactcaatacgctcctttcagcgcattggccaacttcttaccgccatgtggtcctttcactccatgattgccttgactcattatgtgtacataatagctagctcattgataggaataatagctaatggtttacttgcatatatacaaacaatcatcaaacatgaaactttaacttaaaagctttcttaagaaatcatgctactcattatgtgcaaataatagctagctcattgttagaatatgggcttgctcttcctggattgacattgactcaacagctttatgtttcgtttaaggcttatggggaagggaatttggggactcagacactgattttggggacgagtttgaaataagcaacctagagaatcttaagtacttccttgggatagcagtgacacgatcgagggaagggatctctgtttcacaaaggaagttactcttgacttgttaaagaaaacaggtatgactggatgcagatttgctgataccgctatggaattcaatgcgaaactaggaaatcctagtgacaaaattcctgttgacaaagagaagtatcagcgcttagtgggaaagttgatttatctaccccacacaagaccaaatatctcctatgcaattagaactggtagtcaatttatgcacgcaccctacgaagaatacatggaagctgtgaatcacattttgagatacttgaaaactattccaagtaaaggtctggtgtttcgaaaagctaacagaaaatgtattgaggcttatactgactctgattgggcagcatcaattactgacaaaaagtccacttcagcatattgtacctttatgtggggtcatttgttacttggaagagtaagaagtcagagtgtcgtagcttgtagtagtgctgaagccaaatacgagctatgaatttgggaatctgtgaagagatctggatgcagaaagttttgcctgatcttcagtagagctgtgagttacctatgaagcttttctgtgacaataaagctgctataaacataaccaataacccagttcaacacgacagaacaaaacatgtggagatagacatacgttttataatggagaaacttgacattggcaatatctgtaacctgtacattctttctagtaaaagaaatgtcgatgccctcaccaaagggttactcaaagagagcttgactcttgtgttagcaagttggtctaattgacatctacgctctaactcgaggggcagtgttagaaagtaggggctagtggagtatttatagccttaagggtatttgtgtaatttattgtatcctagttttatttctttttttgttaggcttatcatagcctatatatattcctccttcttgtactcttttgattattagaaaataatgagagcgacttctatcgtggttttttctccctgtattagggttttctatgtataccttatattcgtcttcttttcttcttttcttcttttcaataatagcaaaatattatagtctatcgacgatagactactatatgtgtttatcggatatttttctatatttgtaaatattttccgtgtttaaaataattttcttattatttatttatttgaattcttaatcttttgtttgaggctgtgaattctttacttttctacaattacattctttgctttaatgcagtggaaaa

SEQ ID NO: 7991 - DNA, 1439 bp, Cucumis sativus
  Intron number 3 from transcript Cucsa.251840.1 (locus Cucs a.251840) derived from phytozome v7.0 (chr-ID scaffold0222 9; pos 922336 to 923774)
ttttcaggtgccttttcgtttattttgatctagagtgtatgtgattgtgattttgttgctttagaaattatatgtatgcaaagaacatgaatgctgaagaaacttttagtaattttgcaacaggaaaaaagtccatcttttaaagggttcacatgcaattgatggagataaacgactaagatctaatagttgcagttgcaagttctgctgtcctttgtggcgaacacatatttctttgcattctatctttactgaccttttcaactaagatatgtttttttctatttttgataagaactaagatatgtatatttgtgtataacataattgtttttctttgaatttaaaatttttgctttttagactgtcttttacaattgtggtttcttttcctcttatcacttcgacacatgctttaatataatccttgttcttggaatcttgtatttatttattcatttattatttttcttttgaaaagagaagagaaacaaatttcattgataaatgtaacaaaggtcgtgtactgagaatccaattgtaaggtagctaagagtaagttaagggtgagttagttaaaattggtagttggttagtttgttatcctacaagcttgtaatcatttcacctataaagaataacatctcccctcactttgaggacgagattcattttcattttaattatatttttggtattacacaaaaaggagtgaaactccaagagcctagaaggtgcattgtaaaagtaccttccaatttagaggttatgtaattgtttattaagatatggttggaatctgtacgctgtaaatgattgtctattcttgagcccaagctgggcatggtgtttttcgttaataacaatgaaattttacgaaaacagttgatagcacaagaattatttgtctacataattaacaataacaagcaagaaataaaggccaaaagaaagcagttgtaatatacatagcacccttgagcctgaggctgggcatgatttatcaggcatttgttaccttgaatttttttctccctgttcatgtctctctatgtatctgtgattctgtctatataattttatataacacgtctcctatttctctttatttacttaattaatgataaaggctttagtattatttttcctcaaattatccaattgcagaaggaaaagtatctaactgttgttgtatttatatgtctgtagtataaattggcaaacagtggttttatggctattaattctcaagaatgctctttgctgaaatgatcagtttttctgatactgtctgataatgcttgcttgcgtggttatttttggttgctttgtgatgatggactagtcctttaccctctggacatttttatagtgcatttctccgttgtcttttcgtgggtttagtatagatttccaagctggatttcaagattggaaga

SEQ ID NO: 7992 - DNA, 5347 bp, Cucumis sativus
  Intron number 2 from transcript Cucsa.112130.1 (locus Cucs a.112130) derived from phytozome v7.0 (chr-ID scaffold0095 3; pos 826153 to 831499)
gttattgaaggttaagttgcctacttcttcaatttatgctagtgagagttatgcccgtttatccatgctcattttggtgctcttgtgaaagttaatggcactgtacaatagtagaactagaacccgtgtgatgatattacagcgatttactttcaagcatttattttgaatggctatgcttagtgttaaattactcttatagttatatccaaagtcttaaactgatggtgtcgttgttggctgcattgcaaattttgagcttcgtgcattaataatactatggtaacatatcctcccccccaaagaaattgcatggtgatttattttataattttttctatttattaattggaagtcatgaatggacgaatccttgatgaaagacttcctgtgaggaaattttatttgtagagaggaaatgcccagtttaaaatcaagggggtatacattaggtaggaatagaactcctcaactgttaagttatgctcttgttggcaacaaacacaaatagtaattcgaattttttcaactgttattagctgtcatttgcaataggtgccttctcaactggtaagttattctcatgttggcaattaccactgtttgatgttataaggtttttccattctttcgacaaaggatatacctattaggttaagtggaaatccacaaaggctctcctctgtggggatcattggtgtttatgcagccatgcctgagttcgcaaatgaagaattttatctcttttttggataagatatcctccgtagaggtatgcataaggacctgttacctgtgagatagggggccgggagatgggaggttgcacacgaaggattcagatgagaaggtgccttctgtctctttcttccacttccaatagtcttcttaaactgccactaggaaagtatatgcttggcaagtcaacaaactgctcttcttttaagtttctcctcagaacacaagatccaacaggcatcactacggttcccatggttagaaatagtgccttctttcctgaaaaataagaagaaaagcctaggagaggttcccttgaaggggaagatccaatccataaattggacaaaaagctagtggatttaccatcgtctaccacgttgaaaatattgctataaatcagcccttttcgtaacaatgtattttcaagggcctttggcaaaactgagagaaatagtggctggtttaaggctgaggtggaaagtgccatatttttcagcaacaatacttctccatgcaactgttttttctatgtagaatctccaaattcatttggctttgtgtttaggggttagatccataatccccaaccaaaaatggagacctacactgttcaaattggagaacaggtggtccaattacagaggattccttcccttcgtagagtaatggtacaatatagtagaagaaagaagagagatagtgcacgtgttattgagggtgagggcacactacgtgattagtgtaggggaagttacagttagttagaagataggagcggttaagtaggaagggagtgggaaagggaaaggggcaatcagtttgtgggtagtttttctgcactcttccttgagagagaggataggcaggagggtaatgtttttaactttgtgttcttagttttctgtatgtttgaatccagaattgtttgttcaacaattctactttgtaatttttgaagtgtttttaatcaaattagaaaacaactacttggtgttctatcaccttccctctgtagggcaatggtggagcaaaaccctgattagtggctggcctggttgatttaatcaaaagctcaaagggctgagacttgtcctaaagatatggaatcagtccatctctgttaacaatgtgtcatatcacagagaacacctcacagaactgaatcaacaatgaatggaaggttaatatagtcacgtaggctcttaataatagaaacacagagatcaaataaatgcttttatccattgctgctgatgaaaagattagatggtgtcagaaatgcaaagtcaaatgggaaggggatagtaataccaccttttttcacagttatgaggctgcttgaaaatgtagaaggccataacagatgtttttaacacacagaatgaaagtttgctcttagatggtgagatcgaggctgcccttttgaatttctacaagcatctctttaccaagaaactgggcagaagacttctccatcaaaatcttgattgagatcatattaatcttgaacaagcaaccagcttagaggctttttcccagaagatggaatatgggtggcagcgaaggctctaggcaccaacaacacctcagacaggatggttttacaacataattctttttaaaatcttggaatattctcaaccccgacctaattaaagtgtttcaagactttcctcttcaagatcattgcttgtgtacttttcaaacgtgtcaaaaagtcgtctcaactgtcgtggattactaatccgcttttgtggaggttagacaaattttggatgctttgatcattgctggtgagatcatagaacaatgctataaggagaaaactcaaggtgttatcatcaagctttttatgaaaaaagcttttgataaagtggatcgagaatgcattgatgatattttgaaagtgaaaggatttggtttcaaatagggactctggatcaaagttttaggacaccaattgtgcatcagtataggaggaggggtaggggtaattcaggcacaagaattttaaggggtgggaaccacgtaggagagtagtatatatactctctgtatgtgctgaaagcaagggggttagtctggggatagcttttcgagagtggaagatagggagttagggacaatcatttgtgattgtgccctagaatttgtatttgtcgatcatttgcttcttcaataaagattgatacctttcatatcggtatcaaagcaatcaaacctcgggaaaatataaaaaatatggcaattcgtggagattcagaaactactgaagatggaggaatccatgaagtctttgtcgaaaagtgtgtaatggttgaatgtgcaagggatagtcaacaacaaagttcggaagagatgaagaagttgttgacggatctattgattgagattgcgcaagtgcgatctaatacaatttcaaatacagacagaggagagtcaaatggaagtaagaatgtgaaataaatgatagaaggaacatccacgatgaatgaagcaagggagtaggagatgcaggtgatcattggttggtcggagtcagtttttcgaccaaaccgacactgaaccgcctatggtcggtttagtaaatgttcaaatagacctcgatcatcaatgagtaaatgtcggtatgttgattttttgttggtcggtttaactctttgaaatttctcaatttggaactttcccaaaccaacaccgaccaacttcggtttggtcagtctggtcggtttttcaatctatcatgttcaccccttataggagatcagggagcagattttaggtagagtgtaggtttctgcaaggaagctacactagagaggaaggagattagggattcttggtagagtgcagatctttgcaaggaatggagtctttgcagggattcatgaagtcttggaagcaatatttcaatccaactgaagctttgacaaaagtcttactgaagtacgatgatgtatttgatttgcagaagaattgccttcgagctggggagtagaccatcacactcattttaaagaaggagagggcccatttaatttgatgccgtatagatatgcccatagttagaagtttgagatggagaaaatggtagtttacatgcttagtccttattctactccaatgttattggttaaaaaagacagatgatggaggttttacatggattatagggtgttgaacaacgttactgttgtagataaattcccattacctatagtagatgagttgttcaatgaattaaatggggcagtgtggttttctaaaattgatttgaagtcctgatatcatcagattaggatgcatcctgctgatatggagaaccctgcttttcatacatatgagggtcattacaaattcttggtaatgtctttcgcattgatcaatgcaccatttacatttcaagctttgatgaatcaaatttttaaatcatacttgaggaagtttgttttggtattttttatgctattttggtatacagtaagagtacgtaagagcatctagagcatttggagatagtgttggctgtgttggtggacagtgaattatatgctaaattctgcgtggaagatcagagtatttggggcatattatttctagtgaaggagtagaagtgaccccaacaagatacgagccgtgttggattggccggctactacatgtattcgagaggtgtggagttttctaggtttaactggatactattgaagctttgttcagaattatggaagtatggctgcatcacttatgcaactgttataaaaaggagcttatcaatggttggctgaagcaaatgaagcgtttgaaggattgaagaacgccatggtgactttacctgtgttggtgagggcaaagaaggaagtggaacataggcttaaactattaaaaaaaattattcttttatggattttgttttaagaaagctttcactaagccacctattgttttgaaaggagtataacttttattagtttgacaatgtatttcatagttaagttgggatacgttcttaacacgacacaacatggtgcttggtgtggcattttccttaaaagatactcatatcgagacattctacacatgggaggagtgatgtggcgtcatggccttccaacttacaaaaatggtgtcgctccatcactttttctagagactcctctccaaaagaaaccttgtatggatctctccaaactctttataacctttcaagatgctcgaaaatttggagataatagattgggatgccatagagaaccacgttgagtgaatctcccacctctagaacataaaatagagaagaaaaaaagtaccccaatgcctttatttgcttgtcaatagttttccccgaaatattagtttggtgccgttgattttgagccttgaaactagctcaatggtctctaaatcctaaaaccaaaaagatgctgtcagttgatttgttgattacttgtagtttgtattgcaacataagcttgtgttgttggtgtttaatatgttcatgctcctgcatacttctgatattattcacttattaagtgggcctccttctggtcaaatgtttgttgacaattatgcaataattgggcagatttgaacacccgtgatc

SEQ ID NO: 7993 - DNA, 1872 bp, Cucumis sativus
  Intron number 1 from transcript Cucsa.257960.1 (locus Cucs a.257960) derived from phytozome v7.0 (chr-ID scaffold0222 9; pos 5100909 to 5102780)
ttcagtttcttctcccattcttcttcttcacttgggtaaggccgcttctaccaaagtacataaaatgcaaatggaaatggaaatggattttcccaaatttgttctttttttgcttggataagactccctataaagattgtagttttgtggacacaattatttcataatataatatataactattttctaatataacgtaatagaataataaaatttacataatatcgcacgaactaaaaagaaaagaatttaaaagtaaaattaaaagattttaaagacatttttttattagtatttagattttatgaactctcaatcacttaaataattaaatcatatttttgcacgatagagattaagattcagtgaaaatattaaaatataagaattaaatcgatacattttagaggttaaattaatatgttttcatttaaatagaatagtgattaattaatttgattatattttgctttttgaaaatattaaataataaaaataaaaaaccgcacagttaaatacgaaagattcttttcaagtgctgtgtcgaaggttttgtcactcgcagtcgcaccaccaccgcctccctcgcgcgaacgacgtctttctccccgccgttttcttctctcgccggaacctcgatctcaggtacttttctcaattcctctctctttctttcacgtagttgaaagatatttcttcgatctttaaaagcagtttatattgggatttcgtttgttgcgtaattctgcaattttgaaaatagggcatgaagctgtgggggttatttggattagcttttgtattctagactagggttatggaattatctgttattgatgttaatttcacacttggatagcttgcgcgttagccatcttcagagtacaagtccggaacgtaggcaatagcgatctgacggcgacgtaattccggcaagtcgatgtggtcaacaccggtgctagtagtgacaaggagcttgagcgccggaaggaaatcgaggacgggggaggtgaccagagagcagctgctggagatgagcaaggcttgtgtggattgggcataagaagaaaggaattggaggagagggagatcggaaagtgatggtaggaggaaatggaatcggtttgagaattgagattggagagcgggtaatacccatggggaaccaaacaccaaaacttgatgaaggtcgttgccattgctatggccttcagtttcttctcccattcttcttcttcacttggattttcccaaatttgttctttttcttcttcttgcataagccatttgtagtttgggatattatcaaaaataggataatttggaagggtataaagagttttggaatgaattttcaaaaagattagttctttgcacctaatagcatcttaatattctttgcgccttctacggaactcaaaagtaagaaagagagcctagcgaagtgaagctaatggcgcagagaatattactctctttatatattgtgctccctcctcagtcgcaatttaaaaaggatccagtccaaaggttaatatggatttcttagtccgaaggactatccatattcaatcagaaccttctacgttcgtttctcattgttaggacaattaactagaaaaagcctatattacccctaagttaaaaaaaaaactctaaaattctatttatggaattctttcttttctccttctccctccgttttcctacttcccaaaaaaatatttcatttttctctcatctctccctcagtgtattccatttccccccattttcacaaaattttccattcttcgattcgttttcttgaaatccctttctcaagctcctctcatagcctcccaccggcctttggaaacttgctgtcgttcc

SEQ ID NO: 7994 - DNA, 695 bp, Cucumis sativus
  Intron number 7 from transcript Cucsa.175810.3 (locus Cucs a.175810) derived from phytozome v7.0 (chr-ID scaffold0122 5; pos 325742 to 326436)
agtgccccctctctttaagagcgccgctctttggggtatattctttcaactatattcgatcgaatttccctgggttgtgtgaatcttgctactttgtttattgctataccctcagtagataatgcctttatatgtctacaatgatatgttgcatgtttatcatttgtttctcttgcgttccacatatgtgaagcttgtggctgctactttttccagacgcaagaacttagctgatattctgatttgatcaaatgcactatatactttggttaacattttcaaatttggataagattctatttactgagctgaaatatgagttcttgatatattgttggattcgtgagcttgtgaaagcttaagtatggtttccctatttcacttgacatacatgctaaacagagaagtttacctctctagcctgtggggatttatccaagttccttatggggtccataatgttcaggccaattgccttgtagttttgagattgtttttcatttagagttctcattcttggtattcttccatttgtaaatctgtgttttgtttgtttcccactaaaatttgttttcttgacccgaaattttcattctttgtatttaagtagttttttgcaatttctcactcaaatatgttttcgtacacccaaatttgcaggtgtctttctggcattatcttcaaacacgcgatac

SEQ ID NO: 7995 - DNA, 3519 bp, Cucumis sativus
  Intron number 1 from transcript Cucsa.327980.1 (locus Cucs a.327980) derived from phytozome v7.0 (chr-ID scaffold0315 9; pos 267759 to 271277)
aaaggaaaactctttgaatactcctctgattccaggtcatctctatttcctcttttctcttttccttcttaatttcttcttttcatttcaatcctttggttatatgaatgtgtttctgtttttctttttagtttttttaataaataaattcacatggctccaaatctagctatgtttctgatttttctgacttctcactaccacttaacacccacttctcttttcctttttcatcttagggtttcaaaaatatatacacatatctgaaacaataatcgtaccttacttaacttttgagttcagtgatgatttgattcgatttctctatgtatcgtttttgttttttagggtttattttgatctacttctttttaggttgaaaaaaacctagtccttttttggccatggaaatgaggatctaatttaacaaatggagatatacagtaggttatggacagaaatgaagagagtaattattgattggtaaatggattatatatggtatgaagagcctcattgattaaatgatgatgtgaagaagaaataaattaaattattgtaccttgtaaaatattgacttttattatttgatttttgaaactgtttttgaatgacttgtagtgaaaattatttatgttttggaaggtactaaattaaattcttctgaacctaggttgtaaatatcaaaatatatatgaattagattaaaagtaatggagttgtaaattatttaaaatacagaacacaggaacctatagtagttatttatatatataatttgtaagaaaatattatttcatttgtaaattatttcccttttaaataaaatattataatttttttgttgggttttataagttttcaatatttttctatgatatttgagaggtaatatttttaaaaataaggaatctaggattttcgaaatgatttttttcttcttgtttttcttatgtgtattgaaagaaaacatcgaacttaatatatatttgaagaaaagatgtttatattcataatgtggctttcatacgtataagccaaaaactacatatgactaatactttttatattattgattttggataatcatttgacattttatatggatttttattgataataatagattttaatcttctaagtcgtatttgaattcttagagaaattcaaaggacaaaaacaagttttatattaaaaaataaaaattctttggttttaaaattttggtttaattgtaataaacaaagataagaagaagtgatgccactaaaaaagataacaaagtaaactataatgttattagaaattaaaatgttactaaacaaaacttgtaagcttttcttccatttccaaagtatttttttatgtggtcatcgtatatatacactattactcttcttcttcttcttcctttaaagtaatttaactgattaagatatttatcttttctataagttaaaggtttaaattccctagttctaggtgtgtgtatatatattttgtaaagttttttcttggtttcaatgttttcatatatggctattaaaagctattactttataagtttatatgcatttatttatcacatattattgattgcttatgatctcaatctacatacctgaattagtttattttaaatttatttattttatatctaatattggtgggccttatttatatcacatattaattgcatttattaccttatatgtatataaagcttattattcaaaatcgctttctcttcttttgaccaaaaatctagggtttattatgaacagcagcagtgttcaacatgatagacaatcggacagatagaaaaaaaaagttgaaccctagccctaaaatgaacgaatgagtattcataattcatagtaatacacagaagttgaatatatatattttttattttccagaaaaaaaggaaaagggtgaaaaagataatggatttgatgggaaagttgttattcttgtctaggataagacttgatagaaaacagtaacactttggtgtttatatgcttcaaatctaggccctaactttcaaagttgattttgtttttaatattattattctaaaataaattccttttaattatttcatattatatatctatctatctgtgtatatatatatataatatttggctgtcaattcaatttaaatcactttgaaatttcaaacagtggtttggttgatgtactatattaatggttgcttcttttgtgagagatactcagagatggaattgataatgagagagataattaattgtgttgatactgttctaaagatgttatataattaaagcttaatgaactttgttattttgtccatagttagttcttgtaattacaccttagtgttaaaattcaatcctcaaacttaaattgtactattagttaataaaagttaaactctctaacttatatcagttgtgataatctctaccattatgtataaatttgagggtacgtttggttttcaaagctcaaaatatgattgtaaccctcaatggcttttaccatttgtcttattattattattaatattattatgttgtgaaaattaaatcctatcatttttgttctgagtacatttggtgacttaacatacttttagttccaaagtcattgtgttttttatgtcaattatgtggtttcatgaatagtaaaaatatgtatttgaacttctttttcttctgtcctcatgatattgtcatattgtactgtctaattattttcttaatatatgggttggattctgtttgagttattgtttatgtcatgtttgatacacaactatttgttttttttttaattaaaaagaaaaaaaaactaagcctacttcctcctacttttgacccaattttttttaaagtaaaagatttcaacttttgaccaaattataattttcttttaaaaaaaacaaatagtaactattggttagtttttattttttagaaaacattatttaaaagtgatatttagaggtggattaagtgttttttataagcttgattttcaaaaaaataagaactaaaaaaaaatttgttaccaaatgaaatcatgatggaatagtttgcaaactacccatagaaatcttgaaatttggaaaaaatatgaaataggtctaattatatatgtgtagtagataaattatttgtgaacaactttatgtgcaaatatcctatcatatatattaggccctatactaaaaggagttctagttttgcatttggaaacaattattttttctaggaaaatttgatcagtctctgttatttaatgagtgacatagataatgaacgtcacaagcccctttggagatatccgataaaattggaactatacagagataatgaacgtcacagtaaagttaaaatatccacttttaggtttagttagtatccgttatttcaacataattaccagtgttatcatttgtgtattcaataattatatcaagaagcttaattaattatacattactatgaactttaattatggtacagc

SEQ ID NO: 7996 - DNA, 966 bp, Cucumis sativus
  Intron number 7 from transcript Cucsa.161870.1 (locus Cucs a.161870) derived from phytozome v7.0 (chr-ID scaffold0114 4; pos 1655649 to 1656614 reverse strand)
gtctttactataaaaagttcaagcattactgcaaggtaatctgttggtcgtagtgacctttatcttttgtgttgattataaaccgtagacctgtaagaatcgaataacccgacaacccaaactacccaacccatattataagagttgggttgggttagtttaaaatgtgggttgggttgggtacaaaagtttggttttttttgggttgggggttgaaaaattcagttaaacccaacctaatccgaattttatacatataaaatatatattttattattaactaaagaaaatagggtaaaagaaaagattagttgatacatagggatggtaacccgacaaccaaacccaactcaaccgaacctgtttacacctctgatagatcgattatcagattgcttctgttttatgctcatgcttatgcttgcaaatgacttattcttgctttcttgtcagtcaactcaggcagagatttagaatctttaagtctatatcaaatcaatattttgaactcgaatacatggtgcttctggctttattcatgttatttaggactctagctaatcaatactgaagcgatctaattaattcttgttgcactcatctaccttgtatgctgatgtttttgtctattccatttccatcttttgctttatgaaggcaggtcggctgaatattttgcttacgaatggataattgagtgtcgaagtgcgtgcttgactgtcatatattaacattgcagcttcgtttcgaaggattatattatcttggttgtcttatgcctacactatttaatgagttctttcttgtttttgtttactagtttatttgatttgattgctttagatttaatacacaagtattctgtgcttttctttctcaagtcatcactcataaaaaaattctattcattgacctatttttctcttgctcgactttcttagcgaactaaggaaggccccaactgct

SEQ ID NO: 7997 - DNA, 3089 bp, Cucumis sativus
  Intron number 12 from transcript Cucsa.196910.7 (locus Cuc sa.196910) derived from phytozome v7.0 (chr-ID scaffold013 57; pos 472886 to 475974 reverse strand)
caacaaggtaaatcttgtactgatgctttgatgagagctttggttgtgtctttataaaatggcctaagcagaaagaaggtagcttttaaggaatcagttaggaattaagaaaataataatagtaatgaaaagaaaggaagaaaccacagctcaaaactataaatcaattgtgatattacagtttatgggggaaatgaaggtgaaattgattttatgggataagtgaaaggccattcgtttttcatttttaaggttaaaaagtctattgtacagaatacataattgtttgtttgaggaacaagtgaaaataataggaggtcttaaggttaattgataaatgcagaaaaagtaaacttttccattaaagaaaattaaaattattttactggacaattttttttaatatttatatatacaacaaaacatcacaatcaaccatatcttagttgatgactatattttaactcattttgttatgttaaaaatagcttttattttttaatttttgtcctttgttgagatgaaaattaaattccatttttctcaattattacatatttaaaaaagattatataacaaaacttataacaacaattagacatatagcagaattttatcatcgtttatagtggtagagtgaaagtgatagacacatctatcaaacagtaacaatttgaggagctttataatttagtaaaaatattatatatatacattaactttcataactattattacttttttaaaaaacatttccaaacatttccaaccagtttaattaagattcctaaattattttaagaataaataaaatgaatataaaacaaatgaactataaaataaattaaacttataaattagacttaccgaagttaagagacattgaataagaaattttcaaaactaaaaaaaaagaaaaagaaaaagaaaaaagttaaaatattaaaatgaaggtctataaataaaataacttacaaacaaaaagaaaaacaaataagttacaaacaaaaagaaaaacaaataaatgaaaacttaccttccatgttttgagaagatgttgaagaagcagaaaaaatcgttgaagttttataaaaataaaaaataataaaataaatatagttgaatagatttatggtaggtgcataaaatgtataattattatttcttgatggaaatcgaaaagttgtaaagttgtaatttgaatagaaaagaaagttttgaaaaataaattatacaaatattaagaattaaatagtttatatatttatatatattataaaaacgatagagttgagaggatctcgagtctataccaaatcttgtgtctatcaatactactatcaatactatatgatagtaatttattagtgtctattagcatctactaatgatattttactatatttgaaaacatggtatattcattttcaaacaactcccaaacatgtataaaatgaccaatcaagacaaataagcaaagctattagtaatctccatgataacaaaaaatttctaatcatggtctcaattcaaccccacccccaccttttataacgtggtaaagtgctaaaaatataataataataatagtaaaagattattgtcaaagtgattagtagtatttcagtttcttcttccttgacgtgttaggaggtttccttattaaaatattttgtaataaaattaacaataacttgcattaggcaccaatgcagttttgaaatagcaatttccttcattgatcttttatgaaaaaagaaatttaggaatctcttaatctaatcctaagactaaaaacaagcatttcttttcccttctttttagttttcaaaacttgcttttgtttttgtaaaggtagactacaaaaaggactatcaaacaagttttaattcaaaatttaaaccacacaattccactttctgttgaatatcactagtaggaaaaaagaaaggaagaaaaccatcaaatactagttgaacagtaaaaagaatagaatatcaaaacatagaaatattagaaaaggtcaaaaaaaaaaaaaggattcagataaaaggaaatattctgctgagtctgaaagtatggctacttagctttatatttataatatctaatctaacactaacacacccactcaagttcttaacaagcaacttttcccactacaaaaggtaagaatttctaaatcaaaattcttccctccaatttttctctcttcttttttccctaaaaatcccatttgctcatttctctttcttttttgtgaaatgttgttctaaagcatgacacctggcccaatcatttcctgaatttccattacaaagtataagatgaaggaataattataaactacttggtattgatatcaaacaatatcttgatagggattaagcagtatcttttttgtgaaatattctaaagcataacacctagaccaatcatttcctaaatttctttttgatttctttttgttcttttacaaaacatattatgaagggaatattgtccaaaaagtgctcgagtccaatgtcgaagctttagaatgatgcttggaaaatctagccaggaataataaagttttcacatcaacttgaaagggaagtttcagtaacgttaaacaacaacttttattgatctcacgggacaacttgtttaaccctacaatatttcttggttagatagtcactgtaaattgaactcgtgatttctagttaaatattgaaacaatgtctcattttgaccattaaacattcatgatggttataattttaaactactttggtatcaacaaagggcaattagtccttgttaatggttagctcacactgacataaagtggagtcaagggcttgaaaattttataattttctttctaaagttagaagcagattttcacaagtttctccctcaatttaatggttcctttcatgtctctttaacaaagttgctttcagtcttctgccccacaactataaattctttgactattatgagacgtagaaaacagtccataattcccagttatttcttctttaattatcaaagaataacttttctaaaagagatttaaatggtttgctctattcatgtag

SEQ ID NO: 7998 - DNA, 2359 bp, Cucumis sativus
  Intron number 1 from transcript Cucsa.362590.3 (locus Cucs a.362590) derived from phytozome v7.0 (chr-ID scaffold0361 1; pos 403528 to 405886 reverse strand)
ggcgtacatcaagctgaataacctccaggttacttttatttctcttttgttctaaccgatgtggctacttttttactgttgtttttctacattctttgctgcaatcttttcgtttgcgttgttattttaacttaacctagaacttgaggttttgggtgtggtgttcattcgtagtttatcaaatgttagttctctgggaagccgaatctctctttcagtcctcagttgctcaattgaaggtttctgaattttaaaactaggttaaagtataggcaaaccccaatattcttgaatcaaataatatatatacctgttcgcaagtttcaattgccttgaataatgagcaagctattctggtggtgaatgcatttattcagcagtgtcgtttaaggattgaatgctactgtctgagcttttcttttcacatgaattcgggtttgagctccgctttgacaaagttggctgcttcatagggagaaccttctaaaaaaattacttttgagtataaatacttcatcgaagttcatgaaaggccaaacgaggattttctgtctcttaatcaaatgaaatagatgtcttggctacgagtttctcaagggcgtgaggggaatatgcattcaacagaaaaaagcttgagcttctctcatattgccctatagtatgttttttttcttggaaacagcatggaagtgagccacttttagcttgtctttgctcatcatttgacattgtggtaaatgtatcaatatattgagggtgttgagtggttggaacaggagttgtctcgtgtctgccacacccagaacaatcagtcaaattttatctaatgggtgtgtcagattaagtattctattaatggggttaactgtagagattaaggggacacttcggctccaacctcaagtgggttttataggtcatcccatgtttaggactccaataataatatttattgtttttggcatggtatataagattaatctagactacacaccaaatacatactattataactagtatattaactaattcagtgtctcacacccttcttaaagggtatttggaccaaaaatgtttgggagcaaaagctaggcaacatggagttgtgaattccactacttgtttggcaaaggagttagcaggggcctcacaactaaaaaaaacattggtgttatggcttgttgacttctcttactgtgggttctaggagttcacaaatttcttaatttcatatctactcggaccactgggtgaaattagaatttgacatagtattaatcttttttctgttttttagagtttggaggactttgctgattgatacacatgtatataaccttttggtatgcagaacccaactgataagaggcagatcatttgtgatgcaaagctgaaggctatatttggtggaagagaaaaagtgggaatgcttgagattccaaaatttctatccattcattttgtgaaatctggttaacctaagctttctgtgcatgctattcttagctgttctaatacctctcttccaaatccttgacggtgtcttgtgatgtcttgttaggtttcgtgatgtcttgttaggttttgtttggctgtcctatgacaccaccttcactttttggttttactctgatttagggagagggtgtttcttgtttagaaattgttgaccattagtgttttataattaattaatgtatcttttctgtctaaattttacctttttcaggattcgtagtttttctaatctaaatttgtagacttaggaaagtattatattcgctttgagaatttgatttggattctcttgaagctcaatcaggtagacagaagttcgcacctatttcatatacacatatatatgactttaaaataattttgaaaaagtaattatcattatggacttaaaattgacatttgtcaagggaaatgcaatttattggtaggttgaatgggagctcaatgatattgaaaagatttgaagaaaattatgtttctaaatggatatgcaaagtagcgtctgaaattcgaacttacataacaacactagaaataataataatgatttaagtgaaccaatcctagaggcaagtttacatttttcaaatttgtttttgaaatcgtaattcaagaattcccaacttttaggactagccttagatcatcataaacaaaggtataccaaaagaaaacaattgttactaaccgtatataggtgagtaagattttgaggcttgatgtcataatttcaagcaagttgaattacactaatgttggtagccgtgtagcaaggatgaatggaataaaaaaaattgaatattattaatttcagagtgactaggaggggtaacaagattta

SEQ ID NO: 7999 - DNA, 5723 bp, Cucumis sativus
  Intron number 4 from transcript Cucsa.317610.1 (locus Cucs a.317610) derived from phytozome v7.0 (chr-ID scaffold0305 4; pos 21561 to 27283)
atcatctggaggtgattcagaaggaaaaagcaaatgtgagcttccttgttatatggtgattagtgtttatttacaattacttaattagatttatgtggtgcttgatggcatttgattgtgatgtctaaagcatttactgattcgtttgataaaaattgattacagggttgtaatagagggtgttgttagatgtttgtgtaggtgctcttgaatcctccctttcatggcaggaggattggcttttttttcctttgggtgggcgtgggaggtgttggcttttaaggaacgtggggttagtggttgggggaagatatttgggatttgattagattaaattcgtctttacgagcatttgtgaatagggtattttataattatcaggttagtatcattctttggagcatttttttggtatcctttcattttaattggttaacgcttggtttcttattagaaaaaattcattttaggataatccatgcataatatatatgttttttgaggttcaacaatgttggaagtggagtgggaacctaacctcaatctctaggattgtaattggtgtctttatccattgagctaagcttagattgacatttaatgtatgcatgctacaatattatcttgttgtcgtatatatagataaagttcaatttgttgttttagtttgctgaacatattattgtaacaacatattcgcttcctattttttgtcttttagaaggtttcgaaatcatttggaaatctaagtgtttgtttgattttggatttctttgacaaataatcatttttcccttaatgagtggaaaaaacaaagaatataagatagaggcataaaaaagacccacaaaagaagatttggtttgaagtcatcactgctcttcttgagagccattcctctcgagagagaggagagatgtgagggtttggagtcctcctttggagggattctcgtgtaagtctttctttcagtgtctggttaaccctaccttcatgggagagttggtgttttctttggtttggaggattaaggtccctagaaaggtcaggttcttttcttagtaggttcttcacgacggcctcaatacattggataggttgtctaggattttgactcgttagttggtcctttctgttgctttctgtgttggaaggtagatgaggacttggatcactttatttggcattgtgagttggcgagtcgcatgtgggatgattttcttcatacttttggcttgttttatgctcgccatagagatgttagagggacttggatcactttatttggcattgtgagttcctcctcaatccgccttgtggggaaagaggttgatttctttgtcatgcttgtgtttgttccatcttgtgtgttttgtgggttgagaggagtagggagggtgcttaggggagttgaaagggggagtggggagatttggtcggttactcagtttcatgtttctttttgggcttcgattttgaaagctttttgtaatgacatgatttgtatagttgggctcccttcctgttatttgtgggcctgattttttgtgcgcttgtgtattctttcatttttttctcaatgaaagccgtttatttcaataaaaagagtgtaccagaagatctaacgaagaattatgaaaagccttcgtgactgatctcaaagagaaacattgaatctaactagggatcaaagatctcacaggtccatctccattgtaaagattctattgtccattttccaccataagccttgcaatatagcacaaccccggcttgccacaaaatccccctttcttgcaaaaaggtagatggaggaagaactcttaatctaacaaaggatcaaacatctcacgggtccatctccactgtaaagattcaattgttcattttccaccatagatcttgttaaagagagtgtaacaaaagacctaatgaataattataaaaagccttcgtgactgatctcgaagagaaacattgaatctaacagaggatcaaacatctcacgggtccatctccactgtaaacattcgattgttacttttccaccataagcctcacaatacagcacaagccgaacttgccacaaaatccccctgcttgcaaaaaggtggatggaggaagaactcttaatcatttccttgtagtctatgggagtggccatatgaaaaccaagtgctataaaaatacatccaaactgatttcgagaaatcacaattccgtaggatatgatctaagactttcttgaccttctaacaaagaatgcaacaaaacaactcaattagagagtcaaattccttgtaagccgatcaagcgtgttagcatgttcgtgggttacccataaataacttcatagttttttttagattttcaccttccaaaaagatgagaaaacaaattcacagagggtggaagggtcgagcaaactatgaaagaacctacaagaaacacttctagtaggatcagggcactaagtacgaatccctcctccagggtctaaactcaaactccccaataaagaaaggagatccatcacattcattgtttcccttcaacaaaagattgttattagacattttgtcaatttgttgttggcttcttcaacctccaatggaatggtatattttaacttttatgccgtaaagtttttcatccttttctcaattcatcaattattctatggggaacaaccgaaggggctgtttggggggcttgatatgagatgagatgagttgagttttaaacccaactcagtgtttggggccccaagtttctacctcaccgatttattatatccactcaccatgacttgaaaacagtgatttaatatcgccaacttgcacgcttccttctggccgtcttttactcttccctcacaacatttcttgtccctctcatctctctcaaactctagcagctccttcccttcaaaccatcaaattttcctttttcaaagctttctccatttggattttcatctttgatcttccatggaagtgtttttccgtcactttgtttttagatttcacgttttacctcgattattttcttctaagatttgttgatgttcaaagaaaagtgcaataacctcagtgccaacaatgaaggtattgattgcttggttagtacgagctttatgcatggaatcaaatgaaatcagtattggccttacaagccgccttgcagatctcagctccgccttgtaagccaaattgggtgataaattaatgaatgtgactatttttctttttgcttaaataggctcccattgcttcgattcctagtgaaacacaaaacaaatttcttcaacttctgcaatttgggttctttctgaaaacaaacaaaaaaacagagcaagggtttttgagttaaatttgtagaaatggtggaaatctttaaaagatgtttgaaaaatatgagaaatgaacaaaacccaaaaggggaatgggcattggaaagcgattgaagaaagaaaatgatggagaaataataatatgttgggtttaggctaaatagaaagggaagaagggagagactagtagtaatgaggtggaaactgtggatgaattgaattggtagggagaaacctatgcttaaaatggagcagagcagaatatgtgtggttattacgattgggagtatttttttttatcccaatacaaaaccatttttaaatggctaatgtgaaaaaggaatcaaaattatgctcctttttagttgatacttagttttttttttttttaagaaatagaaattttgtagaccattttagtgtacttaaaaaaggagaaaattgtacttcatattttattcaaacataagatatgtagaactactgaataaagaagttttttttttaaatagtggttataaaacttgcaccaaataccctgacatatgaacttaaccttgcaccctaaacacagacatataaattcaaacaaaacaactatacactcccaaacacaaacatatggaatccacatacatatgaactctccagaaatataaactccagacattctatatcaactgagctccccaaacaacccctaagtgtttatttgagagggttggtggatgggagacaaacctttaagtgacaaatttcctagtctttactttttttttaataagaagttgcattatgtggcttcgatgctgttttcacttaaccttctttgatttcttgggattttgatgccctttgtttgatagagagacagtcaagatggcttagctcctttttatcctttgtgactgcatgatccttcctgtgaggaaggatgttaggttgttatccctcaatcttgttaggtgtttctctagccattctttagtcttttcccctttgtggatgataaaagtttccaaaggggtcaagatttttcctggcagagtttacttggagaatcaacacccttgattgtgtcctaagagattcctattttcttttccttccacaatgatgcattatctgcaggaggcatcaaaaggatctgagtcatttgctatgggagtgccagtgtgtaaagtacctttgcgatcggtggcagagatcttttgggtttagtgaggctcacaatagaggatgagtgttctttgttggaagagtcagttttgcactcttcctttagggagaagtatatggggttgtgaaaagcaagattccttgatatttagtgagtattttgttggagcgtaatagtaaaagttttagaaacctagagaagtttgggagttgatgtggtttaatgctttcttttggattgggtcttttatgtagttagtgttggactcctattttggtttaggcatgaaaactcatttgttgcgagttgaaatttatagatatatttttgtgttgatatcattggcatgttctgcttctatctcccagagcaaattggtatttgaaacccgttttggttgtgatgcctatatgtgaatatttaaaggtctagttgtatagatgtcaaatatgattatggatcatgattgatgaggattaatttactttctaataagttcttatccaaaagaatttactttctaataagtataaggatggtgagattatggaagcagtaggagtcgcctcttcagggaactagtgattacaaacaagggaacccagcacccagggatctttactactggaacttattcacccccatctttgtttatttccctttctctcttgatttttgttgtagtgtccttgatgattttaattgctttcaacttctcttgaacaaaaatctacccagaaatgtgcatgtatgtttcaactttttttttcttaatccattcatgtgttcattttctatgtggagttgttctctgttcatttaattgtttattttatatgtatatatatatatatattttataacaagaaccaactttcccttaaattaacgaaaatgaataaatgttcaagggatacaaactcccaaagacgtgaaaaatgaaaaaaaaaatataaaatacaagcaataagtacaagcatgtaaagagtagctaggaaaatagataaacatttaaagaacaaaaaactttcccagtatcttcgtttgaatgacttagaagctttgctaatgaatggtgaaactatgaataaggcattaacattttctatttggaatgcaagtctgctcttttccaacaagttgttctcattgacagctgctgataaaagttcaaggagtcggaaactcaag

SEQ ID NO: 8000 - DNA, 1512 bp, Cucumis sativus
  Intron number 26 from transcript Cucsa.219010.1 (locus Cuc sa.219010) derived from phytozome v7.0 (chr-ID scaffold016 58; pos 888664 to 890175)
tgcataaacagtttaggggtcaccaggtatttgtgacattacttgcttctattgcgttgattttgtattgtaatgtatcctgagcttgtgcaaacattttgaaatgtgtatttgtctatgtagttagcttctatacaaactcaagaattaatggttgtagttctatgacagcagaaataaagcatctattttacatatggcttagaatattatgtagaagtgagatagagatactcaaaatgaagttgtggaatggaaataatcgttctgactgctaataatggttcaaaatttgttatttgctaggccttttttcttttgattggaacgctttctcatagtttgctctccctttgtggtcgtcatttttcctttaagttatttgtttcaagttttaagtcttctttatcatggatatagttgttgctttgttggatacagattttttttatcccttcttaaatggtttctttaaacttgaggagaatatattatattcattctcacgtcactttcacaatagattttcatatttgtagattattgaagaagtatagccatcaaggttagagtatgaaataaagcctagagtaaggattttattttatttctgcttcatggatatgatgagggggtgctaagggggtgtcaacttagttgagatgtctgggtgcatccgctgatcctccccccattgctctgtgtataacccttttgtatttgaacttttgtctctctatttttcaatattaatgatattacgacttgtttcctttttttaaaaaaagtataaaataaatcgggttccatctcaaaaccaattggcaatgagaggagtagcccatctatcttatatggagtatgagtccccttagtttttccaatgtgggactctcaacttctccaacaaaatctcagtctctagtttttcttttgcttgtctagacttttttgttactctctttgtataattctcttgtacattgagttcttattattaataaagaagtttgtgtctgtttcaaagaaatctcagtctctggtttcagatagggtggtggttccatgtggaatcaacaaaagaagtcggctagatgattgaaactagtcctacttcatcatatttatggaagaatgatcttttttagagataaaataaaggaaagtagaaaattttatagtcaaaataggaaataaacatttgtcaatacaataactaaactcgccatccattgccatgtggagaaataaaaaacccttatgctgccccttttacaccttgtcttaaatattgtgatagtcctatcttttatatgcaatggcacaatgaactttatgttcttttgtcctcttcatgaggttccaagattttcagacttgcatgctttgaggttgtaattttatcatcattctgccttattgtagatattgtgaatccaatctcctcttttctcctcgggatgccaaattgtacatatcttttgaaatttcagtttcttgtgtaggttaacg

SEQ ID NO: 8001 - DNA, 962 bp, Cucumis sativus
  Intron number 1 from transcript Cucsa.067140.1 (locus Cucs a.067140) derived from phytozome v7.0 (chr-ID scaffold0069 6; pos 1538120 to 1539081 reverse strand)
ccggaggaaggatttcctttgagagagtggcggaggtgagaaaactgttgaactacttggggattgtaagattgttggtataagattttttggaatcaaaatctggtagttgttagctcttactgagatgatcaaatccttgtgtttatgaactgaattaaatttttgcgatcatccgatggatgaaactatgcgtaatttttgtgcattcaagaaattctaaccctcttttacttactgcttttgtgtcaaaagcttacctctcaggttgataatcattttgggtcgtttcatttggttttttggttttgaaaattgcttggtctaattgaaagagttgaatccaaatagtcaaattctaaaaataaaaacagattttaagaaactatttttcttcaagaacttggctgtattttaaatagtgagcactaaaaaagtgttcactatttaaaaacttagcttaattttcaaaatctaagaatgaaattattaccaaatcgatcttagacttttagtttttggattctgaaaattatacttactttcttagaattttttttaccgtggttttcatttttctgaactaaatactagaattattagtaaaatttcaaaaactaaaaacaacttttccaattttcaaaattgtggtttggttttgaaacactcctaagaggtggtagcaattctatgtttaacttttataaaccaaaaactagatgactatcaaacaaattttaagacttgtttgaaccaactttctaagtgcttgaaaactccttttttttatacttaaaaattgaagcacttgaaaagtcaacctaaactatccatatgtttagtattaccgtggttctcttctaataagttaccacttaatctaaaatcttgagttgatgggttatgataaatttaattatataatggtttaacgtgaatcgtagctgtgaatggcagattga

SEQ ID NO: 8002 - DNA, 2281 bp, Cucumis sativus
  Intron number 5 from transcript Cucsa.322070.4 (locus Cucs a.322070) derived from phytozome v7.0 (chr-ID scaffold0308 0; pos 1901883 to 1904163 reverse strand)
ctttgttgtggactacaatatcaagtctttgcaaggtcttctgcttcctccattctttttcttataaaaactttcttctgattttcaattccctaaattcattctacttttttgaaacttcaacctcagtataaatgaaaagtcagtgtactgtttctcttttcgtactagaaaggaaacatttcaatgttaacggaaaaaaaaatcaaagacaaaaacacccaagtagcgcagacaacgactgaccaaaccagaaaaggaagacctcccaagaaatactgaaggttagatagaacaagaaggaacaagacgtccttgggagaaacaaataacaagaaagcaaggctgtctaaccaaagagagaatctaaatcgaatccatcaatattcctctttgacctctgtacttaaaaattcaacgtttctttttcatgtcttgaaaaggaaaccacaaggccttaatgttatgtagaaactaaaaataaacattcaactataagatgtaaactaaatttaacagagaagatgaactcagtcctattcaatcaaagaaacgtgaactagttgctgagtttttcttgtccccaataatgggggggttgatattcaacttcctggtcgaaaaactctctaattgttcaatttgtctcagtgatagttgactagattctagagtctcaagcgttcatcttcttggagaaagagaaaatcttcttcaggcgtggcccattcatgttgattctactggtccttatttgggcctatatgaagtccttcggtcagttgatttcaattggtgaggatcatgtataaccttgactctttgttggaaaccacacacacacaaaaagaagaaaaaaaacaatttatactcctaaacttttagggttgtatcaattattacttcaaaccaataattgtatcaactcaaacactaaattttaccagtgaattcagtttagaccctatgttagtgacttaataactgtttttgcttgattctattaaaatcaactaaaaaccaccaaagtaaaaagcacgttcactcctgttctaactttttgattgtttaaaaaaatttggcttcccaaaattctagttaagtagcaagaaaaatattcacattggaagatgaaaatccacttgcacaactaaattaaatgtgcgtttaaaaataatcactatattcatttatgttcaacatctctcgaatattttgttgatttctgcatttaaaagtagaccttatacatgccctcgacttataaattaacagctttaaatgaaatcttagtggagggtctaaattggttcatttgcaaaaataatttaaggttttacttatacaataatgattaattcgaggctttaattgacgtttaggatatatatttccctctctgccccggttgaactatatacaaatccacattgaatattgatattaacgaatgaaattgatgttatatctgtaacaacttgatttacctcattttgtgttgtcccttgctgcagtttccgggcgatgacgttttgtttattgtatagtctaatatgcatcacctatgagttcagctctatgcttgtagaaatgagatgagactattgatttgtctttgcattttccctatgctaatcttttttgttattaaattacaaatcgatgctttaaactcttgacagtctcgatttttagtccccaaactttatcaagtttcattcacattcttgagcttttagttttgtttccacctagttcttgtcattgacatcattattcaaatttttgtcatgacacattgtttgtattaatgagtggtgatttggcccaatagttggataaaataagggcacgtgagctacacaaatacgaaatttagtatttggttgctcatagtgtccaaccaactaactttttcatgctacgtgctctacattgtgtcaaattatcactcatttgtttgattaatgtgcgtctgactaaaagtaacagtgttaagctaggactaatgtagagccaacatcaaaacttcgatgatgttattggaacttcttgaagattggggactaagattgtgataatcatcaaaagtttgagcagtttaatttgtaatttgaccaaagaaaaataacttcatttggtcctttctttgaaaatttgattccgtcgttgtgtaagaaatctgcttttggtaggtatgtccaatgtttttttttctttctattgaaacgtcctctttgctgcaggtgccgccgagatcaaatagcccataacgaaagga

SEQ ID NO: 8003 - DNA, 1117 bp, Cucumis sativus
  Intron number 2 from transcript Cucsa.260320.2 (locus Cucs a.260320) derived from phytozome v7.0 (chr-ID scaffold0222 9; pos 6691394 to 6692510)
tcttcaagtggggagtgccctttctttttgagaaggtagttccccttaatttacatagccttttttcctgtttatatcctatatttcagttgaactgcagttggtttaatctgtccctgttacttgtatttagatttccctctttgttctcataatgtttgatatacttgcaaacttgtgcaactaagtttgcttgaatataaaataaccatatctgcaacttgatatatataaccattgtcatatttgcaaatcttaatgttggttcgtgataagagcattcttactggaaatagaaagtaattagtatttgattaccttagctctaaagcatcaaatcatcttaaagaatgcaaatttgtagagctgattttaatctttttgacttttggagggtaggactgggaggatgaggtcgttttcccctcttataaacatctttcttttcctttttaaaaagaaatgtaattattaaaccaccaattcacccaaaagcttaagctagtggttgaaggcaaatttaatatatcaccaacagtaatattacatgaattgctttctgcactatgccagattggctgaaaacgagttgttgcttccaaactactgttgatacggcaccattttgatttgaataaaaaagtaataagcaagagtgttgtaaaatatgcctatacaacaaggatggtctatttcattgttgaagaggattttgtgcttgggggttctttagtattgtttgtaggtgcaaaattcatatacttcgaaatgggatttcatcgtgattattgtgtgtattattgggagaacttcggtacttgttcaaccgaggtctctagagctcaaactattctgattgcagatgcatgaccaaaattatgtgacaaaacaaacattttaatgtagtgaagatataatcagctaaacggtatattgtaatgagttttgaattttactgtatgattttgttcacttgtccagaatatgcatggcctttttatggtgtttttagtgatttctgccaattgaatctctctctctaacgtctgttcttcctatgatttatttgaccttttttttttaatcactgggttcatttcaggttatcatcccaatc

SEQ ID NO: 8004 - DNA, 2162 bp, Cucumis sativus
  Intron number 6 from transcript Cucsa.088030.3 (locus Cucs a.088030) derived from phytozome v7.0 (chr-ID scaffold0088 8; pos 463162 to 465323)
acaaggaggcttcttgaattggaatcttcttcctggtgagataatatgttgcaatgttttctttctatatcatctatttcagtcttattggcagtcactgccttgtttaaatccacttgaatatggtagattgttcagctaagtttgctttcttcttagacccctttggtgactattcgatcttaaagctaagtttgctttcttcttagaccccctttggtgactattcgatcttacgtagttaagcctagaaacactaattccacctctaaatagtttgttatttacttgttactaatttttaaagaagatcaaaccaaattttgaaaactaaaaaataccgtttttaaaacttgtttttattttaagaatttggttaagaattcgactcttttgcttaaaaaaaatgcaaactattacaagaaattgagaggaattacttattttaaaaaataaaaacaaaaaactaaagccccatttgtaccatttcattttttgtttttaatttttagaaattaagcctattttatctcatagcatgtattatttttaagaacaagagttgaaaccttggctaaattctaaaaacaaaaacaagttttaaaaaactatttttgtttatttcaaatttttgtttagttttaaaaacactcttatgatatagccaacaaatatagccgacaaatgattattaaataaaacaaatgaatggaagtgagattcgtatgtttaattttaaaaaatcaaatagttatcaaacaaggccaaattgttacccaacgagaccttagtaaaccaaccaaaggctgtgcaccatatttacttctatctatattccttggcttagaagagcttcatctgcattcctcttatatcccctaaacccaagcaagaaagggactttatccaattggatcaaatggaaaacctcttccaaattagactctcccacataaattgtcatgaggttcttcataaaacacacagccaccttaattagttgtgattcatttaagaggaaaagtagattgagatattggaaagaaagggcttttttgccaagtagtgacatacaatgtactttccccttttgaaacttgtataaacctaatacctaatgcctaataccttattaatacatttctgttgaaaaatgatgcttttcttctttatattagtattctcgtttgatatcatttctaaataagattaaattaccaaatgggtctccatagtttaagcatagttttgtatgttttaaatcaatttagtccttaagatttggatttcttttcaatttaattcatttgacttttaaagttttgtattaacccttatgatttgattaaacctcaaaaagcatctctaaattgtctcttacctacttgaagatcccatttattttcttctatattttacttagttctaaactggattacaatcaactaataatttaaccaaaatgttaatataaccatgaggaatgatttgtgaggtttaaatgaacaaaccatggatatgctggttggtttacctaaaataaacatctaccattctcctctgctaacaccttgttataaaggaaatacaattttgtgtgactacttctcaacaagcaacttgaagagaaaaatgtgctctaacttctcaacaagcatggtcatccctaattcgatgtgaggaaaatgaagatcatgatacagatgatcactacgctagggttacaatagacatagttatccctaccgtaatatgttataaaatgtgctttgacgtaagcagaaaatcagctagattttatactgtttgtaaaggacgagaggtcgtcaatcgtcataaaagcactattcaaatggtttagcttacaaaaatatataaaaaaaaaattataggtgtcaattaagtataaacttttacgagtgtgaattacattttgaccctcgagatttagtttttgtctagtccgtccaagtggtgacagtgaaaaaaagtggtaggtcaatttctaaatattctgaagctgtgtagctgactagatgactttacaactaatttggtgataggattttttggtgtcatgtgaattcttataaatgattttatgataagaatcaaactttgtttggaactgtttactaattatatggctgatattatggcag

SEQ ID NO: 8005 - DNA, 678 bp, Cucumis sativus
  Intron number 7 from transcript Cucsa.299560.7 (locus Cucs a.299560) derived from phytozome v7.0 (chr-ID scaffold0292 0; pos 112572 to 113249)
aaggatctactcggaggtaaaatataaatcgaactcatgtttgctccaatttttttgctctttctttatttatttttgttggagttggtttaggggagttgtcgtattttcgtgcccccacaatttttattccgtgcatgagtacttgtttactgtttaggctgcacaagaaggcagaagtttgtgttatcagctaatagttcatatcatcgagatttgttgtataaagctttcaagttcactttttcaacgaccttactcttacttgaaccagaagattagcttttgcaattgcccttttaagtctaagagccattatccctaaactatagtttacaagcagtttatgaaattttatcttttattcttccacatagaacctgctaatgcaatctatatttgtttacaatccaagtattaggccttgataattgacgttaatcttgatttacagggcatcatagcttaactacaatctttattttttgaattttattatgtaggttgaagattctacgtatcattatttattattgtcatttcacatagaagttatgttttcttttctttctttttcttttggagggagggtatcggttttataataaactgaatcatctgcaactacatcattttttagcaggcccgatactgagaaaactaaacgtgaggaaccaa

SEQ ID NO: 8006 - DNA, 2667 bp, Cucumis sativus
  Intron number 1 from transcript Cucsa.004670.1 (locus Cucs a.004670) derived from phytozome v7.0 (chr-ID scaffold0005 3; pos 188487 to 191153)
tggcgtccgacttgtcggaccgaagcaagaaatagatagatctacgaagatttggcgcagtgaggtattgtattgtgtttttggaaatctgtatctgtactgcctgttttctcttctgtaaatcgtcataaaaatctgggtaggaagtaaatcttcctttcctgatacatttttacatctttattttgccgtttagaccgtttagattaaggaaacatcatacctactgcaactattttccgtctgattattgattgacgacgattgatttgaatttgtcttctcattatcatcagtctgatttgcatctcgatgtcgacggcctagaaatctacgccggtcgttgttaattttacagcgtaatactgattagtgaagtgattatcaaaatctttccttattgatttacataattttttttttaatggattttcactgtttaatttgacgaactataattgtgaatgtagataaattttatgtactgtgaagggttaaatttttggattgaacgaaccattacttaactgggtagaaattattacaattgttgttcttgcgtggagagctaaaaaaatctctattgggttttcatttaatttattacaaaacctgatggatttgaaaacttccgtgaatttaattaggattaattggaatggattttgttaataaatcgaaaatacattctcctaatcgcatttacaaaactaaaccaaaactttggtcattaacaagtaaaagtttatcatctatgctatcaatatctctgtagtgatttttttgtttgatatgttttctatccattaagttttctcttattttcctgatggatggtgtaatgtacctttatttatataataaccaaaaataaatgtttttaattatatcaagtggatgggtgctgttatatctaatcaaattatttacttagatgacaaaatcatgattatttagattaattaattgaagcagttgttttcaaattaggtcacaaatgaagtgtagttcaatcataaataaataaataatcatgagggagggaatctcgatgactcacaaacacgagtgttgatgataagttaaagaacaaaacttatccatagttttcttgggcttttggaagggacttagagtgggtaattggatggtagaatagaatcttcaaacttataaagtaagcaactaaaccttcttggattctattgcttcaatctaattatttttgggttaatagaatttcaaccctataattattggactagaaaatacagttaattgaatgtaatcatgtaacattttgaacttttaatttagcaatcatcttatttagtacatatttgctttccatgtcaaattttgaaaactaaaaagttagttttcaaaatttgacttgaatttaaaaattaactaaacaaaaataccccagttgacaaaaagtttataattttaatttagaatcaatgaataaatggttaacaacaaaacttttatacttatcgattaaaagaccatttgatcctaaagaaaaacctgataaagatcaaaatttctaactcaacaatgatccatgcttgcaaaacttaccgtactaaaatttctaaaatttcaaacaaaacttaaccaatatcatctcacaatagcgtatatggtcgtggtctatttcaaaatctatctaaaccaaaccaattaacatttttataaactaatcctacatttcaaatcgacaagtttttgtactgtcaatttcactttacacttttttagtataaatatgttatatagataagaaaatgtagtaatagtgtcatcttatggcatataaatatctaaaatacagactgaattaaaactcatcaaaattcaatcaaagattatcacataatccctgaattaaaactcatcaaaattcaatcaaagattatcacataatccacagttttcttaaagaacaaaactggatgtaacaaggttgaaatgggacaacacttaatagcacacagatattattttagtgatcataatattatgacaataaagcccacagaacctcagtaaccaattggcggttttggaagaattaagcttgaaattagttaactctacactttaatggctaaattaaagtcctaccaccaccatattttcaactctcaagtcacatccaaggagctacgactacgaccgagaatcctatgtaatcataaatatttggaagaaataaaaaagaagaatacattttatgtcaaacacttcaacactttcgggtggattttatggtttcttatacccttcaattgtgagcaaaattttaaagacgaaagacactccttaatgctagtaaaacaattgtacatcattaataagaactcaacaatatgcatactaaaatgatttaagatctcaggcattgaaaatgttataatcctattgtaatggtgaataaactacttgccagaacaagcataaatcgacttgccataaaatatgtgttaatgacctcatggttctgaggctcgaatttccatcttccatccctactgtacttataaagcgtgaataaaatacatgagagtttgtagattgaatgtaatctactgatttcaataactaagaaatttattataagcagtggaggagaaggaagcacgttgcctgtgtaaaagc

SEQ ID NO: 8007 - DNA, 3003 bp, Cucumis sativus; identical to SEQ ID NO: 7917
  Intron number 1 from transcript Cucsa.042190.1 (locus Cucs a.042190) derived from phytozome v7.0 (chr-ID scaffold0054 0; pos 685870 to 688872 reverse strand)

SEQ ID NO: 8008 - DNA, 1804 bp, Cucumis sativus
  Intron number 1 from transcript Cucsa.397610.1 (locus Cucs a.397610) derived from phytozome v7.0 (chr-ID scaffold0415 8; pos 28201 to 30004 reverse strand)
acttccgccgtagaaggataccagaaatttcggtggtaagttcagctcttgctttctttgatttggagttatatatgtatgagcctgtatgtatatgttagacgttacacactgaggccatcggatggaaggaatgaaggaaggatttcatttggtttgatgcggagaaggctgtgagatggatagagagtttgagtttctcataactacaactagtggatatgttatcaaagtttaactgtacttgtttgccaaaggttcgaccaacgaatctcatacatatgtccaaatccaaatttagtttgtgggagacctgacttagttgtgtgtaagcgttttggggtgtgattttagtcttgccttattcatatgcaccatttaattccaaacatgtttgtataatcttgaggattttactcttactctatccatgaggtatctggtctcggatatttatattgtgaatgaggagggagggtggttcgggtaaggactatgaatttatcattttcctttttgttatgaactaatctccagtgtttgatgtcattagaaattttggatggtattccagtgggtagttctagttcaagtctcattcttatcttattgttctcctcttgagaagtttttagtcagtttgttgagctgattagttcaaaaggaaagcctaatccaacatgtgtaatcggtcaaagcatttatagaagtgaaacattttctcagtgccagtcttttataaaatttgccctatttgtcctaaactttatggttttgatttattctaaagattgaaattgtagtacacagtgccttccataccatacacaaaaagagaaaaagaaaactaaactaagagaggaataatatgaaaagctagagaaaacctggagaaaagggagacaacacaattggcaatgatacggccttacttgaacaggatctgttccatctacatccttgagttataaggagaaaagaacacaattggtcgtgatttgggcttagtttttcttttccttgtctcttcatgtgagagtttgcatgccctaaccatttaatccttttcattgcatcaatgagaaattgtttcttgttttttcaaaagatatatatttgccatgtatggtccatcttccatgctgtcatattcctctaaatatggcttttgcatgtactgtgagaccattgcttgtttcatataaaaaaggaggaaagaaaaaagtctcatgagattgtctataacacttaacccccactgattaattcagtgatcaatgaagcatactaaaaatcttaatgtctacaattcatgggttcaaatcacattggccaacttaattagaacataagactttacgagattcctgatgctaaacgttggagggtcaagtattctggttgagatgtgtgcaagcgactcaaatactcacgagttatgattaactaaaaaggatattgttcctgacattttctgccacaaatggtcatttgtatgtagtaaattttctacctatggaattcttgcttctctctctttaagattttttctctcttttgacccaatgcatatcatagtcaactgaggctccttcaacctcttggttttgttgggattctctctcttggcctatagtcactttttatcaatatacttattagcttcatatgttgaataggtctggctttctaagtcattttgtggaaatcattttattgttgaatttgattcttcttatttttaagtttagaagatatttccattgttgacagctcttcagtggagggaggttgattgtaaaag

SEQ ID NO: 8009 - DNA, 6070 bp, Cucumis sativus
  Intron number 3 from transcript Cucsa.088690.1 (locus Cucs a.088690) derived from phytozome v7.0 (chr-ID scaffold0088 8; pos 968264 to 974333 reverse strand)
atttattagtccgaacatactttgatccgaacgaggtaagggctagttaataaatctgaagacttttttttctttatgcaggttactagttgatttacttctttatttgtttttataagaaccaaatttattgatgtatgaaattataaattatgggggaagctgagatctaaattcgacaaaaaggatgttactagttcatgtacatctttatttatttttataagaaacaaattaatggatctatgaaattataaaagataggggaagctcatatctaatttggacaaaaaggaaggggggatactatagttacgaaaaaggggaggtcatttataccaagcaacaggcataaaagaccttttttttttttatatataatgaaaaggaaaaagctaaaaattacaagagaaaaagtagaaaacataattgcaaatcaaaataaaggcattccaatttaaccctaaattctgaatcaatcgctctgcatacagtttaggaagggaacccaagaaaaaaaaattcttgagtcgacgaatggaaccaatttgaccacacacgtgacttctcttgaaatagtcttttatcatgtttaaaatgtaacttagggggcatagattttactgcatgaacccaaaacaataatttgatttttaaattgttttgttaatcttattcaatttcttgtcattagaagttatttggttaaagcatcttttgaagcccttcagtgatctttcagtgggtgaagcaattttgggcgttggttcatcatttttcacttttagtgggtgtttaataacgccaatagttttcagtttggttgggcattttggaagttttgctttggaagaattcttggagcctttcaacattagttgcatccttggtttttaggtctgagatcgcttcgagttttgtcttctcttggattttcttttggtctttggtttttccttggtccccctcccctctttttggcttctctatttttttcattgtataattctcttgtacttttgagttttacatcaataaagaagcttgtctctgattcaaaaaaaaaagttgttgcctatccccaaaaggtaaccccaccgttgctctccattgacagggcttgaagtcgaagaccaaccacacaaaagcgatccttgcaattgagtgggatattttttttttttgggggggggggggggaggggggagggagaggaatgataggtttttttttttggtgaaaggaaacgacctcatttattgatatccaaagagacaaaagctcatagtacaagagtgttatacaacgagacaattctcgagccttgttttgttagttaagaagttggggaatgacatttttgcatggattataggacactaaatcaagtaaggattgatgataagttctccatttgagatattgaagaactcctcagtaaattaaagatgctttctctaggcttttcacctctccaattgcaaggatgctactatttcacattgctggaaactagatcgtgagtcttgggacctatgcatgagacgtcatcttaatgaaacaaaagttattgagtgagttgtttatccactttgtgtgatccctccacaaggcccttggttgcaaattcttggtaatggaacctagacacatggagggttttactaccaaatcgctatgccaatatctaggcatgaccacaaatttttactactcatgaaaaatttttggtcatgccttttgggttaacgaacgcattggtgactttccaatctttgataaataagttctttaattggaacatcaaactttgtctctaaagattcaacatagtgtgttgaggtggtgcaaaaggaagtacaaccttttgctgatgctgttattttgaaagaatttttcgttcctcttctgggtttggacttttggcaagataactttgagatcaccggttgcatctttttgctagtctctagatccgaatggtttccttttgagagagttatttcgttatgctttgtatttagatctcttcgttttggttctgttttaacttcatttactctgttggatttcgcctttttagcttgttctttgcatttgtttgttttggtcgtttccccttgtatttgccgagatcatctttgggcagcttgtttggatatttttgtcttttcttattttgttcttagtataattctcttgtactttgagcattagtctcattttcctttattaataaagaggcttgtctctgttttagaaataaagataaataagttctttaagcctttcatgaggcggctcattcatgtatttttttttatcgcatattggtatgtttctcagtagtagtagttctaattgttgtttttcttttgaataaaaaacgacaactttcattgagaaaaaaaatgaaagaatacacgatagcacaaaaatacaagcccacaaaaataggacaactctatctacaagaggggactccactcatgagaaatattgctcctagaataattacaataggtcttcaaaattaaaaccgacggagagacttggaaacaatcaagggaacaaaatttcttagggtctttccactcccctaaaatccattctgctcaccccacaagacccataggttgcaaacatttctactatccacaaagagaacacattctcccttaaaggcagattgaggaggaacttctcgatcatatcactagtacctgatgagcacacatcatcccaaatgtctggaggaggtctcagacactactaaaaacatcagtgtcggagaacatggtccaagtcttccttcgcctttcgacaaacaatacaacagaagggcccgacaagcaaaggcatcttcctcgtaagctgacccaatgtgttagcacaaccatacagaacttgtcaagtaaagaacctcacctttttagggatcttaatcctccaaatcactgagaagataggcacacctaagggggaaggtcgaccagaaattgaaagaaagacttgcatgagaaatgttccaatggattgaggctctagactctaacatcctttctccctcttttaaaggggtgggcctcgagtaaagaaagaaaagcagacacctccttagcttccctattggaaagagagtgacagaacccaaaagaaatgaaatagaacccacagaccacacaaagaagtcttcaattagatgatttttaagagatgaaaaatggtacaagtgttgaaacagagtgcaaattgtatgttgcttagatatattacacatgaagtcgcttgtgagtggttgacaatgtcctgtctgattgcaaagttatttgcaaaatattagaaatgcattttctgtcaatctagaacataatatcttaggccaatgggtatcaagccagggggttgaagctgataacaacaagattaagatgataatggagtggacatgtcccaagaatgtaattgaacttagaggatttcttgggctcccttaactcgcctattgcacaaggttgcttttgtgtagaatgatgattcaattcaagcttttgaagaattgaaacgagctacgatgacaattccaatgttagctctctcttgtttttccctttctttattatagaaatcgatgctttagaagttgggttggtagctgtgttgactcaagtatccaagcgaattgtgtattttagtctaactttgtcttcaagggatcaagctaaatcaatttatgatggggaaagctcatggctatggtatttggccattaagaaatggagacattacatggaaagaaaccaaaacggttcacttcatgtttcccgttcttaaatggagaaattaccttctaggcaacaaattcatcgtgatttctgatcaataggctttgaaaatttatttgaacagtcaaaggtacaacctcaatttcagagatggttgaccaagctacttggttataatctcaaaatacgatactagtcgggactacaaaacaaagccatatacacttcgtttcaattgccaccagcaattttttacactttaacaaacacaactttgttagatgtagaagtggtgctcaagaaggttgagagtgacgaaggtttgcaaaagatgattcatacgttgaaaaaagacccaaataacaagcccaagtttcatctacagcaggcaaggttgatgtacaatgaccgattagtattattgtctcattcatcaacacttattccaacattattccacactttccgacattactccacacttcccatgatttcatcttgggaggacgcttagggtttctatgaatgtataaaaggtaacatgggaggtatattgggctggaatgttaacaggtgtgaaaaaagtatgttgatatttgtattattttcgaatgaagcaaaacagagtccctatgtctagggtgtttgtcgcaatcacttcccaaactaaatttcggagtaactttccatggattttattgaaggacaaccaaaattggctggctgtgatttgattatggtagtagtctattgacttagtaagtatgctcatttcacattactcagtcatccttattccatcaccctcattgggccaaacaagtaaaggtggttcatcttcatgggatacccaagcatatagtttcagatagagacaaaatcttccagagtaatttttggaaggaattgtttgctatgcatggtagtgttaaaggggagaacaatcttccaccctcaaatcgatggcaaagagagagggtgaatagatgcttagaaatatatttacattgtttctggaatgaacaacccaaaatgtggagcggataccgggctgaattctggtgcagtactaccttctacagttcacgaacatctacctgagttgactgaagaatttgagttgcaagtaacacttgagttgattctaggaattttttggaatggggagttggctacgaatgaacgggtgatcaagtggaagagcttatgtgacaatgaagctacatgggaaccgatacatttaatgaaccaacaatttccttctttttaaggtgatcttttgggggggagggggtattgtgagacccttgatcttttatacgttggtagaaggggcagtaaaggagcactggggacagagggtacgggggacataagctaagctgtgtggttagcagtggggaccaagggaggttgttataatggaatgttttctagtctgtgtgggggagaatttcggttgaggatgagaggagttggagaggacttctagctctcttgaatgtgttggagtctttcgggtcttttaacttacttttcaatgttgattgttaagattctgttcgtttgtctagtgctgtttgaataatatcgaatgcaatatatcatatattagagctgttgtttctttgtcagcttgcatattgttggaatttactgcatgcagtgaagtagatacctaacaaaatacaaagttacacaattacaaaaaagaactccaatttgaaagaacgaggggctaggggtaaccatttagtctttagtaaccaagacccaaaggttaggtcgtttgaagccatgtgaaataacgctcctgcttggtgtttacaggcttttccattcaagatttatgtttaaattggaatttctttatttttcctgcatagttcatatgtcatgtataatttgtttgttttatattctttaaaatttttgtttgttgattagtctcctacctatgttatagtagactggcctttgttgcttgatgtatgtctttttactatagtttggatatgatgaaggtgatatgggggtgtcatcctagatgagatgctcgggtgcacctcctgatcctaacacaatcttgtattttgagactttgtctgttttcattaattcaataaaaggtgtgtttccctttttaaaaaaaaatctgtcccaatttaccaaggtgctctacccacttgcgcacacataaatgtgatggctcattttattcttgagatgtttaaatagttattttggcaggcttatcaagattcaacaaaagagaaacgccgagc

SEQ ID NO: 8010 - DNA, 3471 bp, Cucumis sativus
  Intron number 3 from transcript Cucsa.178910.1 (locus Cucs a.178910) derived from phytozome v7.0 (chr-ID scaffold0122 7; pos 1323536 to 1327006)
ggctagtgggagcttggagaaacaccttttccgcagtaagttttgttctacgaatgaaataagcacttaactatacctaatcattacatttctggatttttcaagtgttataattttaatcaccaatgctgttgtatgaagagcatgaattgggtcaagttaggtacttaattagccgctttgtgtccactgtgtgattttagattatgctgttaaatttctttttggcaaacttgaatgctctgatcaatgaccaagtgctgaaatggttgtttgcatagtaattgatgcctttatctagtgtgctgcagagatcaagagtctgtttggtagtgaaatctggaaacataaatatttgaaaacatgggtttcaatgaaaatagagtggtatttcgtgttttcatacatgtgtttagaccttaacttaaacaattgtttccaatgtgtttgataatatatttttggtcgaaataccattttggtccccatacattgaagtttgttcgattttagcctctatactttcaataatccaattttagtttctatacttttaataaatcttaaatataatcatatttttactcaaaattgattaaataataataataattttcatgccagaaaatgaaatatgtgaacatgtttgcaaaacttatagtacaaagttatggttagctaatgagattttttttttaaaaagtcaacaataggttcttaaggtttattcaaatgattgaaactaaaattggacaatacaagaactaaaattgaacgaatttcaaagtatggggacccaaatggtattttaatatatattttaaaaccaaaaactagtagttacctactctattttaattactttatacatgtcttatgttaaaaaatttgtttaattatttatttataattcattacatgatagacaatacatatttaattaaaaaaaaaaacatattgagtttgtaacatgaaatactatatttctaaatgtttttatctctctttaatttaattcagccttttaaaatttaaaattcaaaatcttgatacacggaaaatataaaatgttttcagaattttcactgtttggtttacaaaatctaaccgaattcaaattgtttttcaaacacattttctgaacatagtgaatttgagaaacataaaaactgaatccagattgcctaccaaaatgaaggttgttttttgccttgctcggtaaaaccacccaatcttgatagattctccatgacattctattgagagaaatgcaagtttattatttcacaattaataatagaaaaaggttctatttttagagaagaaaaaggttctattatttgtggtagcagggggttgatttcagggaatagtaactgggaattaaacgaaatatggcattgaagcagcacatggtataaaagatgtcgggtattaagtgccgttgaagaagccaaggtgaaatgcagaaagttattgcactgtttaaagaagaaattcatacagtgctatcaaggattgagcaaaaaggtaagattaaggataaattgaagccgtagacaaagggtggtgctcatggcagaggttcctttgcatttgaaaagagacagtaagagtatgagcatctggtgacggttcaagcaatcttaatatccatgctctggtgtttcaattgtgtttgtgcaaacttgggttacctattttttgctgaaataacttaacagttgaaagtggttgcgttttgcttggatggtgaggtctgcacttggcgtcaatgggaagagacgtgaccactaattgagattgggaagaatttaagtcattgatcctgaagttgttccatccaacttaggaagggttgtgtgagaaatttgcccctgcaacaagagtaaaggatacgagtggtggacaagcagaaggggtactaaaatttgttttggatagtatgttaataggcttaaagaggaaatttgtactgagctttaagtgttaaagaccagtgagctgactgaaataatggagacggctgaatgattggaaacaaaaaatcaatctgggctaaaataagaaaggaatttagggttttggtttggtcggggattcagtatctttctccttcgggttctgcggtctttgtccaatagggagacgatggaggtgctctctcttctttccttgatcgatagttttgacattaggcttgagaggaaggttgttgggtgtgaagtcctttccctttggatgacttcttttgtaggaaaaccttgatcacctacttcaggaatgtcaatttgctagatctatgtggagtgacttctttctgaagtttgattttgcccttgcttgtcagatggatgtttgttagatgattagagagttcctccttcatctacctttcaaagagaaagagaggcctttttctttgggatgctagagtgcacacaattttgttggacttttgggagggagaaacaatagattgtttcgtgttgtggagagagatcctaataaggtttggtcccttgtgagatttcacgtctcctttgggtttttgtcttgaagtttttttttgtagttattcactaggaaatattcttcttagttagaagctctttctttgtttaataattgtttttattacttcattttagttatcatggagctttttactgacattatatattgatacaattgaaagtagagacaaagagcacacatcgatttatgtggaaactcgagtaccgagagaaaaaccacgatattttgttcttattattttctaatcaatttacaataggtacaatgagggagaataaatagaatacacaatggaataataaaaggaaaacatttaggaattaggaaaaatattcccataatctttccataaatactgtaagggcgaagcctactaattctaacactcctcttcaagttgggacgtaaatatcaatgagacccaacttactaacacaaaagtcgaagtttggtctgataagctccttggtcataatatcagcaacctgttgactcgaagggatgtacataatgcatatgctcccactgtcaagtctttcgttgatgaaatgccgatcaatctcaacacgtttagttctatcatattgaacagagttgttagcaatactaatagcggctttattatcacaaaaaatcttcaatggtgtctcacattcctgatgatgatcatacaggattttttggagccaatttttctcacatattcctaaaccctaaataaagactaagaaattaaaataaaggacaaaagactaataaataaagcacttttgaatatgacctttacgtgtttcagttgaaataaatacttttgcagattgctagataccgttcaatctgagaaacttgcatgttgattaattctcatttccctaattgttcttttttacggtgttaggagtgggtagttcactgagttgggcgagaagaata

SEQ ID NO: 8011 - DNA, 1839 bp, Cucumis sativus
  Intron number 5 from transcript Cucsa.036410.1 (locus Cucs a.036410) derived from phytozome v7.0 (chr-ID scaffold0046 5; pos 11779 to 13617 reverse strand)
tcagaattagggaattgctcacagttgcagggaatgtaagtatttaccgcaactgctagtcaaatgtgtcatgtcatgcttattgttttttttatttcattaagtattcctctttgattcaccatttttaggtcagatttattttttttgcaccaaatgccagtttgggctttgttggatctgataaatgtttgagatggtggagttccataaagattctttttgaagaaagaacgtcaatgcccattttgggactatgccacaaattttctggcctttcccactctttgtgatacagaatctttcttccatccctccaagtgacttctgaaatcaatgccttcagcccaaaatattatttcttctcttttagtttaggagattagatacctttgctagattttggaatgatgcatccattcaaataaagttagccttcctcccttagaaaagattgtattcttgcacttgtgcagccttctatagacccttccaacaactggattgtaggaatctcaatcatgcacagcggaaaacagaactaaatcactctaattgcagctaaacttaattagaaattaacattcattactaccctaattaaaatgaaattaggtttaatgaaatgcatatccttgaagctccagttcacttgaattctctgcacgacctcgaacccagatctccactagtgttgacctgctattctctggacttagaaccgtgttgtgggatctgataggtgaaggatttgagagagagatgaacggaaatttggaggttggacttcgggttgatggttgggagagaattatgttggaactcaatcctccaacacagatcgtatagaatatgaaatcactatattgatagtaataggaaatacaatatagaaatcgaattgaatatgaagatcaattcgatgaagaaaatgaaactctcactctgttattctctctcaagaatatacagaaatgatttcctccacaaaatgctcaatgcctttctctctcttccactttctctttatatcttcccttacactcattgtcatcctagtcagttacatattaactaactcactctcccgcctattttgtatcttatttcttttcctactataatggtggattattggtggtctaacaaattcttttgtgaaattaacttcaaggaaaaaaaattttaagtggcaaaagtttttccacatttgaaaaaaaagtctttaatagcttcgggatcttagtttattgaattcaagatcatagtgttcaatttcactaataatttctcaataacaagtttattgaatagaatataattttaaactacaaactacgagttaggacataaattccaacatggatttcataaatccaacttttttggatttcctctcatgggacaagtactccaaaggccagacaccaatgaggctgtatttgcttcaagatgaatagtatcgccttcatagtaattttcttttattttgggagaaggcagtagcaaaagtattatccttcaaataatatcactatcaactttttatctgttctgtttattacttcgtctgggggacaggggttagaagtttttgctcaattaaaggtgtttctttcacaaggtctataacatcatatcttttttcttgtaatttacaagttgattttatgttcacattaggtccccatgaaactctctcttgtgataacagttttacaatcccccatccctgtcatgtttttatatgtgttatacatgctcataaaattaaacgagttgcaatttttactatcttcctcaggttcctgcagggtaattactttagtgggtccattc

SEQ ID NO: 8012 - DNA, 1960 bp, Cucumis sativus
  Intron number 1 from transcript Cucsa.079370.1 (locus Cucs a.079370) derived from phytozome v7.0 (chr-ID scaffold0079 3; pos 2048296 to 2050255 reverse strand)
gtaagcagttcgccgccgaggagatttcggctcaggtatttcttcttctttcttccctctctttcgttgaaattttgcccgttgatacaatactctctacatgtgatctgaaattgaattgaaatttgttgggttctttgatgattagtgtgatcataacttagaagcaccgagaattttgtaatgttcaagaaaatgaatattcttaaatatttaaccacttttattcattccacttcgtaatatgcaacgtcagcttgaaataagttctcttcttttttgttttgaaaccatcatttaatattaaaattttcctgaaattagttatataataataatagttttggtattatatgattatgctttcaaacggtaatagataacaaataaaaaaaaacagaaagttagaaagttttttaatataaacaataaacgagctgcctaagaactattgagagttttatagaataaaatggagcattaagaatatagatagtaaaattatttagactttcgttttgtttgttaaaatataattttgtttcacttcattccattttagtttttgtattcttaaatgtccaagtttagtcaatatttatcatgtgaatatgttttcaaaatctagaatgaaaatgctatattttacctttacatatcttacaataaaaatgctaatactttttttttaagaaaagagttgaaaaaaataacaataacaagtctaccaaattaagttgaaggtttattgaaaaatataattatatgaattaaaattagacgtttcaaaaatataaagagggttgaatgtaggaatacagtgcttaaaacatattttgaattgctatgaatttattactaaacgtcaaacaacctttggtacgatatatatttgttaccagacattataacaacccctagtacgagtttaaaagctcaactttcgagcaaataagacctctgtttaatttcatggtcagacagtaagaaaatgtatttttctcttctttatttctttttttaaatattaattaatggaaagttagattagattcgttagaaaccattctcttttaagattctctttgataagaatatagtcatgcgttggcagtgaattatcgttaataaacatgttaggaaattgatggtgtctttagaaagggatggcattaggattgcgattcttatcttatggaaactattaagatatggtggattagttcaattctctagattttcttaaaattagtgaatagatgtaataaaaatatattaattggaatgtattttatttctttagatcgaagtttcaaaatatacatagactacttgtattttaaaaaaatcagctaaaaatttcaacaattaactgaaagatacaaaaaatgtgatagtaagaatggccacactctccaatattttagggtagaagttgaattgtgtggttgtgcaaaatcatttaactttgcagcaatccatatattgtagatgttgtagtaatagattatgatatgtttggataactaaaccaaaactttaaatgaacatgaattagaaaatcttttaacatttttgttgtactattttttaacctttgctattttgtagttcatttgtttagttttattttctatttttcttcaacacatccattattttacttctgttttaataataataattcttgatcttcaatatacaacaatttttaatgactggtagcatatttcatatgtggaatcatatgaaagaacagaagttctttccaaattatcaaaacaactttcattgatatatatttaggattttagttttagttctgaattctgtaaatagtgtgacatccatgaattcaatctgatgctaataccattatcgaaatgcaaccattccaattttgattctgctgtagacttaagattttgttggttggtataggttttaagaaagctggtgg

SEQ ID NO: 8013 - DNA, 1288 bp, Cucumis sativus
  Intron number 1 from transcript Cucsa.147660.1 (locus Cucs a.147660) derived from phytozome v7.0 (chr-ID scaffold0110 7; pos 90732 to 92019 reverse strand)
gccacagcgatctgtccgttgccaattctactaaggtaaggttggttttggttgttggttcttatgttgatgcggttggttgggggttttgattttttgttcggtgtttgagagaaattttgagatttggaatttgttgggggtgctcgattagggttttggattgttgaatttatgccttttttggttggtcttttcgaggggatggttattgatattgggttgtgttatgaaatcaatgtttggggatagggataaagatccgtgctgtgtccttttgggattgtggtgatgtaggtcccgtttgatatattcattttgatttttgttttatgaaaagtaacctaatgagtattgcttctatctattagtttctttgtgtggttgtatgctttttagttggagtgttttcaaaatccaagataagttttgaatactagacgaagttagttttttaaaatcttgtttttgttgttgacatttggttaagaattcaatatttaattatgaaagataaaaactatggttaagaaattgtgagaaaacaaggaaagtttttttagatacaaaatggctatcaaatggggttgtaatgcttttaattattggtttaactttgtgtattacggttgagtcaattcgttttgaaataacttggaatttgttactgtaagttaatattcttggtactttccagtctgcagaatggaaaagaaaaagttgttcaatcttgcttgagctattgaaagtttggtcttaatgagcttttcttccctaagattttgaatttttcactgagagcttaaaaattttgttatgaagattcttggttttccattccatgtgagagttgaatctatattttgaaatagatgtccttaaagagaagaggacattatcttttagttatggtttttggtagtgtagtttaactgtactgcggtgttacaagtaatgtttgtaaattcttagtgtgtgttatggattcatgagctaacatagaatattgttatatattttttggtctgatatcgagtctcgctttttaattttgaaattacagaggaagaacactcggaagattattggctgcaattattatttttttcagcttgcgtagagtcaaatgctgtgttgtctaattgtattatgttttttatttgtccgtttcatcaattttattaactgagttttgtgtcttattcataaatagtgtgttcagtgtgtaatgttgcatgaataattgagttttgagtatttgtttgagcaggattttcataaaagtaga

SEQ ID NO: 8014 - DNA, 1909 bp, Cucumis sativus
  Intron number 2 from transcript Cucsa.143110.2 (locus Cucs a.143110) derived from phytozome v7.0 (chr-ID scaffold0107 9; pos 1393312 to 1395220)
tagtatttgggataccttcacacacaaatatccaggtttaacctttctccactcttcctaatttttacatactttctatatatatatgtttgggataaggatcgaccgggtcatcgtcctcttatcttgtcaatgtagaacaaattcagtagtatttatgaacattattcgtaatcattctctcttaagcttcttttttttattttttttatgataagtataacgattgtaatttgtcgatttcttactcaaacgttgatatttcaatcgtttattaagagataaataggtatatcatctcgtagaactacttttgtagccatcacgggattgatggttaaactttttctttttttagaaaagtaatatgataaaccattaaagtttgattttttttttcccagaagattctatgtttatatatatacactttgttttttcaaggtgctatgcaaatgacttttacaaaattgatgattgtagctaaatatagagtaaaagttttaaaaaaagaattagtttctagcttattgataataatataatattttccctaaaaagttagtggttaagaaattattcaaatatcttgaaatgtctgagcatatttatttatttattaatggtatcttgatatgtctttattaaagagattaataatttttaagaggtttatattatataataatatatttttaaaaaggttcaaaatttaaaattagtttgaaaacagggtgtccacataagataagacaaagtctgaaaatgtattattctataatattcttatttaattttcttaatataaatatatacaaatttgaaacattgttctaaagacaaaaaaaaaaaaggtgtaaaatgtaataatagtaaattgttaaagttgaccattttaagctaatttaaaaaagcacatttggatcatgaaatgattgtttacataatcttatttcattaattattatttcttttttttttagtttctgattatgattgatttgaatcctatcttgtcttcttaaactttcatgtttgtttattttcttttctaacaaatagtactattttaaattataaaataattagaatttgcttttatatatagtaaaaaagaaattaataactaaactgacgctatctatttatgtagacaagaggtttcggattcgttacacaatccatgaataatttgttatatttaatatagtgtgaacggaatcttttttactaaacttgtatacaagttttgttgtaaaatgagaataaccattttattttttccaatttataaatctatttcttaaatgaattttatattcaatataactctaacccattgttaataagtttcaaaaaggaaaaggtaaaaaaaaaagtagttattgaaaagatattaatggatttcctttactgtctttttaaataaatcattatgcttttcttgttggctgtttaccactatttttcttttctaaatagcttagtagattgaaatttataatcattgtttaataaaaaaaggattttatggatttaaaataattattttatttgtcataaatatttatacttaataatgaaggataataatctttaaatatctatgtaaatactttcaataatatttaaccataaaaaataattaacctacaatattttatttatttttaatctatataattaaccaaaattattatcaactatgaagaatatactaagattttattccaaaataaaaatgatataaaattagatgaatgatggtaaatgataaaattgtttataatatattttttaaaaaattgactatagtttaaaaatatttctataaattaaatcattatgggataaaactttgtaagaataaatataataatattgggatgaatggcaggcaagattcaag

SEQ ID NO: 8015 - DNA, 8004 bp, Cucumis sativus
  Intron number 7 from transcript Cucsa.155970.1 (locus Cucs a.155970) derived from phytozome v7.0 (chr-ID scaffold0113 9; pos 193912 to 201915)
gaacgtggtaatttggctctcaaggtatggacttccctatattctttgatcttttgtaacttgataaggttcagggagttaatgaaatttagggaatgaatatagcttttttatgataacagaagaagggctaaatgctggaatttctgctatttttgtgtaaatattttttttaataagaaacaaaaatatgtatttatcacaaaaagaataacctaggggcagtgaggtgagaaaccacttcaccaagaaagctaaattatcaaagcctcccaattgtggaggatttggttaaggctgcatattaaaaaagaccttatgtctaagagttcatctttaggaagtaatttgtacaagtttacgaacatccacaaaataagggaacttatctccaaaactccttttgtcatgttcttccaaagctcccataagagagcacgagtagcacacctcacaatgtttttagtttactaagaatctccatctttttagaaagacacatgttgatgccaaaaacattaaggcagaatttggagtgagacgtgaagttttgaacttcaaggagttatgaagtttgtggagtttttgaacttttagggcaaagtgtaaggagttaataagacataaaattgatgaaactcttcgtcgtccacttccatatttggccaaatacttttaactcgagaatggcatcaagataaggccaagtgaccttttccaagatcaagctttagaaggaaaccttcttccttaagacgttgcacttgcctacggcctcaaaggcaattaaaattgcatcgatactttgtcgtcctccaacaaaagctgcttggtatcactaatcatggatgagagagttttctaaggccttcaacaaaacttttgcaatcaacttttagagggaagttactgtgcttgcccacccatttagctctcttgtttaaggatgatgcataagtatgttttatatgttcgcttattgatgactcccttttcaaataaaccatggaaaacctctaggctctactaaaccgatttttgagacattccatggttttctaaaagaaatttgttgggcttggggacttcaaattgcctagtttgaagaaaactttatggatttgttctttataaaacaaagtctccaaatcgttattcaaatggtttcccactggatcccaactaacacctttaaagataaacctctacactttgtctttcaaatataacttcttgaaaattttattttatactttgtatcttgaagcattagtctcttttcacctaggaagcacatatactcttaattgtacagagaattggtattagatacatattggatacaaatacgttcaaatatgtggcagatacatggtctggtatttgatttaatttttcaaattttttttcagatacatgtatccccattccagttatgcgaaggggatacgtcttagccattttttcctatgttaaagcctaatttttcaaagttaaagctcaacaactttaaaagtccaacccaaaacctattttgtttaaaactccacttaaaatctagcaatccataagaaaaaacatggctaaattattcaaaatgctccttaactttgcattttgtgtcaaaagtaaccataaacttccaaaagtataaaaaatacccttaaactttcaaaaagagctcaaaattacccttactgttagttttggatggaactgttaaagctttgtataacttttgtatatgaactattgaattttttttgttaaagctttgtattactatcattttaaattattgaaaaatttcaaaaatacctttgaacttaaaaaaagttaaaaaactactcccacaattagtatatgaactaaagttgttaatatctcattgagaaaataaatctaaattaaaatcttttgtattgttagtataatgatatttgaagttgttaggttttatgagattgacaatatttgctttatggctttggatatcagaaatgccattgcattgctcttgttttgaaaaatggattgtctacataaatattcattatgcaaaatactttccttattgatgattgctttttgtctttctcctaccgacatctttattcagtgcgcagttgctttggaagttagggttgttgatcattttgattctgccgtgtatatttaaaagacacttagtccgccgagttagggttggccgttcagtttgtcttaagagcaacatttgtattatcttgttgtaactgtttcgacttgtgttagaagaagggaatgttacatgtattaaagacatacttctgttaaacccctaatcttatacacatataagagaaggggtagaaccgggaattaacatggctcttggcaattcgggcagcaaagagagaaaaagcatcacagagagcccactgtgggagttggtatttatgtagaatgtttttggggattactgttaaggttttatagtctttttaggttaaagttgccatagccttcattaggagaggtttctggccttctctaggagctgggtgttgatttttttttcccactgttttttctggattgtttctctgtttgtgttacattctgaatattatcatcaatatattatatgagagtgttgccactgttttgtcttgttgggatttttctgctctttgggttaagaatctgaacgaattggtaccagagacttaacattatgaagaaaacaaggtatgtggctcaaaaacaattggaagagacaatgtaattcagtgaaaaagggattaaggagttagagagttattgaacggattaaaaaaagggttggaacaacttaccgaggacataagggagattgcaaccattagaaggaaagaagaatctggtacttctaatgcttcggtacaaaagaagaaaagaaaaatggatgatggggaatatgagctggtgatggaatatgtgactttagacaaaagcaaatacaaaaaactggagatgttgatctcttaacaagggagttgggagatgcgcagaaatttcgttgagctcattacatgggtttttcgataaaggggaccataaaactaaaggaaaaaaaatcaaagagagagaagtggtgatcttaattgacagtggtgcgacacccaacttcatacatcagaagatcgttcgtgaattaaacttactagtggtgaaaggaattaacttgatttcaaattcattacccattctctgctttagttgactggtttgtacttgattatctctagacaaaacaatgtcatccacatacaatattagaactacaatcttttcagtcttcgaaaccttaatatatgatcaaagtgcccttgactgtatccttgacacttgacaaaggtagtaaatttgtcaaaccacgctctaagtgactgttttagaccgtataagaatttttggagtttacaaacctgtggatcaaactgggtttcaaatccagggggtggttcatgtagacttccgccattaggtcttcggttagaaaggcattcttaacatccaattggtataaaggtcaatctttgtttacagaaacagataataggactaacagtaatgggagaaaaaacttttgaataatcaacaccataggtctgagtaaacccctgtgtagctaaccttgccttgtgtctatcatgagttccatttgttttgtatttgagagtgaacacccatttaccacatagttttatgtcccttcggtagagcacaaacttttcaagttttattcttttcaagagcctccatctcttccatgacaacattcttccattcagaacattctaaagcagcgttgatattttttggtattatgatagaataaagacttgtcgtaaaagctctgaactgtggagagagattatcataggaacatagttacaaatgggatgttttgtacaagatctggtaccttttctcaatgcgtgggaatgtcaagggagggatcatacttcatcaagtttccttgtatgaccctgttcaacttcattattactggtttttgctcaccctcactcttatcaccactgttcttttcttccatgttttcaagaacaacatcaaacctgtcattctctctcatttttctattagtacaaggttcaataaggttttccatgccttgatctcgatgaggtttagagtctggggttggagctgactgactagtaggggactcaattttctctatgagattcttcatgtagtatgtttttctggcaacttggtttgtaggtaggactatggagtgaggatcaaagtcagacatggtactagaagtgggttcgagaaattctaaagtgcagttggactcttcactcacactctctccctgaagatggctaacgggaaagaagggtcgggtttcacagaaagtaacatccatagtgataaagtatttctaagaagacggatgtaaacatttataaccgcgatgatgaaaggtatacccaacaaacatacatgcatgagccctagtggtaaatttggtctgattaggccgaaattgtagacgtatgcggtacacccaaacacacgaaggagaaccttagaagttaaatgggtaaaggggtaggactccttaagacaatctaagggagtctaaaagtggaggatatgggaagacattttattgattaaataagttattgtaagaatgatatcaccctacatgtatgagtctgacggaagggaagtagatagcataagagaacgagctacttttagaagattgtggttattttacttgccatcccattttgttgtggtgtgttggcacatgagctttggtgaacaatcctcttggaggctaggaactcactaaggttatggttttggaattcctgtccattatcgcttcgaagaattgtaatttttgtattgaattgcgtttcaatggtgtgatagaagttttgaaaaacagaggaaacctcatattcatctgtgataaggaagaccctggtaagatgggtatgatcatcaataaaggttacaaaccactgttacccggaggatgtagtgactttggatggaccccaaatgttactatgaataagagcgaaaggttgtatgggtttatatggttttgagggaaaggaaacccaatgttgatttgctcaaatacacacatcacaagatggagaggagacctcaattttagaagatcgataggtaaacaaatatttcatataattaaagtttgaatgggccaactgaaaatgccacaacatacaatcatgttctgaagtgctaaaataggaagacagtaaactagccctaaatagtactatcgaagttatcttcatcaagaatgtaaaggcccttactatgtcgggcaatgccaattgttctttcagattttatgtcttgaaaacaaacagattcatgtaagaagatagctttacagtgcagttcatgagtgatcttgctgatagatagcaaattgtaagaaagttaggcacatgtagagcattctggagagcaaggctctcagtgggaactatttgtcctttgtcagcaatcggggataaataaccatcgacgatcttgattttttcattgttagaacagggggcaaaagagataaagtgctttgaagaacctatcaagtgatttgtagcctttgagtctaaaatctagggattcttcgcattaacattaataagctcaagagattggggtatacttgatcgagcaatggcacccagagtaaaagtcttggtttggcttgcagtagagctaggtgattgagagttgttggctgtggtagtcttactaacgtgggcacgctttgagttctgtttctcgttggaggaccatttcttaccttttgggagacgaccgtggagttttcaacactgatccttggtgtgccactgtttcttgcagtgtttacaaacagggattggcattattcttgtcattatcatggtttgaggaccgggcactgaaggcagtggagtcagtggtaggagtagtcagtacacccatgacattagtacggtcttctttaagacgaacttgaaaacacacttccattagggagggaagaggtctttgtcccagtatacgaccacaaacaatatcaaatttgggattaagccctgcaaggaaattatatatacggtcagcctcctcaagtttaacatattgtataccgtcatttggcatgtcccaaaatgtcttcatgcacaaatccatctcttgccagagaagggatagctttttttcttttgaaacagagtcaaaagaagggagaacttattgaattaggaaacctcgtccagggtctcttgtttgcaatcatggacctattttctcggtgtatacaatcgagagacattctgatgctttgagtaaagggtctgagttgtatcccacaatttttgcagtggtgcgtatagtagaggcttgccaatctgaggttccgtactattaatcagcatggaccaaaagagtgagtcctcccttttccaaagccgttccaaggcatcggacgatctgtctctcttgtttagaacctgaattggtggcaaccttcaaggaacatctttatcgattggtatcatgataaataattttgcccatttaatttctcatctggaaaattacttgtagacgatcccaaagagccaattatataattcgaaggcaaattagggaatgaagttggttggtttggaatgtgccgaagactcgcctgcttcaacccccaatctgttatggagttggtcagttctgttactaaagaaaaaaggttgttgtaaagggttgaaaaaccgtggtgcggaacagacagatttgacagttttaacagattttctgtgaagggttgctgtctggaaggcatgagcggcacatggggctgtgaccaactggaagagtaggatggttggagagatgactgtgtgtagaagtggttgggctgagcggttagatggaaggatgggacacgtgggcccacgcacctggtagaggtggcgcatgaggttgattctggtcggaggctgcacggatggtggcgagggtaggcccattttgtagaacgacggtttctgaagctgttggagtaagttttccatggcggcagtgatgacttctggtttggtcttggtttctcctaatctgttttctagtgtttcattattgcgtgtctcttataccatatcgaaagcaataaacatgaaaacaaggcttatgtggaaatccgagtaccgaaagaaagaccacaatatttttgttcttattatattttattatttatagtaggtacaattagggagaataagtagaatacacaaagacatcaaaaacgaaaaaaagaattatggtaaatctttccataaacgggccaagcccactaattctaacggaaagatacccagatttttttatacattaaaggaaataggtaaattggttggtttacatgtgctttggctcagcgactgttcgaccaacctttcggtttctaattgctagaatccaactccgacctatcccatttccattctacttggtaatgcatgcaggtatattttggctaaaacttcttccatcatatattattttccttaatttatatatgatatatctttgaacaatgatgattgtttacttctttatggcttctcttttgagtttataaatttcttcaggaagcgtcttcagatcctttcattgttataaatttttattatgtaatttaatcctcgagatgttttggtgtcctctttgcatgttttaaggtagtctgagtgtagattaggaaccttcgattttttgtttatttattattttgttgtttttaatggtttttgtgaagactactcttttatctttgttcctcaatctacacacttgattgtaatgcggagcttctggtttgtttaaagttttaatcttttactgactggttgtccaataaattcagaattgtattgagcaaggtgtcccagttagagtggt

SEQ ID NO: 8016 - DNA, 7163 bp, Cucumis sativus
  Intron number 4 from transcript Cucsa.192580.2 (locus Cucs a.192580) derived from phytozome v7.0 (chr-ID scaffold0133 3; pos 469078 to 476240 reverse strand)
caaatataatctcttcgcccatcccaaagcatgtatgattttgttatttcatttttatgttaattaattccaaaaaagtttataatatgcttgtgtgatgctcaaatcaaaacttaggttcttgactagtatactacctacagaagaagaattgtcttgtcaagtatactattctataagataagtttttaaagataaaaagaacttaaaaagaaaaggctaatcccatcccatgagataaacttaaaaaaaaaagaaagaaaaaaactctaggttttgtagtctgtgtatagcattagcctcaatggaaaactaacccctcctcagtattactttaaattctgttttataagaataagatttttgtttatattaccactttggtccatgaaaatttgatataccgtcaacatgagcaacttccaccaatttgtatccaaacacaaaaggtcttgattcaaatcctccattcccacttgtactaaaaaacccttttttttcatacgtttgtgtttatctaaactataaatataaatatagatacaatagtttctttcataactataaaaaaatcaaaataaatctttacaacatattaaacatggcacacctatgacaactaccccatacttgctccattgaaaaaaaggatttcgtgatttctatcgacaaccgctccagagagctcaggttcctcttaactgaaatgggtccctacaaatcctactccatttctgtcactccagaatcttttgtctggcttagttctactttcagtactctattagatactcctagaacgacaaggttcttccttgaaaaaagatttgaggacaactgcttgtgggtccaaaaaatacacaaccgtaaaggttatttggcagaaatctttagagtggatgatcgagggaggaaatcttgcatccttgtccctgaaggaactgataaacaaggatgggcccagtttacagacttgctgacattaagaaaggaagccgctcaaaaaaggaagacgactacaactactgaagacagaggcaaaaaagtttcttcttttagttcctcatctgagtcagacagcccacgtagatcttacgcagaagtgctgactaacagtagctcatcatactctagttctcctaaaactctcccttcaggtagcaagaaagaagagactccctctggggcctttgactctcctaactggactaaaacagtggtgatcactagaagatattttcacgacgactggaggaagatcctgacaaaattacaagaacaactggatttcaacattacatacaagccctttcatacagaaaaggctgcggtttcgattgaagataagaacttagtgaacctcctttgtaaaaacagaggatggacaacggttggaaagtattacgttaaattcgaggcttggaacattgtcaaacatgcttccccaaagcttttgccaagctatggcggttgggtcaaattcaaaggtattccccttcatgcatggaattactcgtctttctatcaaattggagaagcatgtggtgggtttgttgaagtggctaaaaataccagacttgatctctttgaggcagatatcaaaatcaagtataattacatgggttttatccccgcttttgttagaatagccgatgaggagggaaatcattttacaattcagactattgtacaagctgaagggaaatggctcaaagaaagaaatcccagaattcatggcactttcacaaatgaagcagcaaaaaatttcaatgaattcaagcaagactatgaacagtaccagtttcttgattatattgctgtatcggcaagctgggccatatcggaaaactttcaagacgaaaagaaaaaaagttgcattggaacagtgatctgcaaaaaacaataaaaaaacaagatgcaattatgaaaattttaaattatgacggcgaaagcgacagcagtggaaaattataggggagctctactgacaagacaaagacaccagctgacaggaaaaaagagagaaaatttttcagaggggaaagctccaaccaactgtcatcacaaaattcaaagagaaaggtttccttcacttctccaaagaataaaatatacttctttgatcctagaagtgtgccccttaggcccatcagaataagaagcccagaagaaaacaccagaaaggaagcccaaaaagccctgtcaatctaaaaaagaaaggtaaacagatctaccgagtaaaggatccacacgcaacattgggcttagaagaaacaaacccagaagaagagaagggaaaacagagtcaaacaaaaaaaaaatggatatggaagggataaacctcacggtaggcttgggtcatatatcccccatcacaaatgcagctttctcaagctcagaagctaccactccaactgctcacctttctatggccaactagagactggaaatgacaacgttggggggatgttgatcagtgataaggaagatgctgaaattaatgaaatggaaaagatcaatgacgatgaagactttaaaaagaagctattggattggttgaaaaaaaacaacctgaagctcactataagttcctttgctggtgttgttaatgaagacagcgagactactggagatgagaatgtaacgatactgtatgaaaaggagaaaaatagtctcccatgaaagtcttatgttggaacattagagggttaagctctccctcaaaaagagcacaaataaaaaacttgctttcctgttactatcctgattttgtgatcctagtagaaaccaaactgcaacatatcaacaagaaaattattaaatcactttgtagccctattagtataaaatggcaattctcccctgctgtaaatagttcgggaggtattgttatcatgtgggatgacacaagatataaagtgattgatttccttatgaaaaaattcactctctctattaatatctcatttcccaaagatacaaacaactctcattggtggctaacagcagtttatagtccatcaaaacgggaaaataaaggtgatttctggatggagcttgaagagattaaagccacttgccttccaagatggcttatgggtggagatttcaatattgtcagatggtaattagaaactacaacaaaaaatattgcagtcccctgtatgaattctttcaatttcttcatttcgggttgcgatttctatgatccaccgatctcaaatgccaaatacacttggtcaaatctcagagcacaacctattctctcaaggcttgatagattcctttatactccagattgggaaattatatttgaacaacacttttcaagacggctcccaagagaaacatcagaccactttcccatttcccttgaatcaaacagcattaagtggggcccacaccgttcaggttcaacaactcctttctcaaagatgcttcatttaaacaaaactttgagcattggtggacaaacactgctcaaacaggtcacccaggatattcttatatgcggagactcaaacaaattgctcaaacaataaaaaactagagtaaaaacaaaaaagtctcctctgttgaagaaagacaggctttattgaaagaacttgagcacattgacaatctggaagctgataacaatatcgctgatatgcacttatccagcagaaaaccatcaaaactgatttgaaaaatatggcctttaaagaagcacaagactgagctcaaaggtgcaaacgtctatggaacatggaaggtgatgaaaactcagttttttatcacaaaatttgctctataagacaaaggagaagcttcatttcaagtatttccacttcgcaaggatttcaatacaccacggatagggatattgagaaatcttttattaaccatttcgaggagatttacctggataagagaagagacttatggttaattgataacctctcctggactgctattaaagagacaactcaagtggatctttgcaaatccttttctgaggaggaaatatacaacgctcttaaaaattctcccaaaaataaatcaccgggtcccgatggtttcactatggagtttctcaaattttcatggaaatacacaaacaaaaatattttggatatcttcaatgacttccataaaaatggcatcatcaacaagaatgtgaattccacatatattgctcttattgccaaaaaggagaactgctatgctccttcggactacagacccataagcttaacgactagtctatacaagctcattgctaaagttcttgccgaaagactcaagctcattctgcctgatacaatctcagaaaatcagttagctttcgtcagaggcaagcagattactgatgccattttgattgctaatgaagcggtggactactagaaacagaaaaaaaaccaaaggttttgtggtcaagcttgacatcgaaaaggctttcgataaaataaattggtctttcattgacttcatgctcattaagaaaggcttcccacaaaaatggcgccaatggatcagtgcatgcatcacaagtgttcaatacttcattctcattaatgacagacccacaggtaaaatcaagccaacaagaggcattcggcaaggagatcctatctctccttttatctttgtcctcgctatggattatctcagtatcctcctcaaccaactggaaaaagataactcgattaaaggtgttagtataaatgggaaacacaacctcacccaccttctgtttgcagatgatatcctactttttatggaggatgatgaagaaaccattgataacatgagatatgccctcagactttttgagttggcctcgggtctcagcatcaatctcaacaaatcaacgataacacctgtcaacattgattcgcagagatcaaattgcgtggcgtcaaaatagggtttctccataaactttctccccatccaatatttgggagtgcctttagggggtaaaccaatatctagacacttctggtctgaagctactgggaaactccaaaagaaaatcagcaattggaaatacgcttctctttccagaggaggtaaagttactctcattaaagctactttagctagcatcccaaattaccacctttcggttttcaagcctcctaaatcaatctgcaaagacattgagaaaatttggaggaattttctttggagaaacacttaggaaaagaaaaatatcaatctcattaaatggtcatcggttctgtctcctatcagtaaaggtggcctgggtatcaccagtgttgagagtacaaattttgctctcctgagcaaatggatctagagattctttgaagagaaaaatcccctttggaaacgaattatcaccgcaaaatacgagcaaacatacttgggagagcttccaattaagagcaaattcagcagctctaaagctccttggatgtctatcattaaaggtgcaaattgggttctccctcaaattaaatggagtattaaaaggggtgacacattatcattttggcacagtaaaaggcacgactgtagtccattttcacaaacaagcccgagactctttgctcttacttccagaaaagaaaattccattgcaaatatgtggaatgcagaaactgccaattgggaccttttcccccgaagacccttaagaagtgtcgaggaagccctctgggatgaattgaaagctacccttcctcccttgcctgacactggattcgacagacctctctggaatttaaacaggaatgactttttctcggtggcctccaccaaaattgcaagaactcaaaacaaccaagaagagtacaatgacgaggatgagattatttacaataatttaaggaaatctaccgtcccaaaatgatgtaaattcttcttatggattctccttcgtgagtgtatcaataccatggatatgctgcaaagaagactccctacttggaatattcacccctcttggtgtatactctgcaaagctgctgaggaagacatacaccatctattctccttctgcccattctcaacaaatctgtggaaaaaagttgaagagattatggacaaatctttcccccttacagatccctatgtgttatgcaaagagcctttcaaaggaaaaggaaaataaaaaagacaaaccattgaacaacatctggtggctgccaccctgtggaacatctggaatgagagaaacagaaggacttttaagggagaagaaaaatcagttgtctcggtttgggaagacattcaagccacaaccggtctatggacaacccgatcttcacttttcaaaaactactcgcctagttctattgctttaaatttacatgctttcgtttcgggataatcgggctgccctctagcctttctattcccccgcttcttgtaatcaccttgtattattaatgaagtggggctatagctgatgctttgatatgtcccccatgtggagatatccttgcatcagctatcccaaagtatccttgtcaaaaaaaaaaaaaatctttacaacatagtaggaaaagaaattaaaacaaaacaataaaactaacacaaaaattaactaggaaagctccataactaagaaaaagctaacgagaccacgaaaaattacaatcacacacgttacaaaatcacttccataataaaggtttaatttgattatttacaccattatatttattcacgatatcaaattagagaatacaaaaaaaaaaaaaaaaaaaaaattaaactaaagtttcatgaacttcttttacatagagattgaagtccataaactttcttgaacttttacgacctaggataataactacatttttaatattttataaaaaaatttaacaaaactttcaattttgtgtctagttaatgaaaatttcacattttcaaatatattgaagataaagttaaactttgcatcatctcatacgtgcataagacacattagacgacttttgtgaaaattttttagaagaaaattgtgaaatataactaggtttatcaaagacctgcctgtaaaaaatataaatttaaaagataactattaaacatgatgttgaaagttttaaaaataagtaattaatatttgtattattagagaaatagtgatgaagtgtatagtttggattgtggttgattatttgggatgaaattagggttggaga

SEQ ID NO: 8017 - DNA, 3637 bp, Cucumis sativus
  Intron number 8 from transcript Cucsa.108610.1 (locus Cucs a.108610) derived from phytozome v7.0 (chr-ID scaffold0093 1; pos 806134 to 809770 reverse strand)
aagcctcacgtgaagcaactaacactggcattaaggtaacagtggtttttaggtctgctggcggtcactacaatatttttattactcagctttgatgaagtatattttctatggaatagttttagacattttgatgacctatttttgtgtacaagattgtcatctaattatttgtagtagatgcaattagtattttagaattttcttccaatttttttttatagtaaatgcaactccatagcagttatgtttttttattaatttctaaatggggaaaatggcgtgtaaatgttgtcttcttgacgaggtgagaatcttaaaatgatactgaatgcatatagaaaagtgcaaataactgaagtgctagcttcatagtacacagatagatataaataaattacgaaaaacatcaccttcctctgaatgtaggatttgtcaaatttttatatttatatgtatatattttttatgagaacttagatatttaattttgagtgttctgtgcaccaacaaaaggcattgttatgcatcttaagacaaaaaggacgaaaggaacgaaggttattgttaaaagcagttaagaaaatagccatgagttatgtggaaacccaagtatctagagaaaaaatgggatctgactttcttattaattctcatattaacaaaagatagaaaggggaaaataaatagacaacaagcttatgataaagaaggaaaggaaattagggtaaattcttccttggccaagttcactgattctaacacatcccctcaagttggggcatagatatcaatgagacccaacttgctaacaattgtgtcaaagctttagaagccctttggtgagaacattagcaacttgttggctcgaggggatgtaaagaatgcatatgctacaattgtctagtctttctttaatgaagtgtcgatcgatctccacatgtttagttctatcatgttgaactagattgttggctgtaaggcctgtgtctggaatagaaagggtcacttgaaataagaagtgataagaaggattttttaagatttaggcatatgctttcaagtaatgacacaaaagtaggcgttctaatgtcagaagagttaggcgttttgatgcttaacgtgaggtgatgccaggcgaggaaaagtttagcatttcaaggaaatgtcaatcctgattaacagtcgattacgtgttaagtttaagcttaaggatgacctgatgttataagctgacatgtgtaaagttgtaagtaggagctgacaagttaagaaaagctcatgtgactaatctgactcaatgatgtagcctaagtgacctcaaggagacctccgagaaccaagttgtggatcttttattagaatgaataatgtgtttcttacaagaggagaaaactcctatttatagaggtctattacaagtgggggtaaaaagggaattaacctagaatattacctaattacccgattaacccttagctttcttacattattctactcctccaaaaagaaaactcgtcccaagttttacaaaaagaaattaacgaagcaaaaaaaagaatgaaataaacttgttcaagttagtatgaccaaaccaacctcctacgttttgaacaaaaatattatgatcaaagggataaacttgagacaaaaaatcaaatatggccactaaaagatgaacctctccattagccgtaaacccgaaaaagatgtttacttcaatcttactcaaaactgtattcaaagaatcaatttcaaaagaattagctttcgaagaaaaaccttcaaaaatcatattttctttatcattcgcttcaagttcttctatggtttgaaaatttgtttccaccgcaaccaatgtgctgttgttcttatttgatttttgctctgtgtttgatacttctttttcatcttcttggttgaatttttcttcacttgtgaccatttccaaatcaacattttccaattcttgttcttcaattttaacttcaagattttctatttgaaaattgtccaactgcgattcttttgttttttctttcatatatgaaacccatcccttcttgaattcttgaaaatgaattaatagttgcttggtatgttgagtcatttccccatgaacgttgaatttcttttgttgctttctttatttcctccaatgctatgggatcaaagtagtcattttgttggattttttaatatgtttcaatctcatagcgggtataatactcatccattgattttcttgaatcaatctttcttgatcgtgtttcataaccaaaagagtatttgagtcttgaacgctcttcttggatggtaaaatttcattcttgatgatttttaattcatccaattgccaatctttacgttgatttcttgaaaaatggatttgattggattgttgggccatttttttgatattgtcgccttcttattccgttccaaactgccttagaaacatcattggagtcactagaatcactagaatcaattttccaatttggataatgatagtttctttgagaaaatcgagaatggtcaaaattggaatgttgaaattcttcttccgaatcacttgagtcaggactccagcattgtttatgggagtaaaattgattttcttgtctatacttcctgctggtttttttcttgtatatcttctttgatcgattgaagtccattattgaaaaatctttggtgtcttctttctttcttggaattttaagggttccccctaattagatgtgttgtttggaaacaagcacaacactcaaggctccctctcgtgaccgacgccaacaagagtttcccggtcttccactggcagcagtcaatattagcccagacagttgctctgataccaaattgatgtagcctaagtgacctcaaggagaaatcctccaagaaacaagtcgtggatcttttattagtatgaataatgtgtttcataccagaggagaagactcctatttctcctcctatttatagaaggtctattacaagtggggtaaaaaggaaattaacctagaatattacctaattacccaattaacctttagctttcttacatcatttcagattagtataaatagggttgaacgattaaaaaaggtgttattctgagaatttactaagagaaagtgctaagtgtcatcttgaataggaccgatcaacactttgcagcaattgcacaaggaaggaagagatggttgagagtgcctcttcaatttggcaaatgaaggcaacaaattgagggggagatagctggttaatatttggacttctttggtgtcatggtggcttctctttctctgaatggaagttttgttcattttttttactaaaatacaaaagttcatattggttgaaaatatttttagttaaaacaaattttgatgaagcacagaggcctatctatccagttaatatcaatgaatgcaatccaactatgaaagagttcgatagaatatatttattctatgtttcccatagtacatttattcacttacaaattgcatcacaaaagcacaagactttcaattatttatcttccaattgaatttgatggtttcttgtatcctctataactttactctcttatttctttaggagtctggaatcgacgtacggctttgtg

SEQ ID NO: 8018 - DNA, 794 bp, Cucumis sativus
  Intron number 2 from transcript Cucsa.365840.1 (locus Cucs a.365840) derived from phytozome v7.0 (chr-ID scaffold0361 1; pos 3726394 to 3727187)
ccattctggtggtcgccattgtttttactgtatatgttagacctcttgacccttctttaatgtttaagtatttgtgtaaattattgtttgttagaaggaaagtgttttatgcaaattggatacgaagaactgttctatctttgatgaaatatctgatctcttctatgttctctgttttctttcttttgttctttctttatttgcatattctcttaaccatactatattctatgtatttagttttctattaatgtgaactgagaacaaaaaagtgcggttaccagtaacttgagagataaaagaaatttagttttattaatcaaggaaacagacttctatatggtttagtatctcatctgtgtaatcagaggaagttttactgttaagcactgttcctaccatttgtgaaattatgtgatgtctgatttgttggagtcgttgtatgaaattatgtttacacctttactttggaatttctgatgttatctcattcaagttattgtcatgaaaactgaatgtcgatttttgcacaagcatttaatcccaaatctgaaccttattattatcttctttctaggaaaatctgcaactgttaccgttcttggtcatgttgttctgttgcatcttgttgctccctcacttttttttaccactacctatctgtccaacaaacttagaaaattttgaaagcaaacttttgtagtttgacattgaatttaaggccttgatgagatgtaatttagttattggtgatggtaggtactggtacttcttttccttacttcagcccggga

SEQ ID NO: 8019 - DNA, 654 bp, Cucumis sativus
  Intron number 4 from transcript Cucsa.339240.1 (locus Cucs a.339240) derived from phytozome v7.0 (chr-ID scaffold0335 6; pos 1914708 to 1915361)
agtaagtgggtgtttttaatttctttgtcgtcgctattaaatgaaaaaggccaatgttacagttattgtacacagtcgttgtacgccaaacataatttttcttcagatttaagtcaattttggagaagtgcagagatttaagttctagtatagttaattaaattttagattaaattaccgatctgtccttgtagtttggaataaaaaaatttatgagttttgtaaagttttaatttaatttctattgctttaataaatctcaattgtttctaaattgagatatgacacaaaccagggagagtaaattgataatttgattagtttgactagttaagtaggtagaactacaatcatacatactatgatattatattaaattaaagttttcagaattagaatacaaataacggtggagagtaggaaaaagtataatagaagaaaaaggaaaggctttttttagaaaacatgctactttgtaaaagaaagcgtacaaaaagtagagtagttaactgaatgcagagatagaatgttgttttagcataggaaagcaataaagtgtttatgatgaaaagttaaaattgacgtaaaatttggatttgtgtgctgtggtgtggaacagtcaaatattttggtttggggatctgaactataggc

SEQ ID NO: 8020 - DNA, 4564 bp, Cucumis sativus
  Intron number 1 from transcript Cucsa.178910.1 (locus Cucs a.178910) derived from phytozome v7.0 (chr-ID scaffold0122 7; pos 1315864 to 1320427)
tgaccgattgaggggttcgtctagaaggaattcaggtactgcttatgacttatgttgttcctacaagttttcatttcatttgattgtcttctgtttgcgggttgatatcttcatcaaatgaatattactctgaactttgaagtatcatacattctggatgttattgggttggttctattggacaaataatttttctgttgttgctatttgttctaactttcacattatgacacattcgcctacagagggaaaaatgctcagcctaaaaccaaaaccaatgcaatataactaaatcaaagattgtaaatgtctccaatttgagcatatttctaaaaccaatttgagccaactgcttgcataatcaaatgaaccaactaaaacagaatcattctaaaataacaacaaaaaacgattgaatagactaaaattgacccaactgtatcatttctttcttttcttgttgtttgtttgtatgttttttaattaagccaaatccaccgatattaagtaaccaactgactaggttcagttggcttcctgtcactctcacactcttctctcgcatttttatgtttccaaaaaatcaggatatttctaaaaccaaataaccatattttaaaaatcaaacaaaagatccaaaacctaataagcatatttctaaatcaattccctttttttatcatatgatgtttagatctctctcctggtgtaaattcacacacacacacattaggattacaatcttacatttctcatatgacaatggaacagcattatataatccctcacgacatatgttgtgtttttgtaatttcataccatcaataagttctgattgaattattcttcttaagaaaaagaaaatatttatttttcattttaaatatcaaacatgtctagtctacaactctacagtctatgctatacattttgagaaaaaacgggatgtttcttattaggtttcatgtattttccctatctttttttctatgccagtacattcctgagagaaaaagaacaatgaatgcctattacctaatcctttagttttctgcagtactgtttttctatgccgttgtgttcccgagtgagagaagaaggaatgcctaatcctcatcctttaattttcttcagtattttttatgatttatttatgccactgtgttccccaagtgatagagaattgtgaatatctaatcctatacttgaaaggcccagttcttgaaccgttggtgtctattgtctaatatgtgtctgataacaatcgcaatctatcaagagctgtatctaacattaggtgtccagtatcatgatttggaggtagctattttctgcgatttaaatagatactcaatttgaatgcagttccaagtaacatcaagactagtttaggatttgttctaccaaatggaaatgcagtgaatacaaggacagtcaaataccccatgcctttgtgacaaagtcacgccattgaagttaaagaggaatttctctgaatgtactcattggtaattggtagtcaagcttcccagggacttccaaccaagtgaagacttggaaaaattcaaaacatgattctcaaaaaattgtatgcactaatgttgttaatacagccaagggagtcacatggcatgatggaatcggacctccctcactcaaaaagggagctaggggtagattctctcaagcaaaggaacagagacctcattttaaaatggctatggatttacccaagaggaaaaatgctctggaggattgtggtcgcaactatttatggggttgagctctgtggatgacctaacaaactgggtggatgtagacctgagttgacatagaaaaaaaacaggaatggttttattcattttaaaatttaaaatttaattttatcttcggtttttgaagttaaaattagtaaatggccagtgtgtttgtttttgctttttgagaggatacctgggtaaggtggtccctttctctatgcaattactgaatttatggacattgtttaaaaaggtggcttttagagcagaatgtgtcgtgggtgagcgtcgtctttgaatttagaggttaagagatgattgtttgacagagaggtggctaaatgtgccatctatgctgaaaaactagatgtggttcggattggaactagccaagacaaaacctcttggaatttagaaccaaattgcttgttagcggtcatccatcttactaatccaaaagccaagctgagaagtctctcgtgagttgcatctggacattcaagattcgttagaaagttgagttctttatttgccttattccttataggagtctgaatactgttgataattggagggaagttttctcactggactttatcaccctcagtctgctgtttctgtattgatcttgaccacttcttcctgacttcctccattattcttttgcttagtgggcttagtaagttactttgtctggatttcattatccctcattttacgagtgaatctttggctttttggttcttggtggcatgatgttttttttgtttttgaaacagagacaaacttctttatgaataataaaaactcaatgtacaagagaattatacaaaaagctaaataaagaagtctaaacaagagaaagaagaaaatggatcaaaaggtgcacccggacatctcaactaggttgacaccccctaagcattggtggcatgatgttaaaaagcaaaagcttagatcttgtagaattatgatttagggtgggagttgatggtgtggttttggagtgttgatgctcggatgtgtttaattttaagtaattgcctttctcatgattaaattggcaaagggtgaaggatatttgaaccatttgccaactgcatttgagatttatctattccatacctcatgttttcctaatcatgtactagttgaaattgcattgtggataaacatcaacgtattgtagatatatatcaatgcatattctcgacatgatacaccagcattgaaaccttggagttggagaagtatcgtgatagaattcaaatatagggaaacaatggaggttacttattttctttctttgcttgagggatgcagttttagggtggggagaagggatgtttgtgcttggagtcctaacctgagtcaaggttttatgtgtaaatccttattcaatttactgttgaatccctccccctctagggaatctgttttcaatgtggtttggaggattaaggtttctaagaaagtcaggttttttatttggcaagtcttacttggtcaggataacactatggataggcttgttaagatgagggaatatgctttgttgggcctttttgttgcttgctttgtcgaaaggcagagaaaaaccttgaccatctcttttgggactgctaggtgcgtgctgtgtggagtttttttctgcaggagtttggccaaaagcattcattcaacgattgaggagttcctcctccatccaccctttagagagaaagggtttcttttgagaggaatgatcggatgtttcgtggtagggagagggaccattgcaaggtttgggctttgattagatttcatgtgtccctttaggcttctgtttcaaataccttttgtaactatttcctaggtaatattttaaatagttggaacccctttttataggtgtagtgctttggcaggctgggattatatatatattgtggtgatatataattaaatttgccttcaaccaccaacttaagcttttggataaattggtagtttaatatatatatttattgagatataaacaataactgtaccacaagataatctaagttatttgaggtacttggaccctctcaatcttgagatcacactcaagccctaattcacccaccttgtcccttgcaaaagatttttgagttaaccctgtggaaagtaaactctggaaattcaatatattggtctggatcgccattattgtggaagattaaattcagctgaaatccttaagaaaggatgcttttacttgactattcccaagtttattgcagtataactaaaagacagtcaatcattttccttttcgttgtgttcatagaaggaaaatgtgggagtctttgtttcaaggttacaagattgcttggatattcaattttattgcaaaaagcaacgtgcttatttttctttgcagctctctggaaaagaaataagagtatctttgatgaaaacaatccttgtgagaagaaaattttgagataattatactttagtggcttctaatcttggtgtgttctttttaaacaattttaggaattatttatcgtttggcattaattcttgttgggataggaagttttcttgtgattatttttgggtttatcatatctttgtattaggaagtttcttgtagtgctctatggttgatggtgcatgttatcgggaaagggtaaggtaattggtgggatcaaattgtgaaaccatacataacttttcacgttactgataaactttgcttgtcttccaaaaaacaaatttaccttactgatttttttggctcatagtgtgtttttttttcatatatattattagag

SEQ ID NO: 8021 - DNA, 3809 bp, Cucumis sativus
  Intron number 1 from transcript Cucsa.158150.2 (locus Cucs a.158150) derived from phytozome v7.0 (chr-ID scaffold0114 2; pos 271077 to 274885 reverse strand)
ttgataaagaggaagagtttgttattcggtttcaggttcttttactcttccctttctttcttttcctcattcttcttggatttatgaatatgtttgcacaatctgtgttttgaatttggttttactgttctattgctttttttgtggggtattgaataatcttgagtgttaaggaagattgtaagtagagctgtgtgtcttatgttaatttgacgtaaattaagttagtaagtagtgactgatgaataaaacaagacacttggaagaggctggaaggattttatttgatctttgataagggttttgtcataaaggcaggttgaaaagttagatgtcataaagggttgtcttaaaggctggtttaaaaagttaggtgtctctgagcctggattggtttgttgctcatttgtgtaggtatcccctacttaggatatggagatcctaaaagtttcttgacagtcaagtgttgtagggtgccttatgagattagtacaagaacgtttggtagtcacctaactaaacattaaatctacaaaatctacaacttagttctttttaaagctaaatagtacaaggttagaaagtcggagaattagtcaaggtattaaggaatcaaaaaagaaattaaaaaaaaacataaaacataaaacaatagaaaatcaacacaaaaatatatgtggttcattaacaatgtgttagctgcgtctatatgcagaaaaaagattcatttattattagagagaataattcaaaattacagagtagtgacacctctaggataaagagtttatatagcgcatttccctaaatcctagtgtcaaaatcataattaatgtaaatatgctaattgctaaatatgaactcaatttaggtctacgtacttggttgttcgaagtgccatataacaaatttaaggtgtgtacaaactgatttagataactagacgtatcagaaagaggaagacgtcctaaaaagagacctgaatcatggtggaattaaataacatgcttgtgaaggtcaatctctcctaaattgttatgaaatctaggaacctaactgaagtggtggagtgtgtatcatgtcctgatgttttggatgacagtagggattgtgctactgctgtccatgtttgcagtctagttgagattgtggactgtgagtgtatgattgatgtgattcaactaaagctgtcatctccctggatagattagccatggcagagtaaattgttgaatttctaaactatgtcataaaatatttcaagattggacattcaaataaatggccatcattctgcctcttgagtactattgcataccaattttgagcacaaatggatgcactctgctcatcatgtcttcattgatcattctccccaggcgatataattttaatggttaagggtaccagaatttgtttacctgccttatcaaggttatcttcaaaccaatttgaaatgatgtctcgcttcttaagtagcatatctgtttttttagatccttgtgcatttttttccatccatcttatatggggtgctttaaccaatgcttttcatcatctgcatttctaatttgttttttcagatatgatgattatgttggtaaaatgtaacctctgttttatggatggacgctatcaatagtattgatgcgttttgttggcatcctacagtttgtacaagtttttcaagtcccttctggcaaataattgaaaatttaataaaatgaagtatcattttgttccaaaggttttttctgatcttttgtacccaacattttattttcccaacttaacttttgcacgttaagatctttccttttctcatatagcattagaatgtcaagcatgtgatgtttagttcttcttgtcaggctttggttgagtatgttctctggatattgttttcaggaacaaattcttggaatttgcatattagaaaaaggtattttgattttttttctttggtttttaaatcctatgttggtaccccaactttaaactgtctcccttaactttctttggtttagatattgttccattatagtcttctaactttttaaatgtctattttaatcctagaaattccccttcccccaacaaaaaaaacaattggtttggtcctttgattttaacaaattaataacgttgtattgagtctatgaaccagcacatgaatgcgagcatgatttcaaattaaataagttagaagacataaattggacagttacaaggaccaaaatggttgttttcttttctgggagaaagaacaacttcaattaaaatcttgttaggcagtgtcgtttcttatagaaacaaaatattaggataggcatttgtttgctgtaatgtttgcaccaaaagataacacttgtcattgtctttctgtctaaataattaatttaagaaacattaagtctgaagttatttatatttgttcttttaaacccaaaatactaagtatttgttgacttagaatttggaatagagtagcttttaataaccatcatggtttggcttagtggtaaaaagggagacatagtctcaattattaatttcctacgagtttccttgacatccaaatgttgtagagtcaggcgggtgtcccgtgagattagttgaagtgcacgtaagctggtcctgacactcacgagtcacggatataaaaaaaaaaaactttgattccatttctacgaggttaaaaaaatcgcgatatatcgccgatatacctctaaatggaggtatccaatagagatattggggagtaacttctctttttcttaaaaagtcgagaaatatcaccggtatatccaaaatatcattgctatgtcttttcatgaatattattaagatgagttcaaataaacgtggacacatggctgatatatagtggatattctatgacttttccatttttttaaataattcatttttccataccgaataaatctttctaaaatcaacatatttcataccctcaaattccaaattgaaaatcaacatattctaaattcttcttttagtttctaatatatgatttactttcgttaaattgaatttgaaaaaagaaacatatattaaccttaaatgtaatagaaaccttttctttcacatcatctcagaaaaaaaaaaattaagttttcacctcttccaatgcaacacaaacccgtacttctctcaaatcacaagttctcaagcttccctctagttttctctcaagtttcctttacttgtagatttctctatttcttctttctatgtttatttatgttaattgttatgagttttattttcttatatatgtttaatgttaagatttttgtatccttattatgccattttttatgtctaatatcatgatttgggaacaatattatcattagctgataaattatgcaaatgttgggctagtacctctcagatcatattttgactattgaatcttgtatttgacttttattttgtatgacctagactctattaatgaaatattcagttcttaatcatcttttcggttttcattattgtttataattccattatcaaccatatttggcttctaattaatcatttatatgcttaaattcatagtttattacttaggtaaactagtcctgaaatttcactaagaaattcacaatatttttataaatttccatgatatccgtgattttcttcggaatatctgtcgatatatccataaatttggattaccgatatttatacagttaacaatatttcaatccttgcatttgtattctgctatatttcatatctaaatcagaatggtttcaggcagttcttgctctcta

SEQ ID NO: 8022 - DNA, 4383 bp, Cucumis sativus
  Intron number 9 from transcript Cucsa.049590.1 (locus Cucs a.049590) derived from phytozome v7.0 (chr-ID scaffold0055 0; pos 65188 to 69570)
tctcttcttcagcaggcaagaacttttcgtgacaggtacttttttattttcttatttttagatgatattagatagatatgtaaatctacattaaattacattacctttattctttagaattgaagtaattgaatgtcggaatggcatacttctgttaggccactaatagtgcatcaatatagtaggagaggaaagaatagtataggcaagggaattgtaaggggtgggtaccactcgggagaatagtataaatattctcatagtgcattgagttagttagttagaaattgagagtatcatctcgagagtgagagataggggagttagggacaatcgactatgattgtgccctagttattctactgtgattcttgtgtacgatccattactaatacaataaagattgatacctctttcatattggtatcaaagcaatcaaatctggggaaatcatctaatatggcgcagaaacgattggaggagaagattgatgcaaatgaagttgaaatttcagtgattcgtatggagatttagaagttggcgaagatggaggaatccatgaaatccttattgaagagcgtggaagtcaacaatgtaattctgaagaaatgaattaagttgttgacggagattgtgcaatcacaatctaatacatctttgaataacgaacgaggtgaatcaagtggtagtaagaatgagaaagaaacactaacaggaatgactacaattacgagtgaagttgcacgatttggaacgggagatgcaacgttagaacatagtaagttcaagaaagtagagatgctgattttcaacccactaatccctattcctggttatttcgagccgaaagatactttcaaattcgtaatctaatggaggaggagaaattgagtgtagcagttataagtttcaaagcagcgactcttgactagtactgagcgaaggaggaccgagaactgttgtccgattggaaagcgttgaatatgcgactattgcaacgattccgatctcggaaaaggacggtacgtagccaacttcttgtgattaatcaagaatcaactgtagaagaacatataaatttttttgataagcttgttgcaccgttgcctcatttgtctgataaaattttagaaatacattcatgatgggcttgtaccatgggttagggtataagttgaatgcttggaacccaattgggcttgtgtttatgatgaaagtggctaaagagtagataatagagaagtggttcggaccgaagtggtggagaagaatggggagaagggtgcgaccattgaaaaaaataaaggagtgaacatggtgcataactctaaaggaatcccatcgattgcaacgaaggagataccaaagatagttgaactagttcctacattgtgaggggtgaatcaagctggagttaaaaaagaaggcatgtttaagcgtttatttgactctgaattcaaagcaaaaagaaaagagaaaggactatgtttccgctgtgatgaattatacaccatagaccatcagtgtaaaattaaagatcaacgagaacttcgagtcctgttagtacaaaatgaagatgatgagttggaagtatttgaagattcagtagaagaatttgaacagattgaactccaaattgcagaagtcgagacgttgtggtgttgatcgattgtggtgcaacacccaatttcattgcacaatgagtagtagaagaggaggagatcaaagttgagttgactgcgaattacaaagtaataatgggcactggcacagtggtcaaagggaaaggtgtgtgcagtggagtgcgattgcatagtggaggattagtaattgaagaagagtttttgcggggggtaggtggggtgggtagatgttcttttggagatgcaatggttacaaactctagtggtgacagaagtagattggaggacattgacaatgaagtttctgcattaagggaagtcactagtgttgagaggagacccaagcctaaaaatgttacaagtgagcttgaaacgcttggcaaaaacttaggagattggggatcaaggatttttgattgaatatagatccttgcaaggtgtggagtcatgggaagaactctatggaatagaagcaaaattcaatccaacaaaggcgttgacataaattttgttgaagtatgatgatgtgtttgaatggccagaggaattgatcatcacattcatcttaaagaaggagaaagcctcgtgaaggttagaccatatagaatgcccatagtcaaaagttcgaaatggagaagatggttgcagatctgctgatttcagtgatcatgcggccaagtgctagcccttattccagcctagtgttgctagtgaaaaagaaagatgaaggttggagattttgtgtagactactagcattggttcattgaataatgtgaccgtggtggataagtttccaataccagtggtagatgagttgttcgatgaattgaatgggggcaacttggttttcaaagattgatttgaaaccaaggtacaatcagattagaatgcatcctactgatattgagaagactgcttttcgtacacatgaaggccactacaagtttttggtgatgacttttggcttgaccaatgcgccttctacgtttcaagccctgatgaattggattttcaaactgtatccgaggaagtttgttctagtattctttgacaacattctgatctacagtaagaattcagaaaagcatctaggagtggttttggctgtgctgcgagaaagtgagctatatgctaatagaactaaatgtcaatttttaagacgaaaaatagagtatatggggcatattatctttggtgaaggagtctaactgatcccaacaagatctgagcagtatcagaatggccaacccgtacgtgtatcaaggaagtacaacgtttccttggactaatgggtaatagaagacttgtatagaattatggaagtatggctgctctactgacgcaactgttaaaaaatggagcttactggtggtcaaaaagctaatgaagcatttgaaccgttgaagaatgccatggtgactttgccggtttaagcaatgccagatttcagcaaaccctttgagatagaaactaacgcttcaggttatgggttaggagcagtcttgatgcaacagaaacgacacattgctttctatagtcatacactgttgactgcataacgaggaaaaccggtatatgagagagagttaatggccgtagtattggtagtgcaatgttggcgtacttacttattgggacaaagatttgtagtgtgaactgatcagaaagctcttaaatacttgttggaatagagtcattcagcctcacgatggttatctaaattactcggggtacgattttgaagtagaatgaccaggagtggataacaaagcagcagatggattatctcgaaaaccagagggtgttgagttagcctctttggtggtacccacattggtagacatggctgcaacccatgctgaagtttatgaagataccaagctgaaagagacaattgaaaagttgaaggtggatggggacaatgtttcaaacttttcacttcaacaaggtgtattgaagtaccagggacgattggtaatcttgaagacctcttccctatcacacttgtcatgtttctgtattcaagggacatttgggcttgaagaaaattgtttcctctctctctctctcacacacacacacaaatttcatcagtttccatggtagtcatattcttgaccataattctgagtcgtaaatagtgggttaatgtattctgttcattttttcatctaaaagaattaaacatagtggttaatacagcatgattaaatttgtgtatgagtggatcggttctaaagctgactgcactatttttttacactcttctggaagaccactgattatccatcaaaataaaagaaaggttaagaaagtaattacgcaggggaaagagctaggagagagaactggataaacgaatgatgctggtgggcccacaaatgatgaggagtataaatagaatagttttagggataggtgaggcgaggttttaaatagaaaagactgctgttctttaaaagagcagctggcagccttctcaaaggagctggactattttggtgtgttatttccttgttgtttttacttgttatttctttgatatttccttgtatgaactttgggtttattgaatataatcaaatcacagagtactgtccctatttctgccctttttgttgggattcttgttgttttaagagtgaaattctaatatcttcataatgaaaacctgatgcatttacctctagtaagatgtaccttattttgttaatgacctatttgcagtaacattgtgg

SEQ ID NO: 8023 - DNA, 5088 bp, Cucumis sativus
  Intron number 9 from transcript Cucsa.159140.1 (locus Cucs a.159140) derived from phytozome v7.0 (chr-ID scaffold0114 2; pos 1189088 to 1194175)
ccagcgtctatttgctcaaatttcgacaacttcaggtattttgatgatgtacatattgttttgagatgtttttcattccccttcttcctgtaattctctacggctggtagctagaacttggagataagagtgaaggatatagacttgtaacaagtacccaacttttgagtttgataaaacttcaaattggaagaaaatagtgtaatattatcatctgtgttttatgaatcaaatttcaaggttttcttacatcgagaaagaccagcgaccaattaggaaaaaaatattgtagacataaattaagaataacataaaataatattacaagagagaaaaagaaaattcaatagtccccctcaaactggtttgtagatatcatccctagtcagcttgcgaagacatttatcaaattgtcttttcaaaatgcctttagtaagcaattagcatatccgctgtctgttctgtcgtaggaagataagataggcatattacatatgaatcgaccttctcctttataagaattttgtttgatgatgttattgctttcaatatttaaacttattttcatttcttactaatttgtttatggatttctgatgattgttttcagaccactttgacctttggttaatctatgtcttgatttatgtataaaaaaaactagtaatgtgattagagactctgaaatcaaaaatccatgaagatgaattattaaagaaaaggcgtgaagatgatttataaggagtttaatgactactctattcaagatttgtgtttgaattggtcggccttttatctctcaagtctgctagaagtggaagatggtggatttcttccctttatttcttctcagcatttatcgagttacttataaaacgttttgtgatgagtttttttcatttctttggttggcttttgcttttgtatttctttcctttgtttcttctcagcatttatcgagttacttttaaaatgttttgtgatgagttttttcacttctttggttggcttttgcttttgtattctggcaattttattaactttgtggtttagttgttttgctttctattgatgtactattttattattatcattgttattttatgaatacgaagaggatgctaaggggtgttaccctagttgagatgttcgggtatgtcgtatttttattattaaagagtctgtctccttttcaagaaaaataaagaaaggcgtgagggtagttacctatttgtgccaaggaaacacaaaaattaccggaagagatgttcggtcgtagaagttgtggaagttgattgatttgctccgtactaaggtaaactttaaggcacaacaaccaccaagaaatggcagccacattagtggaagaaacctgtttccttaataacaaaaatggtaagtacactttgagaccaaaaaaatgaattggaaaatgccaaactagatgagaaccaccaaatttgaactggtcttagtctggttggtgtgaactgaaccaatgatcatcaaacacaaatggatttgcaaaccaaaagaagactagggttctgagtgatggcttacaacactagtgacaatgacgattctggagaaaggttggagagaaccaagcgacgatcaggggtaagtagaaattgacctttgatggcaaactgaaatgtgaactcgatgatgtttgacgatgacggttgatgtgaactcgatgactgtcaactatggaaggatagaaacacccatgactccaatggcggggttgagaactctcagtgtcacaccccgattcgcaaaacaaccagaacgcaggaagtagtgcggataggatgcgatttagcttaaaaccttgaaattggtcttatcgcctagctcaaacttaactcctttaaactaccaagcgataaagataaacataacgcagcgaaagtaacttaaacttttattcaacaacagacgtttagtatatgaacatacaattacaacaccttgaccaaaataaatgacattgatcaaaactttttaaacactttgtagctttctcaactcctctgcaagcccttcaaccttcttctctacttggcctaaacggctgatcttggaagatgaaattttaaaacataagtctaaaagacttagtgaggttttatgaaaaccttttcacaataccctttgataaatcctttttgcccaatcataaatttcaatacaaatcagtttatcaataaatacataatttcacaaaacacatcaaaacacatataatcatttttacaatagaagtagatcaactcgcaaatcacatcaaatatacatttcgcataaacaccaattagtcacaatcattcctttcaccaaggatcccgaatcgttctctacgcttggtctcattacctcgcatttagactattgtatcaacggcattcgagaacatatagattcatccttgttgctcaggccgcctaacacaatgcagtcattttctacattagctgacttcactccaccatgcaagccttttctacatggctgcctttaaccttatgtgcacataacaattagctcattcaagaagcaactaatagtttgaaaaccattttataatcatttaaatcacataacagctgatgctgaaggattgctcatgtgtagcctttaattttgagattgtaattttgggccttccctattgtttcttgctgttttttctggtcccatattgttttctggaccattgtatcaagctgaatgttttattgttgtatctttgttgggttttttatgttttctcgagatatgatgcttggcgctatggggtgtcatcctagctgagatgtttgagtgcgcctcttgatccctctaggactcccttgattataacttctttattcctctttgtataaaatgttttgtactttgagttcatattaataaagaggttgattgatatttggttgctcctctattggttttttgtgttgcttcgatgttttctttctcgagatatgatgattggcgctatggaggtgtcaacctagttgagatgtccgagtgtacctcagattcccactttctttttcttctttattgctttctttgtataaatctctcgtacttagagttcttattaataaagaagtttttgtctccgtttgaaaaaagaaaatacaaggtcttcttagctcttgagttcttttttttttaaacggacacaaaacttcttaataagaactcagagtataagagacttagataatgagagcaataaagaagtctaaaagagggaacctagggggatttggaggcacacccagacatctctactaggttgacacccccttagcgccaaccatcatatattgtgcatacaaaaccaaaacttatataagttaattaatgtccagcttaatacatagggccagcagacaataaagaaccagaagaaaatctaacacctgggaaggccaaagaacataaaaacacaaaatttcaaggctaaaaaaggaacaatctaccaagacttttagaacacaggaagaggcttgctgtgcgaaacattcagactgaataatctgcaaactgaatcaacaactaaaatgctggttgagagagaaaagcagttcagttgaggcaaatgcatggaataattttgaaatccttatttaaggagcaccaagctgctgcgttatgttctattgaacaaccgatttctgcccttggtctttctttatcatggaaaatttgttgattacgcttgaaccttaattttgcgaggagagtttttgagaagtttttccatattaaacgtgatttcatatgtagagatgggctcggcagaagctgaatttgcgtttagggatcaatcaaaaacccaatcaaagttgaacaaagagaaggaaggagacatttattgggggatttcttttgcaagatttcttagctgttaaggaacccgaacaccataatccaaatcaggatattaattcttcatgagctgcttgatttccataaagttgtaaataaacgtttgttcatcagggagccaatttttaggtgagccgaaagagacttaacagtttaccggtaatcattggaccgaaatatctgtaataatcagaattattcacttttttagacaagagaagagataataaagattgaaattatgcaatttcatcatctttcaaacatcagaacaaggaccaagataaagtttcaaagtcccaatgcgctgcaaccgtgctgtttgggcaaaagagcaattctgaaaagcttgaaaaattgctccttaagaggggtgacaccagcccaaagatctgtccaaaatctgattctacgaccgttgcctagtttaaataaagctagtgagtccaccgacgtccacactctagcaatgcttacccaagtactccttagactgttactggactttccttttgtaaaccagtcaaatgcctctttaccatggatgctgctaattaattgtctccaaagagctgactcttcctttgagaatctccacccccacttagcaagcaaagcagtattatgaactttaatgccacctaagcggagaccccatcttttattgttgatgagaccttgctcctatttacaaggtggttaattttgctaccagcatgttcttaaaataaaaacatacacggtcttcttatatagagaaacaccaacaaaccagtaaggaaaaaaatattagacataaatgaagaataacacaaaataatattacaagataaaaaagaaggaaattcaacaataagtaacagtagcgaagaatattattagtgggattcatggaaggacgataggaggtaaaaaaggtgaacttgttttgctcatgcccatctttcaacccctgggtcaattgagctcccagcaaataaattatgcttcccttttgagacaataaaaatggtaacttgattttgagtcttagccttattgacacattttatattcatttacttgtcagcaagttacttttccccatctttttccattcttatgacagccatgtacatcttgttaactatgtatatatatttttttatcattgtacagtctcgggcacttggt

SEQ ID NO: 8024 - DNA, 6752 bp, Cucumis sativus
  Intron number 1 from transcript Cucsa.343680.1 (locus Cucs a.343680) derived from phytozome v7.0 (chr-ID scaffold0336 8; pos 9068 to 15819)
tttgctttcgacaacgtttgcaagattgctttcgggtaagtttaaattactttgttttacttcaatcttcgattggttatagtagaacaatgaatattagatttacccatctttgctttttcatattacaaaataataataataatcttaaaatcaaatatcaattccattttctaaaccattttcatgactttaaccacatttttcttaacttttggagtatttttggttgagacacacatttgtagaagaaaactgaaaagtcttgtcaattaattggaaatgactaagcattatttcaaccatgattacttttgacccctcctttttatttatttatttatatttcatttcttattctttttaaatgttgggtttgttccatgtttattattattatttattttcaaactgatttgtttttacaacttttctaaaattaactatttatttttctgtttctacatttttatttatatttatatttcaatattatttaaatctatagtagagtggaaaaatatggtcaacaatagctctacaccaaaaggagtccacattctcctcaaattactagatctcaagtcacttttggaccatgtctacaactactattacacctaacagattcacatggtagtccacaagttacaaataccacacttaacatgtgggtcgggtgaatgtgttctatgcgggtaatgggttgggttagaaagatattttagaccaactccgaatttttcggttgatcaaattgaacaaccaaataacctaaagaaaatcttcaatccaatcattctcaaatttcgagttgggttgggttgttgagttatttatttcttttattttcttaactatattatttattagctttaaatacttaaatatataacacattttaataactaaaatttcacaaaacttaaacgttagtcatcaaaattcaacatttcgaaaacattctataataatatgtatgaattataatatttataagttgtaatatgtattttaattatattagaaatttgggttggcttgggtcaacccagatttttaaaaatgtaacttgaacccaacctaacccttataatctgatttgggtagttcgggttgtttgggttattggaaacccctaacgagtaccacgcgtttaacttatggacccaatccatgagtacattttttaaaaaatatttttgaaaataaacgtgtaaatattgacaataaaaaggttcactgtattgtcaaggaacacaaaataatttttttataaaatattaagtcatacctgtttaaaaataataaccaaagacaattatcaattaagtgtaatataaagcattgtcccacccattgtgtactgacctaccggccttggccaaactcacgccattttgagcgacagagtttttctgctagattccttcaacgcgtcccgcattggaccatcaattggacatgcgtgtatacgagtcaacatgtatggaatgacatgattgtctctttgactaaaggcatcagctgcccgattactcactcctttcttatgtttcgatccaaaatcaagttcgagcaggtctctctgcctctttgcttgacttgaagtctatttcggttgagtattaaagtggttggtcacaatgttgttcgtctctcttacataagtagatccatgggaatattgtcatgacaagcgtttattcttcaaacaccgtataactcttttctgtggtactcggttttttactcttagatgtgatgagttgtccattttgcacgatgacatcgcccaacgcataaccaaatgcataagcatgagcttcaataggttggatcacactcacagacccaagagttggcccttccctcagggcttgcttcaagacacagttgtcaacacacaatcgtccattctcttcttcccgtaaaaagacttgggcttcatacagagcttttgtaggtctaatgaatcttgcactcaacaatcccttcgattgtctccaaaatttagttaactccggcagcaccacacgataaatattcttcgtaggcgattctgacataggcaaattatcaagtatcccatcacaatatttctcaacgacacaccttgtgtcttttcgaactatttcccttagctaccggtaggtctaggcaggatgtccctgaacaatgtttcatctcgaacacgaccctctctcagttgcatggtcaagatcattctcaatcatttgggttagcgaaggtatgtctgcacaatggtggggatagacctagtgatcaccagacatttggctgaaggcattaggatcacttgatgctcaagaaggaatttcatcctgagtactacatcaaagtcatccatacctctacaaccacggagtctacagaccactccatccttccaactgtatcatcgctcatttcactgatctgacgacggtaaagctgtagaatttatgaccttcatttttcttgtatccatcttccaatgaaggttcagtcgtctgacttctgccactgtcataaaattgtgggttgtaccagagtcgatcatagtgctctttgcatgcttttggttaacccagatgtcaacatatattagaccccttttcgcatgcctacttgtctcccctactttcttctgaagagacgacaagaatctcatgacccccactctaggattctcaacttcgtcacacttgaccaacttcttcttctgattgactcaacttgtcatctaagtctgaatctaaagctaaagcggcctaaaaggcatagaaggctgatttattcggacattccttagctcgatgtgatccgtcacatatgtagcaattgaaaggacgatttgatgtgttcgaactcttatgtctttgccaggtgtcccccgtgttggggttggaaaggcttgcggtctctttcgggacttctgtcttcactgacagctttgggagaatttggtcggttgtttctatttctttcgggtgaagaactttggtgacgtcttgtattttgagactcactaggcatatcaaacaaatgttcgactattgcataagctgacatgagattcgaaatcctctacttatatagcttagtccttgcccatggcttcagcccttcgactaaatagaagatcttgtccttttttgacatgtcgcatatgtctaacattagctctgtgaattgtttcacatactcccgaatggtgtcagtgtgtaattcacacagtttttgtcgagccaaaatgtcaacattctcggagaaaaattgtgaatgaagtttcttcttcaaactgccccaggtacttatcgtgcaacgtccttcctaaatatcaacatatcgagaccttcaccatatcttcgcatcttctaactggccaacagagtcggatgaactatccccacgctcgtaggtgacgttaccgcttttcacaactcatgactctagaatgtcaactctagtcaataaatcttgtatggaaaatccatcgaaacgaccagacaccgcatcaatagcatcggctttcttgaaaactttctcaagccgcttttcaagaaatcgaatagaattagaagcttcaaccaagtggagcatttgctcttcgagccccaccaatctttcattatggatcatacccgtctatttcacagtccacatctttctgtctcaactttcaattagccaacttggctctgataccaattgttgcaatcgtagtatttcaacctcgagatagacgattgtgcggcacttgttctaactcgatgaactagttcgtcgatcgaaattcgaaagtcacggacaaagttgatgtatgatgtaaccttcctttgtgttcttgagaaaattgtttataaaacgcgagaaaggaagaaatacattgaaattgacgtcacaatatgcattaaagactgtcagttgcaagggaaaaatgtttgtttgcaaagagtgcgacaatgcttgggcgaggattcagctggtatgccacccctataatacattttggacattttcagctctggtaggcttgcataagaaaatgccaaaacttcactcccaagctttatgacttaaaatggaaagtaactacctaaactagatatgagacataaaaataagataaattgggggtattcgagcatatggccataggcaaacatgccctgaacaagtatgaccgtgacacaaagcatgcactatcccaagaatacccacctgctcgaaaaaccccaacaatagcaagaacattaggtgcattaacttatttgacttgtcagctaataaaaattcttcaatgtgttgcatgatgtataatatcaagagacaacttaaaaaactctatgtctaaccagaggacaaacaactatgacccttttaattctagaggtcgaacacctaataaatcctcacaagcatatttcaagtcatatactaacgaatcagtcacaagttcctcgcccacaggtaatctacattgaattgcaatatcttgcagtgttattgtgcattccccactatgcatgtgaaaagcgtgagtttatggtctgcatcactctactaaaggtgtgctcaggtgccaatacaattggatgaacccaatgtctacaacatcgataaatctagcctgacatcaatacattatgatctagtagtctaatagaataccatgatcaacaacatgtttccatctatgacacaccaaaacaatagtagcctaagtatcccatactgattgtgaaccgtgtgttggttgttgatatatacttgtgttgtgttagacaacttgtatccgttgaaagatttgtaaatacaaattaaacattgataataaagttacaaccaataacatgttacatgacaatctaaattactaaacgagtgttacacagtacaaatgaaaaaaattaagcatacacaataaatttactttatactatagtacatcccaccataaataacttacattacaatacaaatgaaaaaaattaaaatatattaaacatcattacaaatggattacaatacaaaggaatttttttaaaaaaatctattaaacatcaattacattatatgaaggggaaaaaaattgtcctctatagctcaaagacgaagcactagagctagtgatggacaagtacattggtaggttcttctttgcatatagtacatctaacttttgcactccattcgtgtcaatctatctcattaggaattcaaggactttttggacgttgatcttctcttgacaagttctcattcagttgaaaattaccttaaatgacgccttaggctagtagtctttttgtggtctaggatgaaagtggtcattgtagcatcgttagtatttagatagtttgtaacactcgtcagtaaaagataaatgtaccaagtgcatataattgcagcctacaatgacatgcaaacatgagatcttgaaacactgtcacttgttacaataacatgttcactcctttaggctctcacaacgtgtgtttgttggcctttgtaaggagatatcatactgatacttgtttctatcttgaagctttgtgtctttatcaataaatttcacagtatgcataacagctcctttttcccaccttctcaatttctttatagcatattttgtatacatgtccgcgggatcaagtggttcactgatttctcctctactgacttcaaactattgttgtcgtcttagctctcttaaataccccactcttacattctcatatttttcatcatccaacaataatgatatccaccatcatatgattgtgttcatttgtcttgaaaagtgtttaggacattgttataattttttcatgcatccgatgaactttggtgcttggagctagttagtagccctgtataccaaaatttttaactcttttgaattcactctcaatcacaaccttctttttacaacttgccacatattttggtttgattccaccatgataatttgataatgatgagtcatacaatacattttaacaaccgaacataatatctctttctgtatcagacctaagttttctacacattttttaatttcatcaaaagttgaaccacctttacaaattgaattcttaatattccaatcaattgatgtgaaaacatttgaaggtaactaactcactttctttcggtgcatttaaatctccaaataattatcaacctcaatctcataatatcactgtactcacaacttaaaccataatacaaaaggtgtagacaatcttaaaggacctgtttagaattgtacaaaataatagaaaaaacattcacactacttaaaccataatacaaatgaacaccaaaataaattatttgtgtattaaccccaaagtttcatagatccaaacatgtaggttaaataaaagaagaattaaaaaaaaaaaagaaaaaagataagaacccacacagtcacatcaggagcggcagtaggtccatgagttcctgctacttggcagcatgtacagacatgccattctataattgatgtacgtgactctccacctgttagtttagtcgtggacgttgtccttgaattacattcaaaatcgtggatgtggacctccttcatcctatttttttataatacttttgcttccatcctatttttgttattatttattaattttataactgaaaaaagtggaaacaaaaatgtaaggtatgaaaataaaagttgagggagtaaattgagaaatttgtgtgttaatatttgaacaggt

SEQ ID NO: 8025 - DNA, 8588 bp, Cucumis sativus
  Intron number 10 from transcript Cucsa.052130.1 (locus Cuc sa.052130) derived from phytozome v7.0 (chr-ID scaffold005 72; pos 32585 to 41172)
ataactgcagagacgcctatttgccagtaagtcggtttcatatttctttcttattttacatttgaattcatgcaaggaaattgagtgtctttttccacttcgaaagtattgagtagtatatctacacttcttgatgatacagttcacatctcatatgttgtattgattttgtaaaggcttccttttgatatggggcaataaaaaaccctcatcccttgaaattgcatccatcttatatagtaatcttttcttttctttcagttcaattttatattgaaaagaaaacaaagtttttcactctaaaataaaaagagactactgctcaaaatactaaagaccaaaataaaataccacaattaccaaactactacaaagaaaagaaaaggattaagtaggagaaataaaaacaatccagatcaaatgtgaagaggcttgaactgaagctaaaacaaagtgagcagtccaagcaaaagacttattctgtataacccggtgaacttttccaaaccaaggctttagcagaaaaactacaactaagcttgagaacatgcacgctgttatatgatatgacattagatttatcttcacacgtctaacagatatgtatctctatttttttactattaatgaaaacacagagattgcaatctactgcaatggaccagaccagtatgggagggaatcttctctcccaacagtacaaaatgacttccaaaagaaaaatcattctgcagaatatagaatttttttaaagaaaagacaaacgtagctgcctaagaaattataactcaacttttaataaatacattaactgtcaaacactatccattctaatcatcggttgaagctgaaattccttttctacccttgctggaatatgcctttgtaagtgtgggtttatacggatcatcatcttatctttcgtatgtgattgggttttgtatgattgtatgtatttgaatgcatgcatatttgttttttgatatttcttcaacctttttatatgtataactataaaattttgaaatctcagcaatgtcgttggtaggcttccacgatatctgcagaatatcaattcaaaaacatgaatatcaattcaaaaacataaaccaaacaaagatattcctatcgagatactcaaacacataaatatcaaagaggaatagttgatatacgagttataactatcaacacaaaataccagaaagtcacagtggttcagccaaataagagggctgtcctctcccaatgaaacttagttcactcaaaatacacacaatattcagaatgcccaaccctagcacaaaacacctgcatatatacttcccttttactgctgccacgtggtgtgcaaggaccactgacatctctaactaccatgttgtctagcctgtaattcctttcttgcccctccttctatacatatgggttattggtggcctagcaatacccctagagaagagacaccttgtcctcaaggtggaagtcgaggtattggctttttaacatcgcataagattcccaagtggcttcatgtgctggttgatctttccacttaactaaatactcccattcacgttcggtatcattctagtgcagttcagtcacattttctggctctagcactaattccatttggtcgttgagcagggaaatgtctggctgtacatgatgcttgtctcccactgcctactacagttgggacatgtggattcaagtatttttttatggaggcgtggtaggtggtgttgtaccaatactcaacccatgctattttttccctccacgtctatggtttttcatgaaaaaaatatcgcaagtacaactctacactcttgttcacaacttccaattgcccatccgtttgtgggtggtaagcagtacttctcttcaattgggttccttgcaaacggaacatctctttccaaaagtgactcaagaacatacgatcccaattggatataatggagcaggggtacccatggagacaaacaacttcttttatgaacagtgtggctactgttttggctgaaaataggtgtcccaaggttaaaaagtgagtgtatttgctgaggcgatcaaccaccacaaggatcgtgtcaaatcccttggagtgcagcaagccttctataaaatccattgatatatcttcccaagttctgttgggaatgggaagaggctgcaacaaaccgactggagacaaggcttgtattttgttttgttggcaaaccggacactgatcaacataaatcttgatatcactcttcattccttccgaaaacaattccgctgcaattcttttatatgtctgtaactgccccgaatggcccccaaccacagaatcatggaaggtgtgtaggatggtcgaaatcaagctggatgtccttgtgaggaccaaagaataatttgccatggcgtaccaaataacgaggcacacattctgggtcctgatccactcggtcaaatatatttttcagcttcttatcctcttgaactgctttctcaacggcctcgagatccaacaaggacggcacactaatcacattcaattgtgcctccatcgaaatccacgaaagagcatcgactgccttgttctccggtcctgttcgataaaagatttcaaaatcaaagtcgatcaatttcatcattcatttctgagcgcctggtaaaatctccctttgctccaagatgtgccacaaggccttttggctagtatatacaacaaaacgatgtcccaacaagtaatgtcacgatttgtcaacggctaatacaattgccatcagctctctttcataaatagacttttccttggctgtctctgatagtttctgactaaagtatgcaatgggtctcttgttatgtgataaaattgtgccaagatcgaaccctgaagcatctgtttctattttgaatggcaattggaaatctggtagtgctaggactggtaatgtgaccatagctttcttcagtgactcaaatgctttggttgcatcttctgtccaacggaaactgtttttctttgtcaaccgagttaggggagtggcgatagcaccataatttgctacgaaacgtcgatagtaaccagtcaaccccaagaaactgatggaactcttcttgatcaaactcgatcaagtaggatcagccttgttacgatagtaataatgccaaaagactagcgaaattacaatctaaaacgaattgaggatgcctcaattcgaaaacaagggactctcctatgctctcctttctctctaggaaaagcctgagttcacccacaaaattctaactaactttctctctccataacaaactcctatttatactctattcttttattatggaaatatctactaacaatattaaagctattctccctggcacgtgcgattatccttgcttcttcttccttctactgtactgatgtataattgagcgaataacccctgaactttgaatctcttccaccaatctttccatctcagccttttgttggtatccatagaggtacggcctcacattgaccgggtcagtttcttgtttcaaatagatgtgatgctcaatactccttcgtggaggtagagtttccgaccatgtaaagacatcttcaaatttcttcaggacaactgaaaccgcctcttccacggttagtacctcctcatacactgtctccattactctgcactcaattaagaatccttgatcagaatccttccatgacttaatcatgttcttgagaccaaccatgtctttggttaagctggggtctcttttgattatcactttcttcccattgtgtagaaaagtcatggataagattgtgcaatccacttctgttattcccaatgaatacaaccactgaactcctagcactccatctactcctcccaactcaagtggtaagaaatttgctaccactttccatccctcctcccaactcaagtggtaagaaatttgctaccactttccatccctccagttttagctctatgtcttcgcacactccttttcccttcacagctgcacctgagcccaaaatcactctatagtgggaagtagtcttcgttggtaaactcagttcctgcaccactttgttcgagatgaagttatggatcactccatagtcgattaggataatcacttctctatctttaatctttcctctcaccttcatcgttcctggattcgtcagcccaaccactgaatttatggaaagttcaacgatagcctgatcttctggagctatcttaacacagttcaattatgtctcatcacattccgcttccttcacaatttcatattcctcatcttccttcaccactacattcttagttccctttgctcctttcctttacatcgatgaccatgaaattacttttcattacaacgaaaatagagtcccttctcttttcgggcttgaaactctgcatcgggtagtctcttcgtcgggccttctttcttaacttctccagccattgttcttaatgtcatcgtcctcattggaaatatggtatttcctttgttctcactgttattcatcgttgcactacttttgatgtttgaagagtttgaaagggggtatttacctttggcataaccgtttaggtttgccttattacgaatgatctcccggttctccacgagttgaaccgcgtgcatcatctcggccaaaccgaccggtttacaaaaaactacctcagatttgatccacgggaacaatccgttcataaacgtctcctctaccacatgatcttgtaggtcagcgagtggtgccatcaacctatcgaactcattgcaatattcttccactgtggtttgttgttcaatccttaagaattgcccgtagatggatccttctctcgacgatcgaaatcgcacaagcaatctctccttaagatttggccatcctgtaaacttatcgcgttcttgtgctcggtaccacaagaaacacaaaaagatgacgttgggccttcaaaactgatggttgccaccaaaaccttctccgtattgcttagtttgtggatttggaagtaccgaccggcggggaatagccacgagtccgtatcctcgccattgaatactgacatttcgaccttcttaaatttgtttctttcatttgcaccttcttcgtcctgagtcctctccttcgtttcgttctcacctcttctacttgtcgaactctctccttcattatttttcttgcatccggtttcctgtgcgctgtagtctgacaacttctcactggttgtcgttcgttcttttgcaatagaatccatgagtatcatcaacatttgatgtgtcttttcagtttgttgactgatcgtcgttaagctttcttcgatcgccggaattttacttgcttctttcttaatcagcaacatttcctgattgtgaacttccattctctcttccgatcgcgtgtgaaccatagttctctccttgcccagattcgacaagctctgataccaaatgatgaaactcctcttgatcaaacccgatcaagtaggatcaaccttgttacgatagtaataatgccaaaagactagcgaaattacaatctaaaacgaattgaggatgcctcaattcggaaacaagggactctcctatgctctcctttctctctaggaaaagcctgagtttacccacaaaattctaactaactttctctctccataacaaactcctatttatattctattcttttattacgaaaatgtctactaacaatattaaagctattctccctggcacgtgcagttatccttgcttcttcttccttctactgtactggtgtataattgggggtctatcagaaacctcataattctctcacattttttggaattggccattccaattaatcttctgttgctcagcttccactccttttgctgaaacccagtgacccaagtactcaattcggtcttttgcaaattggcacttctttcgattagcgaagagactatgttgccgaagtaattggaacaccaaggtgaggtgctctaaatgaacatctttgctgtaaaccaaaatatcataaaaaaataccagcaaaaatttatgcaagtagggtctaaaaacctgatttgttagagcttggaatgtcgtcaaagcgttcgtgaggccgaacgacataactaggaacttgtaatgaccttcatgtgttctgaaaacttaattcattagagcttggagttgttccatttcgggttggactacttctattgattctgctgcaaccaacatccgatcggcctttgaaattcccatggccctgaagtcaaataaagatccttgatcgtctggttgccacgttttaactagcattttcaaggatatttccattctggtcagtgaggggtttcctttcaagattatcttagtgtccctgacaacgaaggtcatggttaaagccaatcgacggtcatagcaccttgctctccgagccactacatcccaagtaccatatctaagttgcaattccaacggtaagaaatcctctactcatagtcaacactggcagacctacggtgatgcccttgcacattcctcggccttacattgccttttcggatcctataatgatattgtagttggtcatttcagtcattggcaatttcagaccatctaacagtttgagtgatataaattgtgggttgctccacaatccaccatgattactatctctctgtcttccactgttcctttaattttgaacgtatctggagttgtcagtcccaccactgaattcatggataattccacaaccgtctttaaccattgcgtcctcatgctcgacgtattccatctttgtgtcctctaaatcatttgctaccaggtaaaggtggagctctttgtttttgcagcggtgtcctttactaaacggttcgtcacaccgataacaaagccccttgtcacaccttgcttgcaactcagaatcagtccatcttcgaaaagtattctcgccaaaccccacttctagatgcgatgacttgtgaagtgatcggagtaggtgaatgtgcgggaaccctttgggctaatatcacgatttttgttgtagggttttctcaaatttttgccccttgtttctaggctggttttccatcttttgcatatgggccgtgagaagccagagccatttctaatttctcctcagctaaccgggtcgcatccatcatatcttccaggcctacaacccgcattgcgaaaacctccgttctaatcactgggtccagaccgttcttaaatgtccctaccaaaacgtcctcgaccatctccggtaacggcgccaataattcctcaaagcattgcaggtaatctcccaccgaactctcttgttttatggccaaaaatcgcccacaactagtcccatgctcttgacaacggaatcgattgtacatttgttccttcaattctttccacgatcaaaaacacttccgattttccgtccaacgaaaccagcacaaccatttcccttccatactgactatcgcaattttcagcttctcttgtcattcagtaagtgcatctgaaaatattgttctacccaataaatccaaccatctgggtcttccctgatgaaaacaagcatctccgtttttttaatcttgatgcgaacctaccccacccctggtttcaaactcagagacgtttctccttcctcatctccttcgttaatgtcttatgttctaagtttcctcttgtcggtgcttacaccggtcagtttcgattctccctgatgctgttgacggtcttcacacatttctgttaacattgcgtgcattttttccatcgttttctccaaaatcggtaacctgtgaacttcctttttaatcgcttcgatctcaacttccgaagcgtccaaacgttcttcgattattttttgtcattttcttccacttccccaggatgtcgaccagctctgcttccacgatacctgcagaatctcaatccagaaacatacaccaaacagagatattcctatccagctactcaaacaaggaatagttgatatacgatttataactattaacacaaaataccaagaagtcaggatggttccagccaaataagagagctgtcctcccaatgaaactcagttcattcaaaatacacacaatattcagaatgcccaaccctaacacacaacacctgcatatatacttcccttctactgctgccacgtggtgcaaggaccactgacaggtctctatctaccatgttgtctagcctgtaattcctttcttgcccctcctatacgtattggttattggtggcctagtatcgtgtttcaaacattgatggatagatatgattataactaataatttaaactcagtatggatggcctgtgcaatatggatcctcacttttttggaatatcatccacatagactagtaaggttataaggttatagtctgatgaaaaatattattttcatttcaaatatgtatctcgtctcctaccacttcaggttaaagctcttttgccatccattttgttgtttctcatagttgatatcgttattatggtaccatgcaatacgtattcatgacttggaattgttttttccctcaatgtagcgagtgtt

SEQ ID NO: 8026 - DNA, 888 bp, Cucumis sativus
  Intron number 1 from transcript Cucsa.271130.1 (locus Cucs a.271130) derived from phytozome v7.0 (chr-ID scaffold0250 0; pos 69023 to 69910)
tctcctacaagctcgtcttctatcttgccctatccgtgcgtatcttcttcttcttcttcttcacgttacattattcttttttaatcactatttcagatctacttatcttcgtttcttcatatcattatcgagaatcagtgatttccattataatgatttgatttcgacaattgatcttcaagatttagctacactgaatattcgatgaacttgactaaaatcaatgtgagacttgaacaatgaagcgcgattatcttagcacaatagcattgttacttagtgttcacgtgcgtagcgttggtagtttaggattcttatttttgtttcgtaacttttcaattttgattacggtctcttctcggaccgtctctcgatactgctagggttttgtgcgaagattattttataaaattcgatttagttttgaatgttcggtttgttacgaactgcgccttagttttatcttcaaattttggtgcatggaatccattttcccgatgcatatcggcttagtcgcttctccaatttttgtctgtttgctagtgattaataaatatccgtgaaaccatgctaaattccgtgagaatcgtgtgcgccgaacaaagtagataacggataacatttagcgtcacggacagctactgatcttaatttcccagtgatacattatgaaagtgaaatttcaccagctgctctaataatttattagcaagtgtgcatgtgatgagacatcctcttcctgcgaactgaaatgaaaaaatttgctattagaaatagaactatacggataatgcaatttccggagccagaggctttctctaattttccgctaagatgcttagctgcaaatttcttgcttactaatggtaatttgttgggatgcaggat

SEQ ID NO: 8027 - DNA, 1265 bp, Cucumis sativus
  Intron number 1 from transcript Cucsa.090690.1 (locus Cucs a.090690) derived from phytozome v7.0 (chr-ID scaffold0089 4; pos 1880413 to 1881677 reverse strand)
attcataatcggcaccatcgtcctcagtttcaccggtacgtttaatttggatcgaaactctgatataaatatgttgaaaaccatagttgaatcaagaattcatgttgcgttttgtaatttttaattgccttgttcctttttctttgatgggtatttgattttgtttgtttcctttgaaattagggagtgagcgaaaatcttcgtgtttctttgttgggttttgttgcgagtgtgttgaagaagtggaaatagtagttgtaatcttgtttcattagaaattcttggaattagaatctgtgaaactgtgtggagttgtgaaaatgaaaatcttagtggaattgaattcttctggtgatttttcttgatcttcttgcttgaatttctctcatagatttggttccagattaatgatacgtgttgaagaaggcacatcttaaagccattttatggtctattccttttgtttatttggtaaagtattacatctagaacatgtttttctgactgtttctttgttcttttttacactctcccaataaatattccaagatgtacagaagaaagaaccaaaattttaatcatgtttcaaattagagcgctttttgaaagaacacttgtagagtgtttttgacgtgagtgattgttgtggaaatagtttgaaaatgtagaactaaacttccaaatgatttcatcaacccttttcattgaagtggtttaatcccagtatttttgggaaaagttacttattttagaagcactctcagctgcacctttatggctataaactttcaattttggaaattaaaggggaaattagagggaaaagtttagaatctcaattttgtgttgcatattttctgaatctaagacaaactaacatgccttctttcgtcggtggctctactttggtgagtttactatgattattgtattacccaagtattaatgtactaatgcttatcttgacaagaggaattttattggcgataagtgatggaagaacttaaagtattttgttaagaaacaaaaatgatgtatgaacatgattgaagtttttatgtattggatgttggttttgttttgtagactgaattttactatgtgtttatattctggatttgcaatatttgaagggttgtcataaaggaacatcttttggttatatcatatcaatacatgtatgtttgttcctcatttgttgacacatttatttagtatttactgtttctgtttctcattttttaaaaactttttatagcggagaa

SEQ ID NO: 8028 - DNA, 2100 bp, Cucumis sativus
  Intron number 5 from transcript Cucsa.366760.1 (locus Cucs a.366760) derived from phytozome v7.0 (chr-ID scaffold0362 5; pos 273909 to 276008)
gcaaggtaagattcttctaaattacttctggttctggttgccttcaatgtgagacatgtctttctatatgctattctcaatctcattcaaccaactagagcactttctttagttggacacagtatagtttagtggcagtgcaaaattgctgcttctcttttatttattttcttaaaagatttatagcaaccacttcttttgagagaagaagaaaaggaagaacacaagggtatacaaaaacgaagtcccctagaagggatgggctttgacaatacaagacggtgcctatttagtaattacagaaatcttcaaaatcaaaccccatggagaaaattgaaatctaacgagggaccacacattgctccattgtggtgctccaccttcaaacacttgattatttcgctccaaagatcccaaaataaatctcataccctgacaagctataaaaagtgatcattctcatctgcatggaagggggatggaggtggaactcctcgatcatatcacaagtatccttgtgttgagctagtgagaagtcatacatttgagagaagtaattccactcaaattttgcaaacgcacatcagtaaagaatgtgatccaagtcttcctctaccttccgagttccaacagagaatgcaacaaagctagccaacttcctcacaagccgattcatagtgtttgctcttccaattaaaatttgttgggtacaggacttaaacttctctaggaatcttaatcctacaaagagtagaaaaaattgactcgcctaagggagaggggtctaacaaactacgaaagaagaatttccacgagaatttctccaaagagttggggcttcacagaagaatatcctctctcccaagtccaaaagaaaaggcctcaagcatggacaaaagataggtaacctctgttacttctctatctgacaaagaactacagatgaaatggaaatagggaactcctctaccaaactaaaaaattgaacaccacataattttttaaggaagacagataaaagagacacaaaaagatcgagtagaggggtctatcacccacccaccaattttcccaacaagatgtattcttcctctccctcaccacacaatggattaaatgagagaaagcagggaactcttcagaaatgccataaatttcgtcaagttcctttagccccaagtgacaatcattcaaaaggttggaactgaactttttaaaatagaacacatgtgataaagagaggggttgaattgctaaagacatttggctaatagtgctttgttaagaatccttaaatttccaatttctaactctccaagacaaaagaactcgggaaaaaatgccaaactataaaaaataaaataaaaaagcctcttcaaaagagggtccagttatttaaaataaaaagaaaatgataactacaaaccaaaggggacgcgttgaacctactagacggcataatattcctgcatgacatcacacgtgcctgctttgttggggtggtattgaaatatttacatggaattttgtgggatttggtaacaaaacttttatcatcctttaggtcttatttttttggattgtagtgctcctgtctttagtttgactccctctttaaggttttttgttatttgtttgttctttgggtttgtttttttgctgtttgtcctcctattctatctttgtttttctatggaagtttgggaaaaaccaaaaacatggaactctttttcaaacctgaatttattctcaactctcatccttctccatatcggttcagatttccctgcaaatttgtgtgttacatgcattttttatccaatctcaaatttataattttgtttagtttaaagacataagttctttaatagacgtaaaggttgtgcaaatttattgtgctttaaaattacactggtatatgtaccagagcctataggcagtctttttcttattttttgattccatcttactagtgaaataaagttgtactcttaagtaactactcattgaacttcatgcatcacactacatctttgctagatggtagttagacattgaaaggaattttcttttgattctatgctcatcatcagattgcag

SEQ ID NO: 8029 - DNA, 9109 bp, Cucumis sativus
  Intron number 2 from transcript Cucsa.181050.1 (locus Cucs a.181050) derived from phytozome v7.0 (chr-ID scaffold0123 9; pos 79038 to 88146 reverse strand)
acagaggctatggcggtggtcgtggtgggtatggtcgtggtcattacggtggccgtggaggctatggtggtggccgtggtggctacggcagaggttgccgatatggtcgatgtgggcacaagtgctgcagctacgctggtgaagtggtagagggtgcaaaaccctaagagaaggtgtagaatgggatgaaataataaaaaggtttaaagtttgtgtgtttggttaaatgtgtgaacggtagaagtttgagaaataaatagatggggaatggaaggagtgggttctgtagtttttcttttccccatgtttgggtttgttttagtatgttatttcaaacatttgcttttgcaaattttaattttataatatcaccaaacatattttcatttcctgtaattaacgcttttatttccataacttgaacataaattgatatttttgtcaacaacaccaataaatttctttttattattaacgtggttatttaaagattaggatattatttaaagatagaatatttttctttcctaacatgaatcttttatctatatctctccatacagaagttaccggaaatatattatatcgatctttaaataattaaactatattggcttagttcgacgtgcaaattgatagaaaattgatttcaaagaagttctctttggaagatcaaattattgtttgtgaaggttgtcgaattgcattctttatatgaagatggaatattattgaagttctgcaagtggtttttacgctgcacctgttgataagaaatatgaaagaagactgaaatagttgaactgtggtgaatgaattcaagggagtttgagtttatcttcaaaaagattcaaacacaaattcaatgaaagtcggtctttaattaagtttttgtaataacttaaaagtgttttccttgctcatttaaatcttatataataatatttcttatatgagctaagaagcttccagatataggtggtattcgtcaaattaggctaacaaagtcttctgtattattgttttgtctgtttctttagctattctctcagttaattactttcagatattattgatcgtctcacttatttttagtatacacacattctttcatctttagttaaaatcttcaatatatttcgttagaaaaaagaaagaaagaaaaaaactcacatgatcactcatactaaataataataataataaaagaaaacatctaaatattaaaatgggtgaaaatatttacctacatataataaaatcttaattctattaaccaccttgcctgcagtatccaaagtttacggtggtactcaaaatggcaaccacaaccaaataaatttatctatatttgatggtctctcctattctatgtaataatagtaataataattgttgttgttattattattattattattattcattattcattattcattagctcaattttaaagctatataaatttttcttcttcccttctatcactcacacattctctctcatcttctttgtgactcatgttcacgttcccaaccattttctttcggtgtatttttatgtaagataaaatctaatgaaattgtgagcaatcaaataaatccacgtataggagaataattatttggtgtaaaacaaggagaacttctgtgtttttcaacaaatgtatagagaatccaaggaggcctccaacgatgtcaactatgtctcgaataagcaatatttctacaatacttactatgcactataattttatttcatttatgtatctataatctattaattaaattttggttgtcttttagcattatattttggattggagagacttttttatccatcatttgatctctttttattttcttatttctttaatgaaaaaaaagtacatgttatattatggttgctcactaattttctctccttgtttatataattttgtagttatatagctgtatatttcataaacttatattgttatataggtgttttatattctctagttaagatctaattgtccaatctggtcaccttgttatcggtagatttgaatttaataatagcatatatatatatataaactaaagatatcgtttataattagtttttaacttgtgacactaaaattaaatttaagatttaaaattacacttttcacgtacaaaacacgtgttctttctagtatatatgagtaaccaacttttcttagactgtaattgttttggaaccgaagtatttgtgaaagaggatgcattgagggagatgcctgggcctagggacggagacaaagatgaggatgattggagcgacaataactggaaggtatgttaagaaaagaagaaaaattaacggatgaaagacaaatttaataccatatcattcaacttagattaaaaataaataaacatgtcaaaaacaagaaaatgcaattaagaaaaagaaataaattacaaattaatacttgtttgcctaactcatttaaattttaccaactcatggagtccgatcacttaaataactgttatggccataaatattgaaaatagaaattttaggccaacttaattttttgaattgttttgaatataaaaaattattataaatatttataaatagaataaaattttacttttattatcaatacaatataacgcctaaaataatatatgatgtctatcaggtttaccacaaccttcacgatctgaaagtaaaattttgtcgttacatttgtaaatattatacgttctatcatatttgttattttaaataaaatttcttaaaatttgttcatttagttttatgaattagtttcgctagttcaaattgattagtcatataggagtaatgtctaggatgcgaatgttgatgaaaatgcttatatttctcaatttcacgaatttataaaacaaaaatcaatatcatatccatatcgattgaatatttctaaagaagttataaaaataataaaacttgccaaacatttatttacatttagtgatattttgttatctttattgccacacgtgtatagaagagtaattttttaaactttattaagcatgcttagctgaattgatctttatagtgatatttatagtaaataaacatgactgagataattaatttaattaaaagtttgaatttcaccaccaaaaattaatacgcattaaaataaatagatgtaacatgaaacatgtggacctatctacttattaggagttatgaatgagaaaaataaagtgaaaatttataatacttcgttttgttcaacactatttgggaattaaattgtacatgtggacactaaatgataattaattaaagatgatatatacaagtaggagcagatgatggagaaatttttgttcacaggaactttactattaataaaatatttttaaaataaaaaggtaataaacgaagtttgaactttgagtccaaggactacatgactatagtatactattatagttttatatatatatattatataaatagcatataaatttgaggatagtttcacttgtgtacaacctatggatataaatatatatgtgaaagagttatgcagggataataattaaaatagaaactgtggcaattcttttttagtataatcatcttgctctcttctttctctttcttttttggcataaaaaattgaaccaacacggtcctctctcctttggcttccccaagctttttgcttcatcccttggcgcaaatagctcgattaaagattggttgggatgttaagcctagaggacccctccgggatagggacattagcatatgggataatgtcaaagcatctttccctaagcctaacgaggaaagaggaaatgatcttccaaagattgaaaatcttagtcctgacaatctttaataatttgtaaaaatctcccattctaattaagaagtgaaattttttcttatgctaaattctacccgggaaacactgtggagattattgtgctaaatagcctcccaaatcactgccttaatccaagttggcgtgctcggtctgcaaccaaaacaatgagaatttcattggatgcactctatccagctacatttgggaggaggtccgtaaactcattgggtgctgctcttttagatcaaagctagctcttcatagaatataattcatcttcatctattgctcttaatttatctgctttcatgtaatcttagcttcttctttctctttgacttgagcctctagcccttcttttgtattttcccttatgattaatgaaaattattcaatctgctcatgagccaataccctttcgcattaatgttatcctaactattagttctcttgtgtgataatcttatcactttgcttagctagcttttcatgcatatcctaaatgattttcaatctttcagcatagatggtgatcaactggctgaggtatatttgttggataaataattcagaagtttgaatacagttaatattatgtagctggtttggagattgactaggatacatgatgttggaatgcattatattcattaagtagtagtacaaaaacttcatggattctttagtttttcataatcgtgcatgtattgttattcacgattttgatcataaggtttagagaagttcatatataaattctctaactaaaaatatcaaaacaaaattttgggaactctctaacctagtggtgccatattgtattagaaaacactctctcctaaccatattttttctccctttgttcgtggatgtagttgctaatacactattagtgaaccatattttatctgtgtgtcgatctaatttacggtcttctattacttaattgttgatttcaagtttgtgtgttatgaaatcaacaattacagtctattggtggggttatctcgaacatttggttggaaaggaacaagaggatattcaacaatacaagtggaaccaaattttatttattcatgctttcgagagtaccttaaatttttttcatcttcaaaatatttgtattacctaatacttttgctttcgtctcttttttcttcttcttctcaatttaacataagaatgaaaattttagattaatatatttaatttttagagaggatgttgatatccttctttcaattgaactatattcatatcgaccactataacaaccaaaatagtaaatttacttcaggtgcatcgctattgtcacactctgatccgcaagacaacaaaattgcaggaagtagtgcagataggacgcgatttagctttaaactttacaattagtcttaccgcctagcttattctcaacttctttcaaactatcaagcgaaactcaatacgcagcgaaaatcaactttaaatgccaagtacagtaagtaacataacttgaaacacacactttaatttattaataacaggcatttggtatgaacaaacaattacaacattttgaccaaataaataacatttatcgatcaaaactctttaacgcctcgtggctttctcaactcgccgtaagcccttcaaccttcttctttaattgacctaaacactaaatcttgaaagataaaattttaaaatgcaactttaaaagacttagtgaggttttaatgaaatcctttttgcaatgccctttgaaaatgtttttcgtcaaatcataaatttcaacacaaatcagtttattaataaacacttcatttcgcaaaacatatcaaaacatatgtaatcatttttacaataaaattagttcaacttgtgaatcacatcaagattcatttcacaataacactcgttagtcaattatactttacatcaaggatctcaaatcgttctctacgcttggtctcattacccttcatttagactggctgtatcaacaacatccgagaacgtacagatctgtccttgttgttcaagccactaagctttatacgctcctttcaaaacataaaccaacttcttatcaccatgtagccttgtacaccccatagtgaccttgactctttatgtgcacataaaagctagtatcatctcaagaaaacaactaagggtttgaaaaccattttatactattgaaattgtaatcattaaatcaagctttaacattataaatcatacttgaaaacgtataaacttttcatataaatttcatttgaaacatttgtcattggaattattctttcaaatcagtaaagagaaatcataataaagttttaaacataattaattcatttaagagaaaacactcaccacactttaccaaaaatcctcctcttccttctcttttcgtggagatttcttgtagaacacatcgtagcacttaacactttgtttttttttttctcgccaaagcaaaacaacaacattttagtattttttttttttaataaattcaatgtgcttacttaatgaccaagtcctttatttacatagctcttaaactaacttagtcatgcttaaactcttcttagttcgctggctcatgattaaaactttacacgtgtaaatttaatatttaactcaaccatgcttaaacctttaatcttacacattaacccctgtcaaatcagatagacgttttctttgtcagaccttacttctcgcctatttccattatgcgaataacttcaaccttttctcgtgaagactactctttctattgagagtgtttataggtcctactgcaaatcattcttttctcaaaacttcctcgtgaattaacttcttaataacaaaacttatacttaaccataaaagattttatcacttaatcatttctgcggattgattcaaacacatacttcttatcgcaaagtcttatttcaaaatgtctcctcttatccaaaatacaaattttcaaaatacttaaccaaattttactttctatactcaaattagaaataggtttcacaactatcactaccccgcatagtttgggagttagttttataaaggtctcttaaatttattgcaaaattatagtatacgaaatatataaatgttttttttttttaaaaaagatacgagataggtcaatagatgcactaagacatctcatcatctccactatgtgaacagtaccttcgtagcatcatcatcattcatgcttcattaatatataatagataatatggaaagaagggaaacaaaagcaagggttagaggaaagtccaagaaagacccaaagtcagtacaattaaacaaaagcataaatacttagagcaatagagctatcaaaataatttttgaagagaggagatatgcttgtccaatgatccgtaagggcgttgatatcttctcaaatttcgagagatttttatgagctttgaaaattctatttaaagaatgacagacaccaagttgaagagtatgaaataaataaatgttgttttgacattttcatataagttgatgagtttcacataaatataaaaatatcctctcgttatcttgtaagaaaacatagcattaaaagaatattacaaatatcaatgatatttgcaaattgggttcagtggaagctattcaataacgttttctttattgtgctgtgctttattttatgtttgtctattcaaattttatataagataaaccatttgaaaatgtataaactaaaattcttgaaaatatttataaatatagccaaatttagaaatataaaaaatatagatattagtagacacaaaaaacttcaatcatattagtgtttatttatatcacatatactatataaatatttctaccaatttctttgataggttttgaaatttactgtatttataaatattttttcaagagagaatggtaaaaaatagtaaatttgacaaaatatttacaacaaatagtacgattttcatattttgtcaataatagacattgatagacattaacatgtttctattagtgagatggatagacagtgatagtagcatatcagtttctattattgatagaatttaaaattttgttatactttgtaaatattttaatttattttttattttaaaaaatgtcacatattttgttcattttgttatattggatcgaaaatgatataccaaaacaaatcaatcattaatagaaaaaaaaatctaattaaacatcaatttttttaagaaaaaacacaaggtgaaaaaaatgaaccctaaataactaacctacagtatttacttgatagattttggtaagtaatttatgaaaaatattagttttaatttttaagacaaataactttgtttaccaagtttaggaaatagaaaatgaaagcatgctacaaattgtttttccataattatattattattattgataattggatagaagaagctcttggagtttgatacagtcacactacgaaagagtttgactaattacaaatcatttaaagataaagattatttaagagagctgacttaaattttcttcttcatttcaattacttttcaatcagttcatctaacacccaaccaaattatgggccagtctttaattgccattgccattgtctcaattctcatctcactttcccttttatggacctataaatacctccataagaatgcaaatctttctcatccctctcccccaaaaccaatctcttacaatacacacaaatatgagttccaaagcctttgttttccttggccttcttctcgccttcgttcttctcctctcctctgaagtggctgcaagggaccttgcggagacctcctccaagactgacaacggtgagttttatgttataataaattttaagtcatctaagaagttgaatgcatagtagtcttctattgatgatttaatattctttgtgcttgttcctttgacatccaaatttgttcggtaaacttagtttaggtacacataaactaactccgaacagacacgaatattaagaaaaaactcatgtaaaatatatatactcattatttaacatctttatatacagattttgattttatataacattttcgtaaagttaaggattaattttaaatataacattgcagaggtcacagtggaaaccaatggcgtagaggatgccaagtatggaagaggtgggtacgacagaggctatggtggagggtacgacagaggctatggtggagggtacgacagaggct

SEQ ID NO: 8030 - DNA, 678 bp, Cucumis sativus
  Intron number 8 from transcript Cucsa.072640.1 (locus Cucs a.072640) derived from phytozome v7.0 (chr-ID scaffold0076 5; pos 97188 to 97865 reverse strand)
agccagcagaagaacctgtggtgaatcccattatcccttgccttttatctttgtttttgctgtttgagaatttaaattttcattgtatgtatgaggtttcaaatgttcatcttttctgtgctctagtgtgctcaagtgagttcgagatctgccctttcccctctaacctgaatctcaaaagagctacaaaacaaactaaccaaatcccgtggacccaacacaatcataaacactcacctacatattacatcattttgctcacctcttttttttcttattcctccaagtgtatacgttcataactggggatctgtcctgctggtgaacatcttctaattgatcactaccttttaaaactgaatttatattggtagaaaattacagaataaatccctcaactattcttgaaataactgatgggctgattattcttgaaataactaataggctgattattcttgaaacaactaatttgttgagattgaatttcgaacagttaatattgaatgtgatgttgtttaatattattgtacagagaaatttatagtttataagtatgtttgagtttattaccacgattattgcttctgttcactttatatatgatttacaaggctctactaaatctcttaaattctatcaggatacctcttgcaagcacacattttgtaaggcctg

SEQ ID NO: 8031 - DNA, 3184 bp, Cucumis sativus
  Intron number 1 from transcript Cucsa.185850.2 (locus Cucs a.185850) derived from phytozome v7.0 (chr-ID scaffold0127 4; pos 1253626 to 1256809 reverse strand)
ctatcctagtcaaatctccagtgagtttgtttttcttgtttttattttacatgcatatttccttcattactcttgtttcgataagtaacattttaggacctttgtgtttgtgcttctagtttgaaatcgataactctctgcttactacgcttttaccggatctcatcaatttaagtagttgggaacttgggattagtgaaactagttagttacagtgatttggtcgtaatgaggttgagactgtgtagaccttcaattttagcttaattttggttacttcgttttctgtttggtttttttctttggggggggtgttttgtgtcagtgaattagatgaattatgctgttatcaccttcaattcgtgtctttctgctctacctaataaactgttatcgagtgtctcagtctccctacattatcgatcagtgttcttgtgatcatcataactcattctctttcagaactttctaatgttcactgagcgaactaattttcagttttcactgaactcatttgtttcttttggtcattgggtatgttgatcagctgcaatgtacccttcttcagtttagtctttatgagctcgatgaattaccattgttaaccaatattagtagttgccgtggaagatacccccaatttttcctatagataggcaagacaagttgatagccacaatgttagaaccttgatgcaaatagatgacactcggtgagattgattttgtgaattgtgagtacttttctagagataatatgctcaatctgtggtgaaggatgttcttcttcaatagtaagttctcaattatgattatagtactttacctattctggatactaatatatgatgaagataactacctccaaggataagatcataatggtgttagctgactcgatcaagtcgtgcagtcgtattttgagttgatcttgtctatcttggatatggatatcacttaaattattgtggttcagtagtaaaaaagagccagcaagaaagacatcccatttccttggttgtaggtgctcattcaattcttcaaaggcctaaatcttcttatcatccttggtcaataattttgtatcgttagactactatcatatgttatataagattcttctgagatcttgattgaattgcttttgtgcatggtttgaataacccaggctctagtactcattatggtggactgtatagtttcaagaatatcctctatgtatgttgaaacaagattctagacatttgtggaatgccagggatgtgaatcatttgaatgtctcaaactattacactaataaaaaaaaaggatgagtgatattttatttttatttgtttgtttatactaaattaggatttttcatttgaggtttttgctagtgtctaaaatatggaaaaagatgaatcacctttcatgttcattcaacagcaacagaaaaattgagctattgagaacataacagagaattttcctatgagaactgaacagtcgagtacttcctaataatttgtttatatcttcaaatatgatgtttatgttttatcatttctcctctatttattcttctcttgtttctttcccttctttccctttatgtccagggatattcgctcttaaaattttgaatctgaagaatgttagaggttatttggaaattgttctaaatgtagttttctttctaaaatatatattttttaaacatataattctagataactgctttaaaaggattttttttggtcttctttttagtgttcttccaaatgatccattccataaaaaagatatttgttcaaaatcctgaacttgttagtcttgatttgttgtatcacttttgctagtcctttgatcacagttgttcatatgatagttttgaaaactaactgagaaaactgttttcacgatagtgtttcaactatgatatttgcttgtagaatatgcactctttaaagacctaattggcaaatatacccttgttttcctatgagatgatgacaatccgattttttatgaacaattgaacatttgtcactttgcctaatataaccttgatagaaaactagtagcattaacaggcttagtggcaatcgtgggaatctttaagtgtttgtggttgttgtaaattggggtagttttgatgttgtggtattttagggcatttataaaaagttcttatgtgggaaggttggtcaagtgaagatccccattggtggagtatttgcgtgtctcaccctgatccttctcatttattagtttttacatttataaaatgtggtaccctcagcgttgatcaaattaataactcttgagctcagctacaaatgatccttccatacactgttaaagattttattgtttattgatcatccaattggagacaagtctaatagatattttctgcccatgctttcttagcgagtctttggaggtttaggaggagggattctcaaggttaaaataggtcttgctagatcttcaggatttcatttgttttgagagcttccttttggactactcaaactaaaacctttggtaaatggtttgtttccttcagttacaccagtttgagaatgctcttaccaaatctttgaatgttatttgttcgaaaggctttctttggcttcggttgggaggatgtgttgtacctacgaagaacatggaccattggttcttaaagcttggaagcagttatgaagctcaagattattaacaaagttgtgccgctgcttgataagcccacatgctttgggttccatggatgtaacagatgtttttcaactttttggatgttttgctaggtgggatttactttagcctaaatagacaacaatatgtatctgagaagcctccattaaatgttaataaagcaactgagatcgtatatgtattacaggatataattttctagacttaatagtctgcgtggtggtaggtgctgtatttttttttctttttttttctttggtctctaaagtaataagtgaaattatttcttcacccagtttgtatggcactatattttgtttcttattagacctctatagtaataattgttttcttgtattaaatgtgtgttctcactttacgtatcagtacagtattaggtgcatatgttgctatgtttgtttgcgtaatcttggatcctgtttatcagcaattgaagcggaagagtgaggtagcagatt

SEQ ID NO: 8032 - DNA, 1274 bp, Cucumis sativus
  Intron number 1 from transcript Cucsa.232240.1 (locus Cucs a.232240) derived from phytozome v7.0 (chr-ID scaffold0198 9; pos 290450 to 291723)
ctgccagtatttattctttatctttttttctactcactttaagttcctacactctttttcttttcatcccctttttgatcgttattcttggggttttgtactgtttagttttaacctagctgagggtttttctacgcctggatgttcttggtttaatcttgctgtgtgggtgtgacatcgtctgactgcgctgatgtttatcgctcttggagttagggtttttggggtatttcgataatgggtctcgaattattgggttgcattcttaatttggctcgtggggtttctttttgttttgctggaaaatgaacgaacgagtttgaatgccatcggccattttaatttcgaggtttggctaatgtgtgccctggtcatttcatctttctctctctgtatattttttcttcttcttctttttgaggttaagtctccgagcattgcttgagttaaatttatttgttttgaagttgaaaggtactgcctttctaaagctacttgacaatacacgatgagcgcaaattgtgagttaatatcagtcacttggtattcagatgagaaccttaatttattttacaattatccaatcctgatggtgcgcgttttctgaaggatctgaattttttgtctcttcttgctatccttaccacttgaattgcagcagtcaaacgctcgactgaatgtgaatattggcgttcttcgatttttatggatgttttgtagaattttaaaactgaaacatctgtgatgatggcatattgaagcctactaacgtcattttgggattactattagtctaaaccaaggttttcaaatgacattttgcagccattaaatacttctgtcttgcactttgatgtgttttttctttctttttacgtggtgaacttagttttggaatttatatatttgagtagtgttgcatatgactctatttgaatgattttcaattattgtttcacagctggagtttatcagaatggtgagtactaacctacctgaactccaacgtttgatacattatgctactgttagaccattggctggcccgttttactcgttaaaatttgtttttaagattgtgagaaatgattttgacgaatgggttttgtttctacaactatttctatttcctggaagccacgttacatggtcattggactagtttaaagttcaagtcttttacagtctttcaaaattaaatgtcatgactatttctgtttagtaatcacggacgtaatgttgcagggtttctcatctctaatatttttatgcag

SEQ ID NO: 8033 - DNA, 2207 bp, Cucumis sativus
  Intron number 2 from transcript Cucsa.379620.3 (locus Cucs a.379620) derived from phytozome v7.0 (chr-ID scaffold0383 7; pos 23176 to 25382)
gcaaagttctcaaacttattgggtcagttttcatttctccctcgaaatcctcttttcatttctcgtttactttttttctttttccttcctgtctttgccgttcaattctctgcatttttctctctgtctaaatcttcttgacatctacttactcttttagttatatatatatgttagcttgcatgcattttgatcaattttatgggataattatgtttagaaaatttgtagtatattacacttagccactatgaattgaacccattcaattttgatgttccctttattggtagattgaagaagtaggcgtaataattctgttttgagtgacaaattgtaaatttaaatgtctatgaacttgtgttgccttgtttattcatttagttgtgagaaaaattgtcattatcttgttggaatgagttggtttaagagcgtgtttagaatgatcgtttaaacacttaaaatcaagatttgatttcatttagaagcatttttggttaacttgcaagtttcatttatgaactttgaagtttgtgtttatttgattggatctctcataaattcaaattgaaattttatatttgatgcaaccacactaaatttttaatcgtttgcctttctaattagtgaattttaacaaatctagaagtttgtggactaaatttataatttttgaaaggttagagaccaaataagtgtgaacctcaaaacatttgtaaacacttagagagtcattccaagcaagctctaatgctattctaggagggacaaaagttgacgtgatgttcaattgaggactaaacggtaatttcataatagagattggaagtgataggtagaaaaggtgggacaagatatggatatgaattcacgagagtgtacttttcgagttttttttttgagagaaaaaaaaactgaattatggaagaaaaattccaaagccatgaaataaggaggcagtatgagttggatatgatcaatgtctgatgaagaggaagattttggcatatgggcaattgccaaaaaattcaagtagttatgatgaaagagtttgatctatgttataacttgcaaaagaaaaaaaaacatatcacatgatgaactagaagtaggtatttcccaagtccctctaataattaaaatatcaactaacttttttcatttaatttttgtatattactattattgtccatttggggtacctgtctttgtccatcttgcttattgattcaatgcttgattgtgatggaatgtgggcctttattttcctcctctttttgttgcatcatcttcttcttcttcttcaccatttgatctttgatggactgtgattgataatggcaaagaatgttggttaagtgcgaatttattagaagataatgagatgcttatcctttgacctttgaccttttctttttagttaagagattccattcgaagatggattggtaactactttgttttctaattttggtgttttaaaaatttaggtttcttccttcaatttgattttcaaggttttatttttatctttttgtttttgttttcaaaacttcgtaaaagtgaatgatataacataaaaattgagaggtaaaagtataaggtcttaattttcaagagcaaaaagatcaattggtcaacaaattagactttttagttttttttttttttgaatttatgcctttttttccaaattttcttaccatgattttctttttaatttctgaaggaaaattcgaattctagtgaaattatatacatattacattagtaggtgatgaattacagaacaaccgagctaagtaggatgaatagtatttccaggtttgatttttaagaaataagaacaaaaaaaaaaaaaacaataagctctatggttattgaagagggtctaaaatcaatttatttgaaacaaagaagtctaaattattgctaggctagtttatgaactttcatatttgtattttataggctaccaaactttgacaagtgtgttaagtcattaataagtttttgaatctaaactaatattttgaaaattagtaatcctattaaactcaaacattgaattaaaattcaatttatatattaaaatgtattagagttgagaaattttgaagaatgtaaaatgtagtaatagtgaacccaaaagttgaaaaagggattacgtaaagtaatttaaaaagtttgtgtgttgaggtggcaga

SEQ ID NO: 8034 - DNA, 8122 bp, Cucumis sativus
  Intron number 3 from transcript Cucsa.149860.1 (locus Cucs a.149860) derived from phytozome v7.0 (chr-ID scaffold0111 0; pos 766687 to 774808 reverse strand)
aacactaggtcatcgcctctctcactttcacaaaggtaatccaatatttgctcctttttcatatctaacaactgtgaaaaaattactaacgtgttaggaagttgaatttcttgttatcaattggaatggaacaatgtgccatcggagttcttcattgtttttcttgtttgaagtctttttatattgttggaggaaacctgtaattttttctgattctttttggcaatgtgatattttagttttcttcatattctgatgtctttatttgaggcatgatatgaatgggttaaattgtagggtaatcacaataggtagcacttttagggttaataattaagtgtgtaacaacatttttaaagaattgcaaatctatcattgataaactctatcattgatagacccttatctatggtagactctatttttgatagatgcttattagcaatatagtctagtagttatagactttgagagttggaactaaattttgatatatctgcaaattcttttgcattatgctatatttgctaatactttggatctaatttctatatttttaactgctctttgatccatctcatgttatgataacaagatggaataggccttttcattaacatggagtgatcgttctgcaaactttaccaacctaggtcagtcatgcaacctttatgtaacatcaagtttactcataaatttgtaaaggtggatcatgaatataaaaagaatccaaaggtagataaaagaagctagccatttgggaaaggtaaagattaatagcgacttgagaaaaagggaaaagttgtgtctggaaagagcatctagaaggttttgtttcaattgtacttgaagctttaagtttctagtagaagtgattgaaacactcatgggatagaggacttcagtaggaaaattttcactaactcatcagctagtagcagaaaaagatgtttcagagagacctcaaactatatctcgaaccttacccaattcatgctctttttctgtatccattatcccttaacattgatctctgttttggagaggacttcaataattctgtttcttttgattttttttatgataatgtgtatcaattagcttcttaatagcgtttggatagaccccaaataataaaagtgtattcactaagaaacaagagagtgaaggaaaagaaggtgactgagagggttagttggtatttcggttggtttgttgtgggccttaggaatattgtttgttaggaagggttggatgttttgttattagttttacctatatatgttactggtattgttagcgcacggtatctttttggctattttgcttgtaggaatttctcaatagagaattgtggagagattgggaagctctctggctattttgcttgtaaggatttcttaatagagaactgtggagagattgggaagctctcgaatcttccctggctgttgataaataaaattgatgcagaggcctatcagttttggtaccaaagtcactgtttctgttatggttggtaagatggaagctaaagttattgaattggaaaacagcttggttggagtgaatgcaaggatgtccgacatagaaggaagtgtagaggctcgatatttgcaaccggaagaacgaagagtggcattcgaaagcaaatgcaacacagtttgcaaaaggggaagtttgaaggacaatggctgaacagaaaattgagagcaatctctcaaaattgagtgaggatgtgaaattattagtacaaggtatgggtgtgatgggaagtgctccgaaaggctctgcgtcaagcgtaaggactatcaccaataagggaaaaggaataatgattgacgaactgatacaaggagaaaagggtgagcaacacactaacctagttgcaaatgatggaatcaatgtgccttatgtgtccaataatcgcgaggtacgcctttttgacatgagattacggaagcttgaggtgccaatatttgagcaataagatggagactccagccgaggaagatgaaggcaacgccatggaggaaattgcaatggaaatagctaatttatctctaaagtcgttggtgggccttagctcttccaagacgataaaaataataggggaaattaggggccatgaggtagttgtggtaatcgatggaggagctaccgacaacttcattttagaagaagttgtcaaaatgttacggattccgatctaagcctcaaatgattatggcgtagttgtgggaaccgacgttgtagtccatgcggtaggtgcgtgtaagaatgtgcacctaactattgcaaacttggccattactcacaacttccttccattgcctttaggaagtgcaaatgttattctggaggttacatggtgggaaacattggaaaagatcatgtctttttattgaactggagacaagcttctttgttaatataaaactcaaagtacaagagaattatacaatgaaaataatatagaaacctaaaaacaaaattaaaacagaggaataggaggtgtacccgaacatcttaactaggttggcacccccttagcaccatcaccatatcccataaacaaacagagaacacataggtaccatatcaattggaagacaaacggccataggaaaacaaaaacaaaataaaacagcaagtaaaggaagaccacaggaaataacacaaacaaaaaggcctccaactaccaaagtacaaggaagatacaactccaaaggcccccaaatacgtaaatttctatacataacaaagctgcaaaggagttcctcaaacaacaatagtgaaagatttaaagatgcataggcttgagtcttttgaggatagcatgaaattagaccccattaaagtggttgatggatgaaagctgaccagtttagatatatatcttgaattgaataatccttgaattctacattcaaagagcaccaggctgttgcttttctctttgacacgtccaaagtatcaaaccaaccctttctttgtcatgaaaaatgtgctgattacgctcaagccataagtctgccaacatgcttttgccatgtttatctaaattagcctcaatttctttcgcaacaaagggccccttaacaactgaaaaacattggaaaggtcatgtttgactataaactgttagagatggagttttcagaaggagaatggttgattattttacaaggggatagaagttcagtaaggtcacaagtgtcacttaaatcaatgatgaggtcctttcggaaaagaagaccaaggagtactaattgagttaagtgcaaccgaacagtagggaatagtggaatcaagtgatgatatagacgaacgtatgaacaaacttcagctagcagtgcaaactattcttcaatcctttattgctgtgtttgaatcacatagtcaattgcgtcctccctgcgatcatgatcacactatcgaatgggagccagaggttggcctagtgaacgtacgcccatattgttacccacaatttcagaaggatgaaatagagaaattagttcgtgaaatgttgctggctggaatcatcttgccaagtcggagtgctttctctcatcctctgctccttgtcaagaagaaagacggaagttgtcgtttttgtgtggactatcgagctctaaatcaagccactataccatataagtatcctatccccattgttgatgaattactagatgagttattcggtgccactgtattttcacaaaattgatttaaaatcaagctatcatcaaattcgagtctgtgctttcgatgttcacaaaacaacattccgaacccatgagggacactatgaattccttgtgatgttgtttgagttgatgaatgtcctagcaacgtttcaatcatttatgaatgatattttctgactgcacctgcgtaaatctgtgttgatcttctttggcgacatcctaatatatagtagatcattgcaagagcatttaccgcagttggtagtgttttggaaattttggtggcacatcagcttgtggctgattttaggaaatgtcaatttgtagtggacaggatcgagtacttgggcgactttattttatcaaaaatggtggcagctaactcgtcaaagatagatgcaatgatcaagtggccaacacctaagaatgtaaaagaattgtagggtttcttgggcctcataggatactatcagaaatttgtagccaattatggttccattgcattactgttgacacaactgctcaagaaggataatttttagtggaacatggaggcagagaatgcctttcaacaattgaaatctgctatgatgtctgtcccagtggcagttgacccgtcaaagatagatgcaatgatcaagtgaccagcacctaagaatgtaaaagaattacggggtttcttgggcctcacaagatactatcagaaatttgttgccaattatggttccattgcattactgttgacacaactactcaagaagggtaattttcagtggaacatggaggcaaagaatgcgtttcatcaattgaaagctgctatgatgtctgtcccggtgttgggcatttcagaattttcttaaaaatttgtggggagataaatgtgttgggtgtgcgtataggagctgtgctgatgccatatcaccgtccattggatttctttagtcaagctgtgtatgaacgtatcgccggtgttgggaaggcgtttcgtggtgtggatcgaccaaaaatgttcgaaattcttcttgagcaatgggtggtagggggaaaatattagaagtggattgctaaactattgggttatgattttgtgattgaatacaaggaagatgcgctaacaagattgccaccaacattagaactgggcttattatgtgtcgtggggatgaaagcacaaattcattcttatgttgcataatgctctatttgtcaacaagtcaaatacttgtctttgactccgttgggactccttcaagcattgccaattccggatcaagtatgggaggacgttagcatggacttcattgagggccttccaaaatttgaagggtatgttgcaattttggtggttcttgatcgtttaaccaaatatgctcattttattcctcttaaacacccctttagtgcaatggttgtggctgctgtttttgtgtgtgagtaatacgtttgcatggctttccttggagtggtattggattgtgactgtaaaatgagcttatattgggaggagctgatgcgtttttgggaactcagttaacaagaaatacaacataccattctcagatggacgaccaaactgaagtagttaactgaggtgcagaaactactttcgttgctttgccatgaacacacccaaacagtggtttaagtggctagtttgggctgaattgagttacaatacaatggttcatatggctactaaaatgactccttttgaggcgctttatgggcgaccaccccccacagtattatcttatgagaagggctccagtctactaaatgaaattgaccaattgttgataaataaggatgagatgttgggtgtgtaaaaggctaactaatttattgaaagctcagcaacggatggttaaatatgccaatatgaaaaggcgggagttgcaatttgaggtccatgattgggtttatgtgaaattacgtccataatggcaattccctctagtcagcataaacacccaaagttggctcctagatttatctgtccgtttatggtggtggctcggccggtctcgtggcatatcgtatggccctttcgaagcattccatcatccatctggtcttccatgtctttatccttcacaaggcagttagtgctaatatgccaacatttccaattccaaaagacttactgctgatttgtctatacagttgtttcccgcagaggttttggctgtacgcaaagctatggaaggggaagaagacatggaggtcttgattcattgggataatggcacagcagagaatgcgacatgggaacaagcaagccttattcgtgttcaatttcttgagttccaccttgaggacaaggtggcttttggggggcgtgtaatgatagacagcaaacaataaaagtgtatttaggaagaaacaagagagtgaaggaaaaaggtgactgagggttagttggtatttgtttgttaccagatatttagtatgatatcagttaaggggtataagggtaaattggatagataggaagttactagtagttattatgtaagggtggttattagtagttattgtgtaagtgtggttactagagtggttacaacttgttataaatagtagaagggtaagtgaggagggggaatcagtttgtgagtagttttctgcatccttccttgagagacaatctagtcagagtggataaattttacttttgtgttcatagttttttgtaccgttttcttaattcagaattgatagttcatcaattttactgtgtaatctttgaagtattttcaatcaaattagaacacaactaccgttttcagttggtttgtcgtgggtctttagaaatattgtttgttatgatgggctagatggtttgttactctactattttctcctattagttttacctatatatgctgctggtattgttagggtagggtttttttttgtctattttgcttgtaaggatttctcaatagagaattgtggagaaataggtaagctcttgaatcttccccggctgttggtaaataaaattgagatcgagacctatcacgttcaaaccatactaaattcttttgtggttaagtcccctcttgatttgcgaccccaattaagggagtctacactcggagaaataagaaagtataagaaagaagtgcaaagtgagcaaaagatgtaattagtaagaaatgaaaaagtttcgtgaaattgtatgattctgtgtgcccttagggattctactagctgagctgttttccttttaagggagattgggaggtggagttgatttttcatttgttgacacatgttttatagcctctttgaacattgaggaaaggagggagatctcgaacttccttggcatttacctaaataacaaatacttgaattcgggtactatcaagattatgacagattgagggtcttttttacgtaatctcttcagtgggttacctctacctctacaccttggttttgggtgcaactttttccacttggatataaatatgtcttcatttcttattaggagaggaaaaaaaaatcatagatctccaaatctagtgaagatacttcacctagtgtctgcccctcctgagtcccgaccaacatcacgtgctcattctttcagacacaagaggttgaagctaagcgccttaatttaatttctgtcctcttccgcctctattataagtaaatttaatgggagccctagtattctgtaattgctatgctggcatgttctcgtgagctgttaactgcatggcaacagattaaaattgaggtatgaatctgacagtaatttaatattggtcaatggtgcccattgtttaagatgggttcctctcagtaacatatagggtcagggagtggcttcagccacagagaagtcttcttatttttcttgtttttgcgttgaaactgttctagtcaaaactcacaattttcagccttacacatctcacgtagacccactttcttggttggtgcctttggattaattggctatcaatattctatgccatgtactaatacatgagaaggacaataattccattgtagccagattccttggccattcatttacttccatcgctatctgaatttctttattttcagaaactcatcctagtggtaaataaaaaagcagttataattcaattcatgatagtcacttatataaaaattaatatcaatgttgtatggtcgggttagaggtttaaaaaaaagaaaaaactgtgtagaaattgtgcaattctgccaacacttcccatcaacaatatgttcttggatatataaattgcaatttcttcatgttatgctgatttctgaagctctttttttctttccatcatgacttaatgctataaaagtgttgtaacttgtgaaacgtttctcttgcaggttcaaaaagttaaacatattaagcgctaagctac

SEQ ID NO: 8035 - DNA, 371 bp, Cucumis sativus
  Intron number 2 from transcript Cucsa.273650.1 (locus Cucs a.273650) derived from phytozome v7.0 (chr-ID scaffold0251 1; pos 713377 to 713747)
tttgaaaagtataagcagtcccctgaatataggcggtatgtgtatcaacattgattatttctatagctttggagatagtcttttacttcctaattatgctgtttgcttgcttgcttttgcagcatgtacaataattctgtgtttaattccgattggcatgttggtagatggtttgcttagattcttggtaatttgtggttcattgaaaaggaaagttgaatcgaggaattagtatttttggaagccatatattgtctttttttaattagtgcgtggttatatattttttaggcttgattttaatttttgaatagaaatagttcccatggattttaagactttatgttaaattctacagtgttaacaaaggc

SEQ ID NO: 8036 - DNA, 322 bp, Cucumis sativus
  Intron number 4 from transcript Cucsa.237750.1 (locus Cucs a.237750) derived from phytozome v7.0 (chr-ID scaffold0202 3; pos 496269 to 496590)
aaagaggtgagtgtagattctgcattttaatatctattttaagcaactctctaaggggatttgggacactgaacggagttatcgagactaaagttgttaatttgtgtttgggtgctgaattgtgtaaggaagtttgtgtttaaggatgcttagctgtttagtctaggttaaagaactctttgtttggggtgcagggttgtttagtttgggtttagaatttctttgtgtgaagtgtaacctttcttttattgcgctttgttaacatgatttgtagtttgtggttgtagataaaaaatcttggtgctgtttatcaacacactca

SEQ ID NO: 8037 - DNA, 4900 bp, Cucumis sativus
  Intron number 8 from transcript Cucsa.130700.2 (locus Cucs a.130700) derived from phytozome v7.0 (chr-ID scaffold0102 9; pos 759722 to 764621)
ctacttattctgtaagttcatttttgtcatacaggcaagttgcttattgcatattcaaaactttatgttctctttcactgtttatctgctttctcaacaattatattataagactgcaaaagcccactgcttggagaccacctggaggtgtcaatattgaaaaagaaacaacttccatggtttacaattataaataaccaaaaatcgcaaagaccctatacactaagattcacatagacgcaatcaagtgcacagggctcctaacctcctaggacacctcaacatcatcaaacatcctcttgttgagaaaatggcccgtgacaaatgcttgccttttccatgaaaataaaatacaaagggacctcctccattgtggctctacaatccctttgaataacctaagacaacccacaagagcacaattcatattgaacagacgcctccaattttttttatcgatatccttatagacccgttgcaaaatgcacataaagaaaggtcaagcaccaaggaagaacggttttgggtgaaatcaatgggaaaatagtgtaaaacaaaagtctattttttttatcaaatgattattcttctcaaatgagagaagaagtgttgtgtttataggaaaatatgagtacaaggtctcaagggatactcaaaactacccttctaactaactttcttaaccaatcccttttgtcaattacaaataactctctcgttactaactcttaactcttgagtacaccatattccacccccctaaaatcaaactcgtcctcgaggatgattatttaggatgccaattgtgtaacattttgaaaagctccagctgtccatcttcaatttgttgtaagtgcttgtaggaaatctagctttgcatgggtaaattattacaaggttccctttcaaagttaaccacccttcaagattgtcccaagccaaggaatgggtcattttactaaatcgatgtaccacaaccatcacaacatcacactctcgctgagacttttggaaactcatcaaacaactgcattttttgatgaacttcactgttttttgtactttctacattttcaactactacaaggcccaatatatcaacctccctttctttatcaaacattttgtcataaattgtgcacattgtcttgaaaagacgatatctttgtcactttgtggattagactttcccttgggagtgattagcgctctttggaggatgcaagaaactctatcttctccatttggctcaatgcaatcagtttcttctatgtcattttcattgtcttgagccatcgaattcatattttcatcaacgtatgctactgttttacattgtcgatattcattggacaagtgtcccccttggtcacatttaaagcatttgcctaaggtaggttgattgtaaggatcttgagctctctttttgtaggtagtctctactttctgctttctcgtctcttcttgcttctctttctcctttaacagcttctttccacttattgtggtaaacgaatgattgctcctcttcgctgttgaattaacaccttcttcatccttcttggttaaaggtaataatactatcttctcatccatccactaaaattcataaatattctctcttcccttatgcaacacacaagtatcatattgccggtctccccaacagaatgtgacatacatccatctccaagacgtcacaaatatttgatctttgtagctagttccaattgtcaatggaacggtgtaaattttattaacttggacttctcctcctttcttcacccacccaatcttgtaagcacttggatgatgctcagtttttaaattcaaggctgccactaacttcttggaaacaaaattctcgctactgccactatctatgatgacattgcaaactttgttgttgattgtgcatcttctctccctctctctcttttaattgtttacttttttttagtacaaattgggggcgggggatttgaatccgggtcctcttgtccttaggtagatacagatgccagaggagctaagctcttgttggtgattgtgcatcttgttttgaaaagaaaaatgtcgttgagggtgtgattttccctttagtgtgatcaagattctttgaagaacacaaaaaactagatctccatcatccagttcaataatctctgctgcttcttcgctttcttcaatgttctcaaacgattcttcgtcttctttatcaataaatgccactgttttgcgttaaggacaagcatggaagggtgctctgtttggccacacgtatagaaaatgcctctgaagggttgaacataaggattttggtcattcttcatgccatttgcttatgttttcttctctaccacaacttcttgattatctttctccacttccttgcctttatttgtggctggtggattgacaatatccttgttcttgctactaaagttggttcttctacttgtgcatgctgcctttcttgattcattcttggaatgaatctcattcaattcctccactatctcggcaaaagcaatagcatcagttaaaaaatgaaaagcttggagtttaccttttctttgatatatgttggtgatatatgattaaatttaccttcaaccaccagcttaagcttttgggtgaattggtggtttaataatatccatttgaatgctgccgattaaatgatgatcattttccaccaaattagttcatgctcccaactggtggaattcttctacttaatcaactaccgtcttttgatccttgttgtcaattttgatattggctgtgttcatagttgggaggaagaaatctcttcttcatcaatttcttcatcttgtcccgagaacgaatggacctcttctcttgtcttccacggttcacttctaattggtcccaccataccgaggctcctcctttcaacttgagagttaccaacttcaccttcttatgatccgcagtattcacgtcaaagaaattctccacatttttgattcaatgaagaaacacttcaatatctctctttccactaaaaaccgtcaaataaatcttcgttttgtaagcttgagcttcaaatctttcttctcttcttcttcttagagtgtaaaaatcttcttcttgatcatcttcagttgatgaatttgaatcttgggattcttgggtgcctttcttgatttagttgtcttcttagattttcttggacttgtctttgaattcttgcctccaaaagagtgtgggacattaaagagtgaaagaaggctatttgcctgagagatcgcttgaggcgctcccctcttctcttgggcgagaaattgagtctgtcttagactattagttctttggtattcttcctgatttcttccaatccttatcggtccactgccttgtcttctccttcctctccattcttgctcaaatggttgatcatgctctcgaaaattgctgccattctttcaatcctccaggcaagagtgtccatgcttttttgaagattggttaacgtaaatgaattccctccaaagaagtctcaatggacagcaagcgtcgtgttgaagttcttggagagaggagtttcttccacctcttgttcttcctcacgatgagcttcctcaatgggctgattagctcttctatcggtcatcggtctcgaatcttggagttgttcttataccaattttagtgtaaaccaaaaatctaattttttatccaattattattcttctcaaatgagaggagtgttgtatttataggaaaatatgagtcaaggtcctaaggaattcaaaactacccttctaactaaatgtcttatccaaccccttttctcaattgcaattagctctctcattactaactcttaactctcgggtagacaagaaaaggaagatctttggattgaagtaaatgaaggagcagctttcttatttgaaagagcaatctatttggtttgagcgttttagataatattctttgtatgttgttatgggcactcagtagtgcattcctaataaattagtgttggaagacatcaatcacatgcacgaagatttgggatagaatttgagactttttgtgttaaaatgactctgaataggggatgttgctttatgatggacatggtacttcagcatttgttgtttcatggtagactagcggaagagatttttctggaagcattttcctttttttttttttttgtgaatatttggttggaaagcaagataggtttttctacaaggatgtcagtgggcttcgtgtagtttcgttggagcaccttcttgtagtttggttgttttttgtggtctttttgcttgtcaatgtatttactttttccctcaatgaaatcaagtttttctcgtaatattttatttttaaaagtagatgggtgaggaggtttggggtttgacttgctttaatgcttccctttagccatgtacaattaatctactttctttgtatttttattctcctttgttgattcttaactgtgggaaaatttcttcaaattttcagtttcttattgactggaccttctgcggagaaatttaaccgaaatttaaatgagatttgtattttatgtttaacttcaaaggcgtggcattggaataattttatttgtttattattattttacttgatcaccttgtcataggttgtcgtctgctctttaacttcgttgtattgtatttggtatgcaaggaaaaattattgagatgtatctacaactacatcaatattttacccttgctggctgcatgtgttttttcttggatgggaaaaaaatgatgacatatggtttccataatgttttgtttttcaatacacacacacacacacatatgtatgtatatgtttactcacctctatgctggctttggcaggcaacttgatagcaacaacttcg

SEQ ID NO: 8038 - DNA, 675 bp, Cucumis sativus
  Intron number 7 from transcript Cucsa.299560.2 (locus Cucs a.299560) derived from phytozome v7.0 (chr-ID scaffold0292 0; pos 112572 to 113246)
aaggatctactcggaggtaaaatataaatcgaactcatgtttgctccaatttttttgctctttctttatttatttttgttggagttggtttaggggagttgtcgtattttcgtgcccccacaatttttattccgtgcatgagtacttgtttactgtttaggctgcacaagaaggcagaagtttgtgttatcagctaatagttcatatcatcgagatttgttgtataaagctttcaagttcactttttcaacgaccttactcttacttgaaccagaagattagcttttgcaattgcccttttaagtctaagagccattatccctaaactatagtttacaagcagtttatgaaattttatcttttattcttccacatagaacctgctaatgcaatctatatttgtttacaatccaagtattaggccttgataattgacgttaatcttgatttacagggcatcatagcttaactacaatctttattttttgaattttattatgtaggttgaagattctacgtatcattatttattattgtcatttcacatagaagttatgttttcttttctttctttttcttttggagggagggtatcggttttataataaactgaatcatctgcaactacatcattttttagcaggcccgatactgagaaaactaaacgtgaggaac

SEQ ID NO: 8039 - DNA, 1532 bp, Cucumis sativus
  Intron number 2 from transcript Cucsa.185740.1 (locus Cucs a.185740) derived from phytozome v7.0 (chr-ID scaffold0127 4; pos 1187262 to 1188793 reverse strand)
cgaattggttaggcctctcaaagcctccctcgacggtgagtaagcttcctatccctgtgtttaaccaatatatccagttgcactttagttaaacacatgaatcttattttcgattaggttttctgcttacccttttttcactatttggtttccgaatggtctttatgcattttctcgattttcctgcctaaaaaagccttgcattgttagacgttcaatctcgactttaaacaaatttcagtaacacatcagtagagtggttaaataaatccatatgcaaagaggatgctgacattataagacgaatccttatcatttcaaatatacaagatgagtgaatttggcaccatggcaaggataggacaggcgttcaatgttggaaaaatcaagtgacttcactttctctataagatacataaattactcttctcgttgccaattatgttttcttttttgtttagttttgcgggagggggtttcctctgccctgcccttaggctgttcttttggttcttttgatatttatgttttttttaaatgaaagttcataatatctaaatctaaaagaggcaccatctcgagggacatcctggaacctttattttctaatatttaacaatgtaaaagtggatacatggacacattagtatttaatgcaagtcttaatggctgcccttaatcttatattacgcatgtaatataagaaggttgaatgaaattcaactcagattcctttcttagttttacttcattgaattttgattctgagaggagctggcgagctcaaagaactaatgcattccttttattaaaggagtataggatttgattagattgaataagctcctacaaaataaatcttcaagtgtgtacaaattcttggaaattttagtttgatgtctttttatttatctgtatgtacaaatgctattgagtattgagatatcgagttgcttaagctttgctatgttgcgatgagtaagagatgggatttactttctggatttcttttagtacacacatagttagagcactccaaagtgtctgtaaagtgagcaagaatatctgtttgctaaggtgtaaaacaaaaccttgtttatggaattctggaatagtggtatttgacaacgtttttgtttcgtagttggatattcgaggatcgatattgagtctgatcacacttaacatttttggatggggagatggataaattcttgatgctgcaatacaagttccatgtgtagatattgtcttacccgttgttgtcattgttgcttgcttattattaggcgaggaatgaattataatgtcaaagatagtttgtttaaaatgtgaacgactgctgtactgtgactcgattgtatgcagacgacaatgctaatctctgccagctatgattttcaatctcgtgtttgccaaattcatgttcacaattatccaatattcgttttaagataagctagctgaacctctttaatgatttattcatcatgcaacctctgtttggctgaatacagaattcagacgcaaga

SEQ ID NO: 8040 - DNA, 1578 bp, Cucumis sativus
  Intron number 2 from transcript Cucsa.166500.1 (locus Cucs a.166500) derived from phytozome v7.0 (chr-ID scaffold0115 3; pos 1681441 to 1683018 reverse strand)
tctgtttaagaccagaccaaaggcactcatatccagtaagtttctaaaagttggatggattttgaaaatgttacttcgaaagaaaaagcttaaacaataacggatttattggtaaagaaaaatgtagtttcagagaatggctaatattgaaccaaatacaaacaaatctattatgaacaatgtaaatcttgcaatgtcagtggaagtctcatcgttgcttctagacgaggaacataataattaacggggaacagtctgaaagtcggtagatttagatttagacttgtgttttgggccctaaactcaaatgaagtcacttgccaaaggttatctggctattttttctttctaaagaacctacaaatagaaatattggaaggattttcggcagtgcagctacttggtcttgacaaaatattagaagaggagtaaccccaaaagagttcaaggaaacaatgaactataagcacaataaaaggagcgacctttgatttcaaattaatcatagtttaaaccatttaagtttgagtgtagtaactctagctaggttctttttttatattctctagtctgaggatggagcaaaggttgtgaattacacactactttgacagtctttttgaaatctaagaaacacttatacaagacatgtacctaaagaagtttttttttttcttttttctttttttttaaatttaggacaccgacacgccaaggatacacttattaaaataacattttaaaaaatatataacgtttcttatattcgaagaaaaattgaattagatgagttaatgcacttatatgcagaaattagtttgatgtatttcatactcaaaatttattattattattgtcgtatatgtaccttttcaatctctgcatatatgtaccttttcaatctatttaacaacgattctatgaatgtttaagatatttattgcattaataagggtttgatactgacacatgtctgacaagtattggagtgtgtaagtgttcgacgtagtcacactggctagccaaacttgagaacgagatggaggataaaattttgtgtgattgttcataatgggtttgtttttagtgggtcatcattttttgtccaatttttaagtttttactgaaattcttatgttttctacttttgttgttttcttttaaattttcaactatttcttacttatttatgctatagaagtggtaggtttttccaacaaaagtgttgattgttaagcgtggattttggtaatgtttccatagcctcatagtttgtctgtttttcaaataatcttgttgttttcactttctaatttggataattttctcaatgaattgaatgcatgttaaagtaacctggccatcatcttggatttggccttgagtgtgtaaaggccaaattaacagaatctgttcaataagtgggtacactgttatgaataacattaaacatgctttaatttctgtatagagatattttctttcacttcttttctcttcttaggtgcaatgtttaatcctattgtggtttttgcttcttcagaaccacagccattggttaaggaaagatcccgtgct

SEQ ID NO: 8041 - DNA, 1484 bp, Cucumis sativus
  Intron number 2 from transcript Cucsa.152600.3 (locus Cucs a.152600) derived from phytozome v7.0 (chr-ID scaffold0112 4; pos 27768 to 29251)
ccaaaagacatagtcggttagttatttttctttacaatgaagcatgaatttataaacaaatgaaagaaagagagagcgtggccatcaacagcaaggccaagattatggcattctaagaaatgtaatattgcgtaggtttttagagaaattgtgaggttttcttcgaaattgctagctatgaattgtaaaaaaagtctacgacttttggtctagaagtgttttgagatattgtgtgattatttgagaattttgaaatatttttatgttctttaaaagagatttgaagataatcatagaataattaagagaagttgtggtaagagtttaagatttgaagaatgttgcccaacatgattacccgtgtactatgtgaatgtctctcacccgtaaatacgaagtgaaggtctttccagggtacgtcagagaaagatatatctttggaacccacatcgacatacacatagactttagattgtgtggtaggggtgctttgcacattaattaggaacctctgtgtgcacttagatcatagatttactttgttatgcactcgtgagagtacttcgatatatagtatgacagaaattgctttaatgttatgcacttagagattacacgatacatagtaggacaaagatgtgctctgagtttggaaatgaaattacttgacatagaatgcaagagattcctgtattgtgtatattgaaactttatgcctaggacaaaaattttgttatagattttggttatgatttttaccaagacatatctatggtttaaagagctactttttacgaaatttctaagcatttttaaatatctcgagttttcaaattgctcatgtttcaattgtatttcagagagttttgaatttctattgaaaatgtgattttttttattgaagttgtatacttacaagcgttcaccacccgttggacttcttaactcgttcttttcttaaatttgatgaaaaagcatttgagttttcaacgagcctactgaaattgaggtataccactagtcttgcatatgttgcgtatcagttaacttatttatacatgtcaagtagtacaatgttacttttattgaaagtgggtagtcttaggtttgaatagtctgctatctgaattctatcgaatagtgtttgatgagatattcgtagtgatattttagaagtgttatatagttttcttgtatatatattttatttgattctcacaaaaaatatgtcaaaagtttttaacttttttaaaaaggcttggaactattttgaaaagaagttttaatggtttgacagtgagcttagctagaagtggtaggtttaggtaaggtgagttttgggtcacatgtttgctttcacacatcaacttcaatttgtgatttaagagtgctttgtgtgaatgtgaataatgtccaatatcctgacgatgctttctttgtttttctctccctctctgtggtagggtcattttgttttctgaatt

SEQ ID NO: 8042 - DNA, 1231 bp, Cucumis sativus
  Intron number 5 from transcript Cucsa.303230.1 (locus Cucs a.303230) derived from phytozome v7.0 (chr-ID scaffold0295 1; pos 1204615 to 1205845)
ttgctctggtcgccttggttggatacgcaggaacggtaatgaatcattctgtgcaatcaaatttgtcatagctgtgagaatcaaatatcttcttcaatgataaattagaaaatagcatcttcaaattaggctatgacttatgaaatgatataggtagaggctcttggtcactaaggtaattatttaggtcccgttgaataatattttgcttttggttttatatttttaaaaaccaagcgtagtttgtagttttcttgctttattaactactttttgaaaatgtattaaaaaaccatgccaaattttagaaaccaatgcgcgcacacttggttttgttcttttaaaatatttggcttacaattaaaaaatgtttacacttgatttctctgccaaggcaattgtagggcattgtgcccttttctaaaaaaaaagagagaagtttttcatgacaagtgaaagcttactaagaaaggtgaaaagcttattgaaaactttggaggaaaaaaaacttaaacttttgtcaacaagaaacaaaataattatgaaatgaggcttaatagtaacctctggatctttgaaactctgtttattgagtagtagatgatataacctcagaaaatgagtttgaacaaaaatgacataggagatgggatagttgtgatttgattgcttttgacttgttaatatcttacagttgtattgtattgttggggctcatcctttgccttatgattccattgggggccttgtccaactcaaagctagcttcacaagctgtacaaatcttatagccatttgaaatcacttttcaaactttttaaaaaaggttttccaagccaactcttaagctaccctccaatattggttggacatgtattgaacacttgatagtacagtatatgtatcgagcattagtttcacaaaattaaaataggatcaccacttgttagacatgcatcaaacacttgttatttatactaaaataggcacgtacacaacaaaagtaataaaaaaatacgagcaaaccacatcaaattaatttttaagcatataaatatataaactcatttagtttcaaggtgtgatgctgtctctttttcgtatttgtgcttgttaggattgactaaactggttatcttttgcagctgtgttaaactgaagtatttaatacatgattctcaattaacttcttcaaatgcttcgattttcagttgggtgggtcaagttggag

SEQ ID NO: 8043 - DNA, 9420 bp, Cucumis sativus
  Intron number 3 from transcript Cucsa.240190.1 (locus Cucs a.240190) derived from phytozome v7.0 (chr-ID scaffold0204 7; pos 124215 to 133634)
gaataaaaaacggcttggtcaagagattaactatcgtaagtttttcttttgttggtcagatggtcctcttgtttatcataattgtcaaagttagttctttattgcaaatttcaatatgataattgcaattccccccaccttcttttgtttttcttttttggagaaggaaacaatagtatcattaataaacagaagatacagatagataaaaacggtcaagcttgctaaaacaaactaaaacagaagcaaacgaaaaaaggggaaattgtcagaaacggtgtttaataggttttgtctcgtatgttgttttttggatgtgatgagggctaaggggatgtcaacctagttgagatgcccgggtgcgcctgttgatcctccctcccccggttgctctttgtatatccctcatgtactttgaactctgtctcattatttttcaatattaataatagtgagactcttatccttttaaaacaaaataggttttacctcgtaactagcactctttttgaaaattcgtttaaacttattttctcgatccatcttggatgagatcgactacctagatttccctaaaatattaaaaattttcaatttaccgattgttttgagtttttccggtgcatctcgctagatattagatcaagatctaccgagattgtaacaacttttcaaaatttctcaaatcttaacatgatttttttatatggagaaaatttaaaactgagatttatgccaaaatttcaaatttgaatacaactaatttttcttctataatcttcccaatcttttaccaaatctgaactaattttctccaaatcttaaatcatttgtttatacaatttctcaaatcttttattttgatttatgtgttccataattaagttgacaggattataatagaaatcttatttacaacaaattttatataaaacttggcaagattataatagaaaatttgacaagagttagcagttggtagaagatttggttgatctcggttcatcccgataaaattgtatgaagtccaaaattatcaactttttaggctttctcggcacaattttgcacgggatgaaccgaagatcatcaagttttcaagctttcttggtacaacttctcccgggatgaaccgaggtttataattattttttcaatacgtgagggaggcccattcagatattttctcatctttgaggtttcttctaaaattcgaaacccaagaagcattaacctcattccagaattcagcaactgatgcttctttggtgacagcaatgacaaaagatattcagactttcaccaatccattgatcagtctaaaattcaaaaactcttgaaggattaacctcattccagacttcagccacatatgcttctcttttcccgctcaaaaggtgcatttagatgaaataagatgtgatttggacaaagggaatgggaagagtcaagaagctataaatgaagtttctattgctgaggaaccagccggcagcatttcctttggttttaaatgagagaaaaattaaaggccctctctcctctatggaacccttcgaaaaccctcatgagtttcatttttggctaccaagtgcctagatcatccctcaacatcatcaaccaccttctctttgctgacgacactcttcttttccccaccaacaatgagaggaaggtagaaaatcttgtcaatctgattcgccttcttgaagaatcgtctggactgaatattaataggaacaatcagagttattggctgctaattgcgatgagtctattgctgcaaagtttgaatacaaagtggatcagttgcaaactacgtacttgggtcttcccatgtatggaaaaccatcctctccttctttttggcagcctattatgacgaagattgataaaagattgagcatatgacagcacagttttctctccaaaggtggccgtttgactcttctaaatacctctctatccaatcagcccattattatctatccctcttctgtgcctcttcagaaattaccgatggcatcaaatgcttgttcaggaacttcttatggtctgaccagggatacaatcataactcacctttagagatgggactgcctcaagaaacccttagaaggtggcggattgggaattattgacgtcaatcagcacaaagaagccctccttgccaaatggcttcggccctttcatcttgaaaaggactctcttcggtgtaaaattgataaaggccagttatggctctcaacatttttaccttaaggcattactggaaaaccatcaacatctagaagcatttggaaatacattctgcagcaaaaagaccctgtttatgagaatattcgctataaatttggtctacatccttctggcatgaaatttgatttggcaatttcccccctcaaaacagtcattcctaaactcttcaattgactgacactaagaatgcatctgtgaaggatgtctggagttctggcattaggaggatgaaatttagaagactgttaaaggatgatgaaattgatgaatgggctgtattcacccatgtcatccctaatctgctccttactgaccatgaagatgtatggttttggaagcttgagcctaaaggtttctctaccaaatccttatacactcatctcaccaccattatgacacatcatatggataatttaatcaaggctatttggagatggccctgtccgaaaagtcaaaagagtgaaattcctcctttgggaagtgacccactcttgtctcaatacaatggatagacttcaaaaacttttcccttggatcgacctctctccatcttgtataatcctcttgtacgttaagtttgtgtctcgttttacatatcaataaagagacttgtttccttttcaaaaaaaaaaaagactctctccatcatggtgctgcctctgccagaaaaacaatggaactgtacagcatgttttctttgactgtcccttcactagagagatggttcgggattttggaggcttttagttggttgattgttctccatcatgatatgcaaagttgggtttgatttctgtgtagtcaccaccctttcaaagagtcaaaggggtgtttatggttaagcatcatcagtgtgttttgtgtaagatctgggtgaaagggactcaagaatcttccagggaaattataaagtgacaaaggacatcatcgacatctgtatccattctgctttttctcggtgtactgatttactggctattaagtcagcttttcatttctcattccaaactggatatttcattcaatcaatgaaattgtttcttatagaaaaaaatctggataacattggacctgaaaacaataactaaagcccaactaagaatagaaaaggagaaaatcctcctccaaaattttattgagaaccaacatttaaagaaaatatgtggagggtcttcaataacagccaaacgaatatgtcaaattgaagccgagagtgattttaaaagaatctgagcaattatgctctgcaagatgaaaacccaataataaagttcactctccttgaaaagcaagaaattcacaatgctttgagctgcagttatccatgggaggaaataccaccaagagctttaaaaagaaaatgattttgaagaatccaaatatgcaaaccatagctccaaaaaatgttccttgaaaatcatgatctggatcccaattgtaaacacacatcaaacctcataaacatgccccaccaaaatctgaagatggaagcccaaaaaaacaaactaaccaaaatgatgcttagtctatttccagtttttattgagtctatattgtatttgtttaatcatcttgttcacagttttgtgaagggttatgttgtaatacttttctcttaaaaccaagagaacaacccaaaaggtaagttttctctctcccttctcgcctctctcctctttccatcccactccctctgatcgcccctctccggcagccaggtttttcagcagtcctctctgttaagtctcagagatcaccatggagaatttggcaagaaagagatcgttgatttattgaagatgtagaagccggcagaagcatctctctatctgtttgctaacttagatggatctggtcaacgttaactgatcttaatagttttccggtagatagacattttaggaaacatggggatatcgacagaggcggattgagaatttcaaagtttcatgctaagttgggttggatactgagctgtgatcactggccatattcagggggtatcttcaatatcagggtgtgcttaggtagtgagaagcaaggttggaagttgttttgctctatgtcgaaaatctggattatgctagatggttttctgataattccctcaagattcatcctctgaatttgaataggaaactaagttatgttgaaatggcaaaatcaagtctttccggttctcctgtgtcaagatctaaatttaaggtatctgaccagactcctaatcgaaaaaggaagattcaaaagttagtccatcttcccccttcaaaacaaatgctgcattggctgattaagaatcatgatgttgtgaagttcaatttcgaaaatttatggattataacaaagttatttgcctcagatgactgaaaatgaaaattgattcgtacgaggttggaagttcttttccaataaaaaattgttataaatcctttatatgatgagaatgccctcattagcattgaccaagggtgaattttagatctcatccatgacgaaggaaaatgacaagctcggggaattttcatctcaaattcgaaagatggagtaactttcaacacagtcggccacttgttcaaaaaggctatggcgattggctcaaaattaaaaaccttcccttggattattggtgtagaagtacctttgaggtcattggggatcattttggaggtctcttagatatagcctccgaaactctgaatttaattaatgtttagtgaagctcaaattcaagttaagatgaatttttgtggttttgtgccgtccaggattgaaatctctaaggggaaatacatatctttgttttggagattttgaattcctaaaccctaatattcccctcaaagcccctaacttacaagtgattttaataactcttgattgtttgaggatcggagaagttatgattgatgaagactttgatccctcctatccattagtctagaatatcccaaaatcagtgtttgcaactctccctagaagcagaaatccttttgaaattctgaagaattttccgaccattccaccggcgcgaaagatgaagacagtggccgacaatcaggttgaagacgaattgaatgtatgaaagaaagtattttgctgaagacaatcaggttacaactgaacaggcccctttttctagttttgctgaacccaagtcgtacaacagttgcaaaaaggtagtggggtccacttctaatgatcctgtctttaatattcaattttgctgaacccaagtcgtacaatcgtttctaattttcgagtcctcatttgaatctttaaatgaaagaaataaaggaaaagggggccccacttcaataaatctttgagttataacgaattttgcccaagcattttggaggtcaactcagcaaaaaacgttacaaaacactttagattctgattctcccttcccgtcacagggggctaactatcatgagaagtgggtgttttcaaccgttccaagtgtgccaaaggcagcaagtcctttcatattccaaaattcttaagcactatatctgtaagcaaaccttcttcaaccatgtatggactgccctgcaaaaatctgaattaaatggggtttgcgaccttaaaccccccccccccccccctttggactcttttcggaataacaccaccaagcattcagtttctgccaataaatcggatcttttggaagtttacaactctaaaatccaggtcccttagcgtcttttcaagtcagtaaatagcacttctccttcaaagtgtctcaatatttcaaattcctccacctccattgcaaagacatcttgtcagcaaggctccccattctcagctgatttaactcctaaagaccagtccaaaattttctcacctttcagtgttagtagtgaagaatcagttgatcttagtgaagttgaccctaaattagattcagaaattgaagggacggacttaaatgttttatttaatgaggagggttctctcccaaatatttttccaccagatttgcctaaagagtttatgtcaattgcccgggattgtggaattattttggcctaatttagaactgcagccatccctatccttctctcagccataatgaaatcgtctcatggaacactaggggcttaaatgattcctctaaacgtgcagcactcaaaaagttcatcataaactgtaatccagatgtggtttccaccaagaagcagatttggagatagactcatccttctgtgttactagagaagagtcaacagacttgaggtgcccttctgatcacaggactgttatggagattgaagggatggatttaaacgctctttttgaagctgattgtgccccgctagtcaatgtccattgatcctccccgctaaaatcctcagatttttcaaaggacttggtgtccatagtcaatgattgtggtattattctgggctgagcaatttagaaagtatttctgtcacaacaattttgttactgcctcctttgaaggaatctaaaatggaaagatttaataatgcttttataaatcacttcggagctctagggtcattggctggtctctttgtggtatcgataggtttttctccggggttgcttaccatgtgggttagaagaaggatctttctggtgctttttatgtctggtatctaaagattactcttttcaagttttatcgtttaaactgggctgtcttcctccctgttttatgattaatctgctgctgatcctctgcatcttccacattcccaagttctgccgatctgctgttttggttcttttcttgtgtagttttttcttcagttttatttcttactttttggctgcttcgcactgctgtagttgttgtacttggcttttcttttggtctttagattttccttggtgcccctccccctctttttggcttctctatttttctcttgtaatttgagttttacgttaataaagaagcttgtctctgtttcaaaaaaaaaaaatacttcgtcgattttgttggcttttcgtatgggctatgttttagccttgaattgatttagattgagtttattttgttcagaaatgattagtgcactaagggatgtcaacctagttgaaatgctcgggtgtgtcctaatccttaggcctaattgtttttgcttagttttttttttattcgttttattaatgaggctggtttcctaaaaaaaaggaaaagaaaaaaaaaagctcatctccttggacttcaacagatgtgtaaagctctacactactcatgttaaccattgagtcatcaactgagtcattatgtattaatagacctttttttttggagaacacaccagaattggaatacccctaataaattgacattttgacttcggaagagagaatcaagaatttgaaatgggagggagggatgtagaggttgttattgcaaagggacccatccaaaaataactatgaaaagcaaaaatgcttaaggaatggtgtgatggtacagaggcagccaattcctcacgtttttctctctcctttacaagtgccaacatatcctagagatggctcctgaattgtgttttcatggcctgaagattatcagaaaggtattgatgcttcatggaaaaggttcatggcctgcttcagacgttgaatgtgcatatcaagaatctcccttggaagttggttcaaagtctccttcacatcaatatcatagtacagatcgttgccataattatgaggtgttgggtgagtggcagtgctttcatgcgatgacgagtgaacagttcttttttggatcgaagaaggaccgcaaaagggacaccattttgatctctcttcattcctctgcaaaaactgctctttgatttctctgcgcactttctcctgtttttcaacataccttttttgggttaattctgggaaagtcttgctatcagatttatggttggaaagaaatctgagaattttagccaagacattcttgtctcagcttcgcctcaatgcctctccactcaactagccaacctttctatttcctaataaattcgacttttgttcactatgttattatcttttttggctcatgggtcatttcatttatgtttcttagatgatttgtcttttaattacttctttcccctatggagttttgtatctattgagcattagtctcttttttcatttaatcaatcaaaagttatctcttgttgaaaaaaaagaaaaaatgacttctttttttctgaaagaggaaacaagcctgaacaaatatagtacattgaagatcaaagaatcatcaagtgcacctggacacccctcttagcactctcatcacatctgaacttattctgacaaagagacacggtacaagagcaagtacaatgtaatgcaaaatacaaacacaaagaaacaacttaactccaaaacttaagaactaaaagaacaaaaggctcaacaaataccagaataattccttaacggctggaccatcaaccaggcgtggttagaaataaagaaccacctggaaacaggaaaatacaagaaagccaacatttagcaaggaaagagaaatattgatacaaactaatgaggtcctacatcacagacgctccacaaaacaacaaaacaagaataccagtggattatgagcttatcaagggggaggattgaaagaacttccttcatgctatagggtatttggtaatccagttgagttatcaaagtcttgatcagactatttgagtgagtctcaaagctaatggttttcactattggagaaggatatcagcaactgatcacctttacttctttagtatgaaagaaatgcacttttctcaaatggtgggtgacatactcgttgttgatatttccaagtattttaaaacttttgctatggttttgaacttattaccaatgatttttgtacaacttccattcttgtcaaggttttcaacatgtgaatgatataatagcagtgatgtttactgttaatagtaagttttccttctatcttcttctggtagcggttgcaattatggaatgccaatatttttcctaaatttagtatggagatgctctttatttctctcttaccagttgtagattatttctctctgacctgctgtagatgatttctcttatttatatgcgctcatttttcattttggtaggcagaggttcaacgaaaagttgaggttttgc

SEQ ID NO: 8044 - DNA, 7622 bp, Cucumis sativus
  Intron number 3 from transcript Cucsa.288960.1 (locus Cucs a.288960) derived from phytozome v7.0 (chr-ID scaffold0269 8; pos 454533 to 462154 reverse strand)
tcactgaagtaattttctctttctatgagttggttaacttagtttcaaacttcaatttacattcttgttcttgacttcttgtattttgctcacttagacaattcctctttattttttgtcttctgagtatggttgggattcttgcagttaataggtaatactccaatggtatatctaagtaaaatggctgatggttgttttgctcgtatcgctgctaaattagagacaatggagccctgttctagcgtcaaagacaggtcagagccctttttttgtttaataaaaattaaattatcatactgtaacgtccgtggtctccattttcattgctgctctcacaacggaaaaaaagcttaaacaagaaaatataagcattagagaaattataagcttaattttttaggaaaccgaaccgttatctaatgaacctaatatctactaaattttgcattagaatatgaggggtttttgagatatgaagtatacaaattttcgatgtaggatcgggctgagtatgattgaagatgcagaggataagggcctgattacaccagggaaggtagtgagcaatgcttcatttctttcgtcatcatttgaagaaattaggctaccacttgaattggcaatagatttttgtgcttgatgtaattataatgcattgtcaaccaaatttctaaacttgaagtcatatatttgatcctgcctgatccgtcttatatacatatatttcttttgggaaaaagactgtcttaatcgaggttacgagcggtaacacgggcattgcactggcgagcattgcagcagtgaagggctataaacttattgtagttatgccagcttcatatagcctcgaaagacgaatgctgcttctagctttcggagccgaactgcacatcacagaccctgcagcagggcttgaagggcttctaaagaaggttgaggagataatggtagtcacgcccaatagctattttctgaagcaatttgaaaatccatcaaatccaaaggtttgttttgtttggtttgagatctcaaaaagaaatataactctgttttgagtcattttgcatccatttttgttttttagattcattatgaaaccactgggccagagatatggaaagactcgggaggaaaagtcgatgctttggttgtagggattggaactggagggacaattactggtgcagggaattttctcaaggaacagaacccagacattaaggttccattgttagttttttttccatggaaacggaaactggacactagagcctgatttgatagtatttttacaacccgaataattgtcaaatgaaccctagggggaagtcatttgatgtttctttaggaaagatgaaaatcactgtattgaattgtgagaaagcaaattcaattttcaaaaagtaaacagaatcaaacgaggctgaaggggtcattattaaatgggccattgatggataatcctgatcttttgtaaatttgtaggtttatgcagtggaaccagccgagagtgctgtgctaagtggagaaaatcctggtcagttcccattccacactaattttctttgggtgttccaaatttttttagaatgattgtgcagatgttttgtagagttgcatttgacagtgatagatatcaataaaagtttgaattgtgccatacttgcaaaacaattgtgccatatttttttaggttgtgcaagatttgctattatgttatgttcccatatattaatggtaccgaatgatttgttacaaaagtttgtgtactgtcatttttatgatcataggcaagcatctcattcaaggaattgggtctggcttcatccctcctgttcttgatctcaaagtctacgatgaaattattcaggtgagccttgaacatgcttgtccaaagaagttcttaataatgatatcatatagtacttttttaagataactcattacgttttcatatacattttcattcaaatgttggcatagaagatgaagcttccttttctccactcaaggttataatgtcttaaccaattgaaacgtttacaagagatgaggttttctctcaaacttataaaataatcattcaaagtagaatgtatcaatactctctccatcttcctcgtcatatgcaattaacctttagttggctctcgacgtgaatccaatcttacacattgaatattgagtgtagtttttgtaagtaacttccactttgatactatttattggtgataaatggtcatattctcactaacttaacctataagttaacattcgatcccttcaataactttaacacttgtgattggtagaatatcttcccatttgctttacaattttaagtactcttgtaagagagtagttcaaacgtctctaacttgttaagcggttttgtttttctacatgctcttctaacatagcatcactagtaagcagtaaaaaatcatttatttacttgagatagaaatggatttggatgttttcagatctcaagtgaggaagcaattgaaactgcaaagcttcttgcaatcaaggaagggctccttgtatgttacttcaatctatatgaggactttattttttgtattttttgtgaaaaatatagaccgttattttttttggcttaaagttcataactcttatttttgccttttgtaggtggggatttcatcaggtgcagcagcagctgctgcaataaaggttgcaaagagacaagagagtgaaggaaaacttattgttgtaagtcatgttatcttcatcgtttaattttttaagtgtttaaataagcgtaaaaaaatatgtttataaacacttagaaagtcaattgaaatagacacattgagtgagaacaagtaccacataaagattaggttaaaaaacacttctatttctatgaaactattatttaaccctttgatccctaccatgaaaaatcctatcaaaatttagtggaagttttattatgtgacgactttagcttatgtagtttacaagtacttaacaagaatgttttttaaataaaatatccatcctataaaatatacttgaggttgacttttttttttggatttttttattcatctttaggtcgtcttcccaagctccggcgagcgatatctgtcaacgaaactttttgattcaatcaggcatgaagcagaaaatatgacttatgtataagttgattcattcgaaattttcacacgtacatgtatcaattcaatcttgaaattcgaatatattgttgaaggaaaataatgataagaacaattaaaaaggtaaattgaattagactttgcgtctataaattactattagtagattatgttcatgtaattaaactttttagtttgctagttccacttcctttatttattgaactcacttattttattctgttaagattggtttgttgggtttgcattagcatctatcttggttatggcactgttagattggctgctttttggcgtagcattgcagaaagtccaagggatatactgaagaccttccgtggtgctatagttagtaaagtgtgactttggtaagaagaattgttgaaaatgatacatgtggatgatagaagagaaaggagtatacgagatactccgttattatattgcaagtggccattgattaagtgggaattgaccctatcattgttatgacaattgtttttatacaattcttgttttgatgtatgaaagtcagtccatggtcagttcgtttactcaacaattactatatatatagtcttctatcgtaggtcaccccgtcaaagacctttagatgtagatatgtcatcgaactttcgtaacagtatatagtataagtgtaggttttgtcaaacttgtttgttttcaacatttctttgactgggaaaattggaagggagatatgggaagttcatgattacaagcttctgtcttacatgattttgtactaatcaagagagaaaagaataatttgggaaattcatttgggtccatttgtgtttaaataataaaaatgcatcgtcatatctatagcacattaatcataactttaaatattactttattgacaaaatgcactatccaaacactcatttcctctatcatttttcaataacactttatttcaattttgttctgttccaattgaacacgcatttcaatagttttatggtaattctctactatatttgaaaccttctctttcatcttttctcattttaatctatgtatttaatacattttaaattaataccacaacgaaagaaatgattgaaattgattaataataagaacaattattttaaagaaaaaaatatttatactcatatgacttcaaaatttatagtaaaaaccctaacagataatagaactacaaaatattaaaacactaatcaaagtgatatagaattttaaagtttttattttttggaagggttgagaatagcaaatttgacaaaatatttacaagctatgctaaaattttaaattttatttaataacaaacattgaataaacaagaatatccttgtattagtggtattgatagtctgtgataaaagtctattagtttttattaccaatagaatccaaaatttttgttgtagctggtaaatattttaatttattttgttatttctaagattatatttttttcaaattcaaaatttatattttttttcaaattcaaaacttttaatggtatagaattaattcttttttcaaattcaaaaattaaaatttgaatatttaaaaatgtataggctaaaattagcttctttaaatgaggaccaaaatgcatcttaacaaaaagatatataaaagtgaaagaacttgcaaaacaatcataaatctaaataaaataaaataaataaataaaaaattatcataaataagtctattcatgataaagttaaagtaacacataaaattaaaattgtgttatatttacaaatataacaaaacttactagcagcaataggttaacttttaaaattgggcatttacagaaataacaaaaatataataatagaattcatgtcactacgttttttaaattatgagagtagcaaatttaaatctgatgactcttttacagccttctgctagtcgttcgattagtcttctgatatcattaattacttgttatgtttgcaatatgcaaaaaggaagtgctatcagatattttttttctattttttcttttttcgtttgttacaaattttctttcaaaagcaataattatgtgtatatcaacgtaaataaaaacaaaatctataatagagatgacccatatactcctagtcttacctaagtatatataatacaaagatcaccacgtgggctcacacacaatctccaataacaagatatgaacttcaaaataatcatcagtttcggtaatgcttgtggataatggaattattccacaatcagtccatattgtgacacttgccatttctcaagaaatcctccaaataacaaagcagaagtgtatcgtaccattattggccttgcccaagagaaaatgaataaagccaaagccaaaaccaaggaggctgcctttcaattttccggagacattgcaagaatatgaagcacttgaccccccaataaaggcaaaagatattatatcatcatttcaagctccactcatcacattttctcaagggtttttgagctaaactctcgtggggttttgttgatatcaaggtttgtttcttgatcagagctcctttttccctctttttgtattttcttgtatatctaatagttgaagttggattgttttcttttttttccattttctttgttcatttctaactgaaatcggtggtgatagctagttacctatttgatgttgaaactctttgttatatcccatctcaagtgtcccttcctctacttgattctagacaaatttttgttgtgtttgtactaattttgccaataatttcttggatgggtttttacttttgtctctggccattttgtgggtttcttctcttttgtcatttcagcttaaaagaacaaattcacttccatctttcgacataaaattatgcttatgtttggtttttcttgttaatggtatttttttttatgtctacaaggtatgtcattcattagtgtatttatcttgttcattatattatactgcatgagaattgagctaaaatcatctaatgggctacgtcatagtaacaaaaagggatacagtgtcaacgagtaatgacatatcttctcgactaagaggtcagatattcaaatattctccactctcagatgttgtgtggatacaaatgaaagtattataagcgaatgcaaaatagaaccacgcttcaatttttatagatataattgaagctttgaactgcttttttgtgtcgatctaaatttaatagttttgtacttgtaaattgctattgtttccgctaatttaaagattatgggaaaattttagttcttgaccttgctctttgaggtattaggtattatagggaaactttgaactcgattattaattgctaggaccttgctctttgaggtattagaggtgttcacgatttgattcggttggatgtggttggtttggtttgaagctgaaactacatcgaaccacaaaatgcaaaaaatctcatccaaaaccgaaccgaaccggtcatctgtgttaaaccgaatcaaaaccgaatcgtttatgcataaataaaaccgaactgaaatcaaaccacttatgcataagtattagaattaaaatcctttaggaacattatacataaataaaagtcctacaatattacaaacataaattaaattaatttgtacaataattaagtacaagacatagaagtttcaaacattgtcgacattttgtctagtgcctacaatgtacaaaattttaattcaatataagaattagaaacatgatttttccaagttttaaaatgaaaataaattgaaaagaatgaaaataagggtttgcatgccaagagggtgtcgtcttcgtctccctatgctattcgagttcgagttccacttccaataccgtcaactctaagtaagttatacttatatatttaattatttatatatatataactattttaaataaagcggttcggttcgattttaaaatcggtttaatgtctaaaaccaaaccgaacagcataagaaacagtttcagtttaacacaatccaaatcgaactgcatgcattgattttcgatttcgatttcgattcaattgctgttgggttgctgtttagttttcaactgtttgaacacccatgaggtattatttgtatatgaagaaaaaagtatccttgttttgatggctgatgtctgaatagtccaccatgtttttcttctttgtctttttgtaaacctatttacttgttgatttgcataaagtttgaagaacaaactgatcgcatggaagagatcaagggtggaatcaagaaagatgtcactgaagtaattttctctttctatgagttggctaactcagtttcaaacttcaatttacattcttgttcttgacttcttgtattttgctcacttagacaattcctctttatcttttgtacttctgagtatggttgtgattcttgcagttagtaggtaatactcca

SEQ ID NO: 8045 - DNA, 6910 bp, Cucumis sativus
  Intron number 6 from transcript Cucsa.032820.1 (locus Cucs a.032820) derived from phytozome v7.0 (chr-ID scaffold0042 9; pos 2075111 to 2082020)
aattatttaaacaaggtaagtggtgctcatttttggtttttaatcatttagaaacaattttagtatctgtccctgtatctgtgtatgatattatatttgtggtccatatagttattagttaataatttaatctctggagttcttaattaaatataatataattttaaataattaattgaaataataaaactattcaactataagtatttagaatgagatggtttgaagtttggacttcttttcttttctgaaccagcaccatttcaccatgcgagttggactttacctacaaaggaatctcaccatgttagctcttttctttttctttccgggtcatataagaaggaaaatagcccaatggtagctatagaacgatcatttctaagagaaactaagaacagtcatttttgaagcagaacttttcaacagtggacgttaatatttgatactgatgatagataccactttggcagtagtgtgctgtcaaaatgatgaaaattagggccatcacttcttgctatgtaggtttagtttaattattctggcttgtttttgctatttcatgaagagagtgaaaaatgggaaattaatggaaagttataatccccactgctccctttttgtatagggcaaggatgtccctagaaatatttggcttgaatgtaacaagagagtgctcccagatcaatgagcatgtatggcaggagcacgaagtcaatgaaacattgatatggcagtggagtcttttaatgatctcatgatgttaaaattatatgaaggaattggtgaagggttggtgtctccggtgtttaagattgtcttttttgatctctcacaactgttgagcaaatttgcacttctcctttcatctgtttatcattatttttttaataagaaacataactttcattgtcaaaaggagaatactaaagagggagagatgagatatccccatacaccaataggttaccaaaaaaaagccagactggtgtagatatgatttaggctataattacaaaataattattaggtagacaaccgtggagaagcaaaaaaagtgacaagaactcaaaagatggccaaattttgttcatagccacgaaggatccttgagtttcgttcaaatcaaagcctctagagaagggcaaagaccccattagaccaaaggagtttcacctgagcacgaaacttggggccttcaatctgctaaagacgagcatcagaggctttgctaagccaatacctatgcaaattgagcaagctaaataaccttccccaacaatccgcaacaaaggggcataaaaagaaaagatgcatcaaggactcccgacttttacaaagaacacacgaattagggaagatagcataattttgcagggctctttagattctacaacaagtattcagcctttcaaaggagaaaatccataggaaaactgttagaccaccactattatttacttataatagaagaaagaaaaaaaataaagaacgtgaggaactacttacagttatttaaaaagaaccacctacactttaatttaaaaatgacagttattttattaaggaagttaaatcaatgagaatgggatggaaaaagaggggagtttttggagtgaaggaaaaggtctgcaatactcccgtgaaagacaggggaagcagaagactggtgttctatattctggtttgcttattagtattttgtttttgttttgtcgtttggaattttgggaggttttctttgtttgatgtttctgaattatatgtaacgtgacccatcttttgaggttcgcggtttgcttatgttgtaagttgtgtttgaattatcaatataacagaaacactacatcagtgttctatcaaagactttgaccttaggacacttggctttccatgtaagatcagagctttgtctgttcaaggcaacttttttcacaatcggcttgggagaaaaagacctaactgcaaagaagccatcgttttcccacatccacaagataacttcatctctattattaggcctgaaggattggagcttggtcataagatcgacccacatcaataaaatttcttctgaacattttaaagtcccaaacgcagaaggagttagagttagaccaccaatgactgaccacagagtccttagcaatcatgattctgtaaagtctaggggaaatttcgtgcaaaggggggagtcaatgagacattcatctcccttgttgtttgtttttttcctttgctttttgtacttccattcatctcaatagaagagacttcattggctcctttattcgtgttttatgtattatttgggatgtttattttttctttccatgatcttctctgggttttctttttcttttcttcctttgatctatctgcaggaaaagaaaccacacaaatgagaaccattacctaaacatctcaatatctcctagtcagctccttctagttccctgggagtaatagtttagcagtatttgctttgttcttttaaagatacttacactcatatggattgtttgaggtgttttctgtcaaaaattcttaaagtcccatttggcttggggtctcctttcctctcaaaagggtttttttgttcaaaatcttcttgtcatttgcggtgtattagtcagtttttttgctttgttttttctctctttggtctggtttgtttcttagtctttttagggctctaccttttggcctggttttctcaatagttgtgtttgtctcccatatttattttatacttggagatcttgtactgtggagtattagttacttttcatcatatcattgaaatttttgtttccgttttccaaaaaaaaatcttagtcaattcttctgttgcaaaagtgagagtgggacattttttttaaaggaaacgagtctcttttattaattaataatgagacaaaagctcatagtacaagagaattatgcaataagcaaataacctaaggatcaaccgtgcacctacatatctcaactaggttgacgcctccacatcatatgcaacaaactttgaaaacatgataatcaaggctaacataaagcctttacaacaatgattactaatacaaggaaatcaaacggggcaatccttgctaaaacactgtctaaactactaagggacaaaaacaaagcagaacaaaaaggccaatgaacaccatgcccaaattaagttgaggaaataaaagttctccaattcaattgaattctgacgtactgtaactatcaatctccttggagagaatgcaccacgacgaaacatttctattagcgacttcataacaatccaaccagccgagagatctgtcgtggtcgtggaagaccctttgattcctttcaaaccataattcctcagaaatttcttttatcgcgttaaaccatagtaaaagagaggttttgttgaaacatggacctcctaaaagttgtaccgtttctctacattcgtcactaaacacccaagacatattgaagactgagaataaattctccaacacttggctaaatatgagcacaagaaaaaaaagaagatgaattgggtcttcttcatgttgaaggcaaagcgggcaaatggatggagacattcaaatggccaaccaatagtacccaaacaataagtgggcagattgggtcggttatgttgttagtagctttccctgtacatatcttggcctcctcttgggaaataatccgaaatcaatcactttatgggatcctgtggtggataaagaaagagagagattagcctcttggaagaaaggtttcttttccattgcagtgagactctctgtttaagttaattttgaatggcactccagtttactattctttatttagggtcccaagtgagatttgttagaatttagagaggttaatgtgtgacttcctatgggaagggattgatgaaaggaaaggcaagcgctctcatctgataaaatggcagattattgaaaaaatcaaattgattcacttaggtggttttggaactgggaactttaggctttgcaacaaaacccgcttagctaaatggttatggcattttaactctgaacttgactctggcaaaaaatcgttgtgagtaaatttggtccccacccttttgagttgttgtctaaagggattagacatacttaccggaatttatctaaagacattatgaaggaccttcctaggtttgctcacccagtttgttgtatggtatgggaggggagagatacctacttcagggaggacttttgggttggggatagacctctttgtgcttttatttccttgtctttaccatctttccttccataaaaataatttcactgtcgatccttagtttggaaggggagcccattctctttttcttttgttttttgtcgtcctcttgccgatagggaatcattagatgtggcttctctttctctccctctgttagagaattatccttttcgccttggtagaagggatgtgagaatttggagtcctaatcctttggatggtttctccagtgttttgtccagaccctgttggatccttcttctagtgagtcgatttgttcagttctttggagaatcaaggttcctggaaaggttagattcttttcttggcaggtgctccatggttgcggtatcaagtttgataggttctccaggattttgtcttatctagttggcctgttctgttgtattctctgtctgaaggtgggagaagatctggatcatattctttgaaattgtgactacgcttgcatcatttgggattctctctcacaaatgtttggtagagtgagtgctcgtactagaggtgttagagacatggttaattattactttctccacccacctatgaaagagagccagtattctttggagtgcgagtacttgtgcaattttatggagcttgtggagggaatgaaacaatagagtttttaagggcatggagagggattctagagatttttggtcgtcgttcgtcattatgttttgctttgggcttcgatttcgaagcttttctgtaactactatttgggtttgatttctattagttgggatcctttcttgtaatggggttttttctggggttggtctaggccgcccctgttcttgtgctttttcattgttcattagtctcaatgaagcgtttctctttatcaaataaaaaaaaggaaagaaaaacagtacccaaacaagaatgtttgctcttcttgtactgttagtctgaaactttagatcccttgttttctaaatatggttttgtgccaagttggtatatcttggaatagtattcaacagtgcttcctaagaattgttagggagactcttacccaaacttgcagaaaaatcctttcaaaacaaagataaaaattccttggaacaacgttatcaactatcaaggaaggtccttgataggaaaaattagctcaaaagaaatagagcttgtaaagatagttgggtggtctactgcattgtggatatctttctttacagtttgtgtaattaaatttatcgtaacctaccaacttgagtttttaggtcaatgataattggctagtttccaaatggaactctattggcatgctcaaggataccttataaaagtgaaaaatgtttcttactccagactgacagacgagagcaggagaaaacaagaagaggcttgcgagtgttgaaatatatatacccaagactggatcaactgtggtctaggcgggcctaggccaaaatgccaagaccagtttgcatttgattcaatagtgttctatgaattaaaggaatatattcaagttgatgggacacgatcgctgaggacctaattctgttgttcattgctgcatattcaaattatgagatatggcaaagtcatcaacattgctttttgcaaggtcatcggaaagcttgcaactctatttatataaaccatgaatgaaattattgtgttgttgatcttctttcctttcatttttagtggaagtttcttgagaaatattattgccttttcatacacaatgctaaagcatgtactcctgtgagtatgtagtttgacacacgcaagatatgactccacttgaacagtatttgttccatagttggagcctgattctaaggagacatacaagaggattagcttaaaagtatctaagtagtttataatatttggaatatgttgggttctttatcttgttacatgtttcatttccttttagaaaaatgttaaaatggtcaaactattcataggtatcatgggattgaatgtgatgtatactatgaaattgatatatgggtggttttgtccttgagcccaaatccttgccctcatttctttgaatgggtggcaaagagggttaaaggcacacactaaaatctttgagaatatattttgtttgagctcctttctttgtccgagcttgtttgttgtgttgtgggcgaagaaaaggaaatgtattttgggaagaccaattggtgggggatatcctctcatatgtgtttcctttgttatatcaattatttttgtttaaaaatcgtcctctgtctggtttttttggtctgtttgactgagctctgtgtcctcttcttttgatttgctccatctgttgtccagtagagaagtgacattggtaggttctcttctttgtctgttggaatggtttactggagtttatagatggtcagtccgtaaaactatgaacttacactggcagaagtctaatttatttgaagaatgaagagttctaattcaattaaatacaataataaaaatgatatttttttgatcatatgctttcatgtggatgtatattctctctctctctatatatatttcttttcttgttttatgatctcatctggccaagatatttctgctctctttgtttgcaggcacttgacacttttaatacagctgttgtgtcgcc

SEQ ID NO: 8046 - DNA, 6105 bp, Cucumis sativus
  Intron number 8 from transcript Cucsa.240410.1 (locus Cucs a.240410) derived from phytozome v7.0 (chr-ID scaffold0204 7; pos 409169 to 415273 reverse strand)
agcacaatttcaggtaaattcttgacttctcatgatttaaactgcttcaacattgatggtatgacagtcattttgcaagggaatgtctagagcaatccagtggtttaaagcctgcatactcccggttgatgaataatcatgggattcctccattgaaatttcataattttctcttgacttttactaacaaaaacagatattgtaaataaagatagagaataagtcaaggggactttttctacagtttttttatagttttatggattttgttttgtctacagcttcgtattggtgcaaaaataagcaccagtttcaacagttagtcttttttatttagtttccaattggaaacctctattgcaatcaccttaggtgcttatttcattctatcaatgaagtgtttcttatctaaaaaaaggtagagagtaagtcaggatctcactcaaaataaaacagattgaatgctctagagaagaatgccctttttccaggaagcaagttgcctatcatctctagaggaaaatgcacattttcaggaagcaagtcacctttggacttcagctcttgttcaccatgagttaaagattctgctttcaggtccttccatttggtgccacaagttatgcttctttgagtgaaatctcacaagccatttgataggagagctatgcttttcttagcaagtcttccaatgatgaagtctctgagttgtgagcttccagtcttttagcttcttcctaaaaagaaaggaggaaagactcttacaaacttgaccacacgtctagtctcattgatgtgggcctctaaacgctaacgaatagtaatcagcgagcaattgaaaactagccgatccagagttagtcgaccacctttagatatagggattttcctccacttctattttctattgtttaaagcaattaaagcggtaaagacaatagacaccagttacgtggaaacctgagtaccgggaggaaaactacgacctgactttcttattaatttctcatataaacaaaagatacaaagggggaaataaatagtcaacaaacttatgataaaaacagaaaggaaattagggtaaatccttccttgggccaagcccactaattctaacactccccctcaagttgggatgttgatatcaacgagacccaacttgctagcacaagagtcaaaactttgtctgagaagctctttggtgagaacatcaacaacctgttggctcgagaggatgtaaggaatgcatatgctaccattgtccaatttgtctttaatgaagtgtctatcaatctccatgtgtttagttctatcacgttgaattggattgttggcggtgctaatagttgccttattatcacagaataatttcatcggcacctcacagtcttgataaaggtcagataaaaaattttgaagccaaatttccttatagatccccaaactcatggccctctatactcaactttagcactgcttctggccacaaccccttgcttcttacttccaaattacgggattgccccatacaaaggtacaatagccggaggtggattttctgtcaacaatggacattgcctagttagaatcaatataggcctcaatagctcttttgttggtcttcctaaacatcaaccctttaacaggagttgtttttaagtacctcaggattatgttgactgtctccatgcgttcctcatagggagcctgcatgaactggctaatggtactcacaacataggagatatccggtctagtatgtgacaagtaaatcaactttcccacaaggcgttgatatttttctctcaattggaacctcatcatctaatttcccaatttacagttgaattcaataggagtatcagcagaacaacatcccaacatacctgtctcagttaacaaatcaaaggtatacttcctctgagatatggagataccttcttttgatcttgctaccaccatcccaaggaaatacttcaaattccccaagtctttaagttcaaacccatcacccatcttcttcttttttttttcagttggatgattttagcaatgtcatccccagatttaacaatgtcatcaacgtaaacaatcaacatgatgatcttcctagtcttggaaacttttgtaaacaaggtgtgatttgagtgctattgactgtacccttggaacatgacaaaggtagtaaaactatcaaaccatgctctcaataactatttgagcctatacaaggatttttggagtttacaaacctgatgatcaaattgggcttcaaaccttggggggctcatatagacttcctcttccaagtctccattcaagaacgcgttcttaacatcaagctgatacaagggcccgtctttattcgctgcaatagataagaggactctaatggtatttagttatgcaactagggaaaaagttttcgaataatcaacaccataggtctgagtaaaccctttgcaactaatctagccttgtgcctatcaagagttccatctgccttgtatttgaatgtgaacacccatttacatcccatagttttatgtcctttagggagagtacgaatctcccaagtttattctttccaagagatcttatctcttccataacaacagttttccactcagggcacttaatgcaatgtggatatttttaggtatcatggtagagtcaaggctggctgtgaaggctctaaattgtggtgaaagactctcataggaaacatagttagaaattgggtgttttgtggagtctttcaccacagtttagagccttcacagccagtcttgactctacaaatgaagtgttttgtgcaggacctgataccttttcttagcgcaatggggatgtcaagaaatggatcataactatcaagattacttgaatgatcctgttcagcctcattaccaccaatttatgctctgacctcagtctcatcaacactgtccttttctcccatatcttcagcaacaacgataccggacctgtcattctcactgattttactgtcaacacatgagtcaataagattagtcataccttgatctcgtggaggttcagagtcgacagattagtaggggacccaattttttttcttatgagattccttctatggtaagttttccagggaacttggtttgtaggtaggaccacaggatgaggatcggggtcaagtaaggtaataggggttggactagtagactccaagggacaattaaactcttcactcacactctccccctaaaggtggctaacggaaatgaaaggccgatccccacgaaaggtgacatccatagtgactaagtattttcagggagaatggaaacatttatagtctcgttgaagaaagggatacccaacaaacacacacacctaagttcgaggtatgaattaagtctggttagggccaaagctatgaacattggctgtatacccaaacacacgatggggaacctcagaagtaaggcgggtggagggatacgactccttcagagaatctaaggaagtccggaggtggagacacgggagggcatcctattgatgagataagctgcagtaagaacaacatctccccacagataagaaggaagggaagtagacaacataagggaacgggctacttccaaaaggtgatggtttttccgcttggaaaccccattttgttgaggggtttaagcacacgagctccctttggaggattagaactcaataagggtatggttttgaaactcccgaccattatcacttcgaagaattgcaatttttgcattgaactacttttctatggtgtgatagaagttctagaaaatagaggaaactttggatttatcaatgataaagaagacctaggtaagacgggtatgatcatcaataaaggtctcaaaccaccgtttcccagaggagttaccgaccttttagggaccccaaacgtcattatggataagggattgttggtttggtttggtttatatagctgtgaggaaaggaaacctgatcttgtttggcccaaatatacacatcacaagataacgaggaaacatcaattttagagaagagatggggaaataaatacttcatatatttaaagtttgggtggccctactagaaatgccataacatacaatcttattaagaaatagtaaaatatgaatacaataaattagtcctagaggctagagctactactagcggaagtatcatcatcaaggagatagagtcctttgctatgctggacaatgtcaatcatcctcctcgagctcatgtccgaaaaaagaaataaagtcaggtaagaaagtagctttgcagttcagctcacgagtgatcatggttgtagatagcaaattataggtaatcttaggcacatgcaacacattttggagggatagcccttcaaagggaaaaacttgccctttcccaacagttggagctaaagaaccagaagctattctatcattaccagcccacagaatataagaaacaaaattctcagaagaacttgtcaagtgatttgtagcacccgagtctaagatccagggattcttctcatcgacactgataaaactaagggactgaggcatattgactgagcaatggctcctagagtggaaggtggactgggaccgttttggtttacggtagggctagatggttgagaggttccatcatactcactcatacaagcacgccctaaattttgtttattattttaggaacttttcttacctcctgtaggacgaccatgaagttttcaacattgatccttagtgtgccattgtttcttgcttgctcacagataggggtcagttaccgttgttctttggccaagtatacgaccacaaacaatgtcaaacttgggattgagaccagcaaggaagtcataaattcaatcaacttcttcaagtctagcatactgtatgccatcattcagagtatctcatattgtctctctacacaggtcctcccttgctagagagagtttattgaagtaagaggttacatccagagttcgttgcttgcaatcatggacttgtttcttcagtgtatatagacgagaagcgttctgacacttcaaatagagtttctcagtagtgtcccatagatccttcgcagttgctgcataaagcagaggtttgtcaatttatgattccatactattaatcaacatggaccgaataatagagtcctccctctccaaagacattcctggacatcaccgagtgggggccaagagtctccctagttagaaaagaaaatcggtgacgtccctcaagaatcatttttaccgattgagactaggaaaagtatttctggccattcaatttctcccttggaaaaacacctgtagatggagttgattgatcccaataccacatatatgtggctgctgtaaagaatcagagggtagcggtgtgtgaaatgatggcagtccataaactgagggcaacatcgatgtgtggatgtatggctgactaaaagggtattgcggttggacttggaaaaacaggtgggagtaggctggctgaacgacggaggggttagatagttgcatgtggggatacgcgcttggcaactgcgacgggcggacagctgaggcatgtgtggctggtttcctccactaggttgcgtggctggcttcaagggtgggcccattgtgatcgccgacgtcttctgaagctggttgtctactgcggcagtggttgtcttgtctatctctgtttgggtttcatctataatcgtgtctagggtttcgtctttacctcgctttgatactatgttgaaagcggtagaaaaaatagacactaagttatgtggaaacccgagtaccaggagataaatcacgacccaactttcttattaatttctcacacaaagaaaagatacaaaggggaaaatgagtacacaacaagcttatgagaaaaaaggaaaggaaattagggcaatcctttcttcggccaagcccactaattctaacacctattagttgccaattaagcagtttcttgtttgaatatattttaggaagtattttcattgttttcatctcatattactttgtttccttttgtaggtgttaaggctacatatctccttgcagtatctttc

SEQ ID NO: 8047 - DNA, 1089 bp, Cucumis sativus
  Intron number 5 from transcript Cucsa.285330.1 (locus Cucs a.285330) derived from phytozome v7.0 (chr-ID scaffold0265 3; pos 1745894 to 1746982 reverse strand)
gcctggtaggagtggtccttatgatatatatgtaatgtttctcttaatttggctaggcataatattttctttacttcgttatttatccgatttattcttccatacttttccatctattgtttgtagacttgtagtgtttggatagagctcctaattaatcatgctatgtgttacaaaagaataaacttgtagtcttgacttgaatcagactgttagatctccaatcatttacaccttcaaaaggaagaagtcagggaagggtgtgataggaattacacagaagaccaagggtggggaggttcttgggagggaacccacccctgattaggtatataaggaatgtttgggggattagcaaactgggtcatattttgggtaaggttgttgaggctttggaggaaaggattccagccttctcgaaggagctggagaataaccttggcatttatttctgccttttctttcttatttcactgtgttgtcctttagcgtattctgtggatatcttgtgaactcatctggaatttatcatgaatagaatcatagcagagtactgttactgtttctctatttttgttggggttttactgagtttcatggaaggagtcctaacacagacattgagctgaaccagactgatagagataactgagttcatgttcatcgtatatctccattcaattgagaaccactgatgaagctttgtctccatttctctttagtgtctcttctgttatgttcaatcagatttgatttaacaataagagttgtaaattttagctgttgaacaggaagacatcctaagtgatttcttacagtaaacattcttagagcaccaaactaaaaagtgtgcctatggtcttcttgcagtttgtatcgtaagtcctttccttgcttccactgtgtactagaaggatttagtttagttagtgggttgtgatttttaaattgcctcagaacctgtttagtgtttcccttgtgttgatctcattctttcagctgttatctcattctcatgtggtaggatgcactacttaaatttcttcaattgtaggggctttgggtcagctatccaacctccttgtcaaa

SEQ ID NO: 8048 - DNA, 8346 bp, Cucumis sativus
  Intron number 3 from transcript Cucsa.394390.1 (locus Cucs a.394390) derived from phytozome v7.0 (chr-ID scaffold0410 0; pos 351437 to 359782)
ccttggcgctcctgcctccacttcaactccttccagtcagtctctctctctctctctctcctcccccctccattctttcaataattgcttcacttcccactctttttccatttattatttccattccctcttcatattattgcatcctttttttctgccagctacattgttttgccttttatctctatctctatctctatctttttttcttattatgacttggaagaaaataaaaaatactaaagcaatcccaccttctctgtcaatccttttgatttaacaaaaacgaaaacaattaaaaacttggaagaataattaaaacacgagcaaacagcacagcgaaccctagtacagagagacccacgcctttgattgcccacgattctcgcggtttttgccggtgattattgcttcctcagtgttttcagttttgtacaatggacgtatcattatttaagcttggggactttaaatggaacagcaactactcaagtctggaccttagtcccttccctatagtgacctaaacattttcccttcccttgcttctgtctggactgctgatcatttgttttgatttcatttctcggtcagtttcttttgtttcaaaattcattttccttttctgtcttttcttatccttttcgatggtaagccggataaaaacagctttccgtactagagatgcagtctttgactattggatattggggatgactttcgcgtatggtaattaattaaatggtatagacttatggtcggcctggttggtcacaatgattaaatatggaggaagcctacacaaatggagttcagaggcttttttttttttttttctttctttgggtttaaacgcctcttcttctcatcaaaatatgaaacgggttgttttactaggtaaatttaagatagcacagaacttacacaattttcatctttcctcctctgggctctggcatctataaatgggtgggagggagaggccctcctcctagtgcatgtttgtttagttgagtaagtcacgtagcacgagtgtggcaggtggcgtagattgttgttatccttttcatatgtagctggttttttatttttttcggtcacctattgcctttgatagcgggtggtgtagatttttgttatctttgtttacatgctatgtgtgttttttttttttagaaaaaagggtttgagaaaaatatttgcaaacacctatttttgtatctcacaaaattgttcatttatttctttaatatgtgtgataataggggaatgcatagacttaatgtatcttgagaagagatgcatctaaataggtctgcacaatacaatatcatctatttatttctcctcaactttccctttttcactgttgttttatcacttgaacatttccatacttgagatgtttgtaggactgtgtcgaacagttctctcatcttattagactagaccctacgaatacatacttgaaatgaaccacagtaaaaatttcttttcctttgttttttttcttaaagaaagatacggaccaacatagtaagatgagcttggtattcataagatgcaaataggccggggagaaaaacaagaaagattggaagatgtttaatctattaatttcctcaagcaaggactaaatagtcctttttataacttaggttaaaaaatctctatgtggtttttctatcaataaaggtaatgttcccttgggtaacacttttatgcaagtttagcaacattttaaagaattgtaaatatacacttttatgcaagtttagcaacattttaaacaattgtaaatatactccaagtccaagtaacaaacttttaaagatggacttaaatttggttatatctaccatttttattctcttgtgttttatggttaaatctgtttggctgatatacccaataaaaaaaaagtaaatttgtcaaattatttactaatatacagtcaattttttaaattctatcaataatagatattgatagccattggtgatgattaacattgataaaatttaattttgttacagcaagtattttaatttattttgctattcactatcattaacaaaatttagaattttgctggtaagtattttaatttattttattattttaaaaaatgttcctatttcccactatagtttttaaattcaccttatgctcaaaacagtgggtaagcctttcattactctattttttatgtcttaagaattttcaatttaaggaactatttatttgggttgagaatattcttaatttgcagtttaaaaaaaaagcttattcttaatttgcacttaaaaaaagctatttttaagtgttaaataagcttttattttctactaaagcagaaaatatctttgagaatgaatgttactataaatttttagaacattcaacatagttttagacgatgtagggaaacctttataaatgcatattgatgtaaaaagggggtgagtggattatgaatacgaaccgtataaaactttctgaagaaagaaaatattttcgtctgaaatttaattattcaaaatttcaaagaatgtaatattaatgctcatgattcagttgtttatcctaacgataaagaaaaaaaaaaaaaaggttagtagagcgattctcaaggtaatacctgcaaaagtctgtaaaataacctacatagctgcatagctacggttcccaatgccaattatcatttcccataaactaatagtcttcgtttccggtaatctagaatctagagtttagttgctctttgtttttctttttcgtatattcatgtatctcttgtcttacaaccgctatatacatattgtgatattcagtttgttttcttccccttgcaaatctgttaattattttatgttttagaatttagcgaatagaattgtgccttgggtgggcatattggtttgaaaatgctccttgaattggatagtatttttcttttatcttatttgttttctatctttgaaattgaatgtgggttaatattttgtttgtgtttcaaatctttttggtaagtttctcctggtgctgatagtattgatctataatgttataatgaaagcctatattcatgtgactgaggttgactaaccgttgacttcgtttgttgagtaagtgatagaagttatggaatatgaatataatattttcattagagaagtgattatgattatatcacttccttcatcctttttgctttttccaaaaaatacctttttatctctgctcatactattgcatttgtaatatttagatttgaaataaacgcatcatcaagggtttatacacgaggaagaatgcttcctccccacgcacacacacgccgaccttttccgccatttgcgaaatctgcaagtgcaaatgaatgaatatggcagctttatatgttcacatcatctttgattaaagatttagctttgcgaaagggtcgtctagatcatggaatagcaatctcataggtcgtagtcggaaactaatattatttattgagaaggtacatttgccttttttggtatgttgtcttgtcgtcatctttaaaatattttttcactttgggctgcctatcttcaacgctttcattgggggtgtgcactaggtctaatttgtctcttatgaacaacttatgtgaactatgacttaaatgttaaagagcagcaaaaaataatctattataattaagctattttattgaacttatttgtgtctaatatttagggttttgttgtttagacaactatgtgatttcatataattgtagtttttttttttttttccattcgactggacactatttgtttgtatttagtgatttacaaaacaatatccacggtattattttcttcctattatttttcggacttggcgtaatagccagcggcaatggtgtttgtaatgtggtatttgtgaaatttactggtttatacgatgaataattgtggtttatttaataattaactttgatatggtatgatatgttcatacagattattttattctcaactcctaagactttagcgtggtttttgtgcaataagatttataccaatatatagtctccatccatcttctttttactcttaatctgtttgaaattgtgtatgagcttcgtttttaataatgtttcctgttaatattttttgatcaaattctctcccctcctgccaagccaattcacaacctttccttacaaggatagctatagtttcaaatatataaccattagattcaaatgattaattatttatatatatatatagtaaaatttataagagtttataaatccatcatggatagttgatagtactagttatatttataatttttttaaaaatcctcccataccatttataattatatccaaaattggtgtatgttataattatcatcccatagtagcggttgagtttttgtgtttttttgtaacacatctcattaggatcagaagactgtagattctttggttcgtcaattttcattgtcctatattcatgagcacgcatatataaaaagaaattttcacaattttaatttatttaatacaataaaattacataatcaaaactacaaatctcagtcactaacacattataaggtgttatttgtttccagttatagttaacagtggatgaaataattttaaaataagtgaaccctaaaccaaaagggtgatctttcagtccactaatgttttacggtgtttgcaagtatttttaaaattttaaaataattttttgaatgattagacagaatgttataaagtacaattctttagaaattaattgaagataatttttttttataaaaaaagtcagacataccactctatcataattgggtttgctacatctccatcccaatattttaaaattgataaatcacccctttaactacttaatttgctacggatgtattgacaaaaatcaattaattttgggtagtttattaatttttgttcttagcctctatgtttgaaacatatattatttatttatttttataattaattgcccttttttcgaaatcccttaagagtgattatttgtatctgaagtttaatatctattagtgtttttaaagcatgttagattaaagcatgtgtacttttgacaagtagggtaagtatgtttttaaacatttccatcatagggaagatatcagattattttttttgtttaagatgatgatctaccagttgagcatggtgttacttgtttggagatatagtttccacctcagcacaataatactgtttagtcttttttttttttaattattatgttatatgttaaaatcacgggtggatttagtgctatcaatattattagttggttcaaggataaattactctttccattccttcttgatttagttttaagtttcacactatttttggatcagtcactcgttaaaatccttttcattaaaaacatatactgaattgatggaaagtaagaaaataattgttggggaatagaatgtgagatgttttagtgaatcaacacaagtgtaatataaatatgaataatggatggtttgaattggaagtaaatgaatggcgattggtaaaaggaatatgaaaaatatgtaatactccattctgtatactgtgatttaggtgggtcagggtgaaaaaaagaaaaagaaaactcggggcgtcggaaaagtggtgggtggaggagagaagggtgtgaaggtttagtgtaggtttcagtctcggatcacatggactcccgtggttggcgctgggaagcagctttaaggcctttcgctctctctcacacacgcactgtctcttcagtcttgggtgttggttagtgcttaccactttctgtttacaaatagtctgttgtgggtctttaagcttcagtttcataatgtgtcttacacgtgtgacctgcctgcttcatatctgtatcttcccattcccacgttcggatctatttcttttaattacaaaaatataatggtgctctgtgatcattcttgagggccctttactgccaattccgtgtgcccttgtctctcctgtgactctccaattgctctcctcgttttgaccactggtgtttctactcacccagaaccctcccaggatacggacttcaattatttttggactaaaaacttggtttcccgtcccgtttcgtcttttgtcagtataatacatgtcctactagactacgagtaccctcaagaactgctataaattttcatccatggtttcattagtcgatcgtatcgtacttttacctttaatctggtgtggtgtacgcatcttctccctttccgagacaagttttgattaccacgcccaatttgtcttcttggaccgagagcctgcattttcactctctctgacaagctagtcaactagattcttaaaatgtaactttgtttgaaccatttactttgctttatttgctttgctttctacccttcaacctcttttctattgttgtcggagatgcttatgtaattgtctcatttcttttctaaaacacacatatttagctctgagattttccatcttagctgcatttttagtcttctcattgttgtaactgtggttgctttttaggtttattcggtttcatcgttcagcattataatgatagctccgcgttatataatcatagtttttagttgtatgactggttagttatctgatggtcagttagtttaacatatgaatttaaaatttggcttgaggagaatgataacatatactggtactctaaagaaaaagaaaagatagaataatactatacatttccatcagtttttcctcaaatttagttctctctttaacttaaaaggggtcagataaatgatgtcgtatccagttcaaggttctttttttttttttttttttttataataatgaaaatggaagtgttgatttctgttttaactagtttcttaattttaaataatactataaaataatgaaatgtaccattttctttttctcaagtacctttagcacaaacaagtacaagaatcatttctatgttaaattacacgtttaacctttcaaccttttggtttgtatatatatatatttttgtaacattctaaaatatcaaatgagtctttgaattctcaatttcatgtcaagtgctaattttctagtttctgttcaataaattctctacctttcaattttgtatttgatatgagttcgattattaacctattagatttaaaattctattgggttcaatcctcggtgagggtccctaataattaattttctacgaatccccttgacattcaaatattgtagggtgatgagagttgtttcgtgatattagtagcatgtagaaagttacatatataaaaaaaatgtattttatgtccaaaggaaccttgaaatatcacattctatatgtaatctatatttgattgatagatatatagaaggtgtaaaatctcaaatatttgatggtttggtgtattctcttctaaagtagacttgccctaagagctttatagcttgttcataataacctagaaagccctcaaggaagatttacattcagtaacaagttatcaagcttctaatttttatgtgagttatactcttcatagtttcatagctacaatctttgtgacttcacatcttcagggcttcaacctctggaacttttgatcttaggagcgttagccttcggttcttcccttctcaggtggagctttagattttcatgtggcttacagcgttgggctcagtcgctttaggctcaaagattgggcttgtacacctaattattcgtttggcccaaaattcctccatgaacttgaattgagttagacttttgacctgagctacttcatttcctcagtccgacccgttttataatttcaggcttaatccagtctctaaatatttgttgagagcacacaaagattggaattttttagagaatattttccctctttcttaaaactcatcccctcagttttcactcttaagtttgtctagcttccttactttgcttctttcatcatttcttttcttgctttacaactcctatttgtaggtcagatatctttaaactttagcttgagtattattctagacttctcttggatctaaactattttacatatttctgcgacattatccccatttagaaattctccttggatcccaaataaagagtaattatttctagatctttcttcgtgcatatttacatgcatcttcaacataattatggagaagtgtattacagatacttctgcttctactttcacatgcttttgtttattgtatgtatggctgataatccagttttgtttacgtgctcatttatgcagacgagg

SEQ ID NO: 8049 - DNA, 5608 bp, Cucumis sativus
  Intron number 5 from transcript Cucsa.266220.1 (locus Cucs a.266220) derived from phytozome v7.0 (chr-ID scaffold0235 2; pos 718145 to 723752)
gacttggcaagagtgacaacaaaagaattgattgcgtatgcctcaatttccatatataactttgtcttgttattgatgttactatcgttttctttttgatgacaaacatatgttattgacgtaactatgaactttatactaaaagaaactttaacaaagacatttaaataactctcactaatgatatttgaacgatcctttgggattttctacttatcgttgtagaaaaatcattgtccattgcttttaaattaaatgctaggcaccttatgaaatggatattaccttgtttcataaccttgagtattgactaatcacgtaacagtgatagttttattgtgacagtaaatatccattattttgcttggactaagcaaattggcataggtttattgtagaaaataaagaattgtttttgtgccagactaattgatactgataatgagtagctgttgacaaacatgtggaaaggtacatgaagcatacggtccttttctttaattcctccacccatgacataggaaggatcaagaattagcatgtgttgaagcagatttatctctttgcctatgaaatatcgtgcatttctctcaatataagtgcaccataagaaacaggcgacaacttctttgcctttttcttgaaaggttgttaagtgagaagagatttgatatcaattggcttttaccttatagttcaaagtagaaaaccatttggaataggggaaaagctagttccaaaagtaggttgctgttgaacattgaatgaaatatggactcagagattctactgctttcttcaaaaaatgtgttgccttggaaagagagccatctaagaatttctcgtttggattttgtttaggttgctaatattatctaactaggggatcaagggccaaaaccaggagttattgactttgaagagttgcttttaaagaagagtccataaaagaaagccaatcttgaaaataattcaaatttcatccaaaatgaaggttcgaaacggacaaggtatcattccaaatatgacctacggttttgaaagaggtagtagggatggcatacaatagagagtagaatagctagtaaggacgaccttaaccttgattaggtcaatactgagtggaatccctatgaattattaatccctttttagggcccctagcttgatgtgtaggagtattgataagtacatgagagattttctgtgtgaagtggctttgcgcttttcccttgaacccgatactttatggcataggattactgtgggtaatggcacccattcttttgaatggactgtgaaaggggttaaagacatacatcgtaatccttggaaagatatctctttctagctttgacaaatttacttgtgggggatggtaaggacacatatttttgggagaatcattgggtgggggagaattccctttgttctttatttccacatctttatcatttatcctcttccaaagattgtatggtatcaaatcttttggttggctcggagaatctcgcgcctttctctttcgggttctgttgtaatttgatcaatagggaaacgacggaggttgcctcccttctttttttggttgaggggtgtagctttagggagggaagaagggatgtttgtgtttggagtcctaacctgagtcaaggatatacatgtaatttcttgttctgttgttggatccctcccctcctatggagtgtttttgatgtggtttagaggactaaggttcctaagaaagtcaggttctttatttggcaagtcttgcttggtcgggttaacactgttgataggcttgttaggtctttttgttgcttgctttgtcggaaggcggaggaagaccttgattatcttttttgggattgccagtacgagtaggctatgtggagttcttttctacgggaatttggtgttagctatgtcggccttcaaggcattcgtgtgacgatcaaggagttcctccttcatcctccctttagagaaaacgtgggtttttttatggcttgcaggggtgtgtgctgttatttgggacatttagggggagaggaacaagtgtttcgtggtagggaaaagggttatagtgaggtttggtctttggttagatttcacatttccctttgggcttcaatttcgaagaccttttgcaactatattacactggtaacattttactcagttggactcacttttagtcgaggtgttttcgtggtcttgatttttttgtatgcccttgaatacttttattttttctcaatgaaagctattatttctataagaaagaaaaagcaagacatgaggaagagggaggtgcttcccagccaaatttcctcctataaatttctatggaggccaaataacagcaatagaagtaaacaatagaagtaaacaatagaagtaaacaatagaattaaacaatagaattaaacaatagaagtaaacaatagaattaaacaatagaagtaaacaatagaattaaacaatagaagtaatgagagctttagaatcacaggcttccctccatcctctcagcccaaatgacaatggctttatgacaattgctttcttctttgagttgaattcttaggttagcttttattttttaataataatagaaataacaatttccattaagaaaaaaatgaaagaatgcactgacataataatagaaataacaatttccattaagaaaaaaatgaaagaatacactgacatacaaaaaaccaagcccacaaaaaataggggaccccctatacaagaaaagggggttccaactatacaaaatccagtctaaaggataattctaaaagatcttcgaaatcaaagcccaatgagaaacatgaaaatgaacaataaaccaaatctcccaactccccttttcaacccttctattcctctcattccatgacactcacaagatgtgcttaaacacaagcgtgccacagaaatggcctctccccgaacgacggattagggaggaactccatgatcatcactctaacatctctttgatgaacatacaaaaagccgaatgtcttgaaaaaggcatcccaaacacaacttgccaactcacaatgctaaagaacatggttcaagtcttctggcacataatacaacagaaaggcccaacgaatgaaggcaacttcttagaaagcctatccaatgtactaatacagtcgtcaagaacttgctaagaaaagaacctcacctttcaagggacctaaatcctccacaccaaagaaaaggttgacttcaaaggataaggctcaaaatcttcaaatctcttcgcccaagacagaaaaatgactctcaagaagggaaatgaaagcctcaatgtctgctctttccctatctgaaagagaacaacagaacccaaggaaaacatacaagagctcccaatccacaccagtaaatttgtcacaaaatgatttttcgaagaagacaaatgatacaactcgtggaataacccacgagacccccacccacagatcttcctgaaaatatgtctctcttccctcccaaccacacaatggaccaaggaataaaataaggaagctctttcgtaatgtctttccaaagatttcgataagcgcatttaaccctttagccaaccaattgaaaggatgggaaccatgtttacttgcaataatcatgtgccaaagagaattagagttggtggaaaactgccatgtttctaaaggttcaagctgcactaaggcgcaatggtcctctggagtctaggcgcaaggtgcatagaacggtgcgggctttttttcatgaggcgcattatatgtaaagaatatatatgtgtatgtatatatacatatgtatctacaaaattgaaaggagcaacaatgtggcgtaggttcattgctagtaagcacccttatcctttcgagtggctctttaaggagtttagaggtactcactggaatttgtggaaggaaatatcaaaagagtctaccttcttttgttcacttggcttgttggcttgttgcgtggtgggggaaaggaaaggcatttatttttggggggaccattttgtggaggagagacctttttgtactttgtttcctcatctgtataatttgtcaacttcaagaatcattttgtgtggtttgggagttcttgttcctttcgggttatgtcactctctctccggtatggaagcgatgaatctggtcttttcttgctttactccaagatcacctctttaggcgtgggagaagggacatcaaaattgggagtcccaattctttggaagggttcttgtgctaatctttctttcgttgtttggttgatccttctcctttaggagtcttggtctttttgatgctacgggggattacgatccctataaaggtgaggttctttacctacaagttttagatggccgtgctaatatgttggatcgacttgtgaggaagttgccttcccttattggctctttttgttgtattcttttctggaaggtgggggaaaacttggaacatattccctgatgctatgagtttaagagttgtgtatgagattctttcctccaaatgtttgggttgatgcatgcttgtcatttagatactagagctatgatcaaggagtttcttctcaacgtgccttttggagagaagggttgctttttatggcttgttggggtgtgttcaatcttatgggttttgtggtgagcagaatagtttttattgtaatggaaagggactctagggagattttgtacgtcatttgcttttatgtttctttgtagtcttcaatttttatttctttttgtaaccattctattggcgctatttttgcatggttggagtcccttgttgtaaagggagctcccttctattatgggcttgtttttttcttgtatgtccttgtattcttttattctttcttaatgaagttgtttttacacaaatatatataaaccacccttctccctctaaaggccgatagaaagtttcacagtattcttgtggggtaagcaatctgtaggggagtcaaattttagacgctgactcttcttcaaatagcactactttcaatcgcctaaaaaatgttaagtatatttagaaggaagaccaaatacttttaagagagagatctccagactccaattctgaattctccagaaagggagtgggtaatagacttttgctacttacaagatgggagcagcctctttgttgttaccttctcaaaacaatctcacaacattttcttaaggtaatcttccctggaatgttgaaaagagacaattaatgtgtggacaaggcttgtgagtgatatttgaaccaagttaaggtgcccacgtgttccaagaggtggtattcgtggaaccatttccaaaacaggcttctagaagacgggaattacagttcaagaggttgacactatctttctttgagattcatcacaactagtttctaaaagcttggttttgtggatgttgagattcaaaccaaggccacaacgcattaatcttcttgttcatagtatatttggatgtatcctttttctgatttcctaaaatagatgtcttttattaatatgttgcaaagacgaatgtgcttatatgaaattgatatggttaacagaaagt

SEQ ID NO: 8050 - DNA, 1444 bp, Cucumis sativus
  Intron number 2 from transcript Cucsa.107250.1 (locus Cucs a.107250) derived from phytozome v7.0 (chr-ID scaffold0093 0; pos 667992 to 669435)
aggaagacggaggaagagtaaagtgaaatttacaggtgaattagtagagaatagtagtttttttgtctctattgaaaattaatattccgatatttaataaaatactggaaattaattcatcatttctctctcttcctcttttttgagaattaatttaattttctctgaaatggaagggaaaaagaaaaacaaaatttattaatattattttattgttaattgttaaaagaagttttttaattagtatggatttcaaatttgtgataatgatgtagtcgttttgcatggcagaaccaacaaaaagaaacagctcatcttttctgatacaattagctgtcttttctaaaatctaaatttggcactgagggtatcttcgtcattgccgagttgggcactttttataaattggcaaattgagcttacacttctatgcgccattttccttacattatgaattacaatgatttagttttctaattaccatataaatcatgtcaccttctcttcattatcaaagttataatattttaattgatgtaagcattatgttattttcatatttttcgtttggtgattcagattgtaataaacactgcttttgttagtaggcccgccccatgtgctatctgatggagcctatttattcatgcaagctacggaaattatttatttttttttttttggtagaaggatgaaataattttagtttgctatatatatagatatatatgaagtctcattattgtgctctaagagatcttgaactttaaaatatatttattaggtccttaaatttcttgtttttttagtacaacaattgcaaaatgatggattgtaacctctgaccactagggacggagtgcatatcaatcttattgagtcaagctcgtgtttgctctaagtccctcactagatatagaattgaaactttataggcttattaaacacatttaaaactgtcatttaacattcatgtatattagatactgagatggtttggcaactagtaatttagtgaaaaaccatttgtttatttaattttactagacagggtagaagtgagaaaggtaaagaaagattagattaaacataatatcaaggcgccagtttagtttgaaacggaaagatggactttgtcttagaaactttggatatagtctggctataaggctgtagtattaattctagttttgaataaaatagtaattgaaaaaaaattatctttctatcatgataatccttttgaacttattcttctaatggaatgctctgtcaatcacagtccagaaaaaaatgatctcttttcacatctattgctctagacatctacaaggatttactttcgtagcatttgtgtaaatcgtttttattattttatctcctacgttctttaatgatataaaattcaaaattgtacgagtaacttatattttgtttttcagtc

SEQ ID NO: 8051 - DNA, 973 bp, Cucumis sativus
  Intron number 4 from transcript Cucsa.363210.1 (locus Cucs a.363210) derived from phytozome v7.0 (chr-ID scaffold0361 1; pos 807358 to 808330 reverse strand)
ctgcaagaagtcaattttttctaatagataaagatgtaaaactctttttcaaactttaatttctcaatttctgcatcagtctggccaagtttttccttccatgagagttattgatttcatgaatttagcatgatccgtgttcatgctgcagattaacctcatctatttgaccaattgtctttgtagattacaaattacatattaaatgaaaaagaaaattatcatttcttttagcactatgtaatggttgtcaggtatagtagtcatgtctctgctctagcttatatattcatgtctatgttactttaacacttctatttattaatttcatgaagtcattgagttgattttaattatcatgatcaacctgctggggaagcttaacattaagcttgttttgtttacgtttgaactactcaaatttctagcacgtaaaaattatcattcatgaacatgataaagcatattttaaagatgtggaaaactttttgtttaatgtttgattgaacgggaaatgaattgtttgtcattattgttgtcttgcctttcctactaccgtatcttttgggtaaagctctttcttgtactacttcttgactttgattttaatttttttctgtgaagaatgctcctccttccttgttctcaatttttatctacatcatatttgttttcttacatctgatcccaaaaaggtcaactattgtgcaagtgttatatttatagaatattgatttcttatgaaattgacattgatcttaacttttcagatctattgttggttttttaatctctatgaagtgtatttaattgttatatgctcttcacaccttattatcatgattgtgatgcaatgattttagcaaggttatgctgctagatttttaactccatgttacatatgtcatcagagcaaaataaattatttctttgtacagggccttatcacaaaagaaagaacaaacattgatcc

SEQ ID NO: 8052 - DNA, 6834 bp, Cucumis sativus
  Intron number 2 from transcript Cucsa.050500.1 (locus Cucs a.050500) derived from phytozome v7.0 (chr-ID scaffold0055 5; pos 142867 to 149700 reverse strand)
cgacctcgtcgccgccgtcgccaacctctccgctggtacttatacacttttttatatactatttctttgctcactatttctatctcacatattgcctacattatttctcctttccatggttggaaaaaacctcccctcctactaaggaaataagcataaaattaactgagaaagtactaaaaactgaaaattcaacaatttacatacaaagcttccaacttcaataaaaataatggactaataaaaaattcactacgtgtaaagttgctataatcttaaagaataattttttctttctcgatctggctataagaatactctctccaagtttttgactacccacaactttttctactctccaactagagaatacaaaaaaaatttaattaacaccagaacttaaaatgcttctaatcgagataattgaaaaacaaagatatagacttattttagtctataactttcctaaaccatttcattgtaggaaaaattcacgactttcttaaactcttttaatgtagaacaaatctatgatttttctgaactttttttttttaggttcgacagttgcatttttaatatttttcccaagaaaaaacccaacaattttctcacttcaagatatttgaagaatctacagcttatggaacatcgattgttttaacttgcaatcataattctcatatcatagaattataatctacttcactataaaagtaggccacttggactaccaccttccaatattttcctttttcatcacatgttgataaactttactaatatttgtagttcaactttcatctatttgatttacctggaagtttttcagtcattgacataacttccaccacatgccttgcataatcgccaagcactacaagaaatagaggttctcccgacacggtaaagtgttgacatatatgccaaacaatgttggaaagaaagttagaagtactgtgttaggagagtaattcttgaaacacaaacgtgaaggagtcgagagttcttttctctcgacacagagcattccaacggatggggcacgtcgagcggtgaaaggtaccgctcgacgtgtccatccagagtcgggagaaaggaaatctcgacgcagcgtcaggattggcttcctcgacactgtgtttagaatgtcaagggaagggttcttattcccgacacctttatgcgtcaggagataattttaattatttttttccaaatattatgtttttttttttttttattcgtgagatacttttttttagttcgatttgatttaaattcagtaacaacaaacacaaaatattagaatcaataaaatactaaactatcatttatataattagaaaatacaattacatgttttaaattgaacaattacatgaaaagaaaaaagtatgccatcttcaaagaagtccacacctacaacgacatgaaagtaaatttatatatcaccgataacaaattaaacaacttaaaaattttaaaatatacatcaaaagtgttcaaggttctctgtgtgcccaactcattttctcaatcatcttcttcatttcttcaatttgtcgaacaatttcttgcatttttcaaacatgaatctctgacactctttattgttcttcaatcaatcgcttagcttcttcaagctcacttctttgttcttcaatctttgattgcaagcactcaaggctagctcttagttcgcaaatctccctagattgtatttcttgcaaatatgaagacaaagaactgccaccatttttcggaacttggcttgggacccaatcatgaccttttgagtagcctggtcgtctatccaaaacggttcacatatctcatcctttgagagtggttaagaatcttctgatgtgggttggactggagttccaacatttgattttgcacccaaagtgttaagttaattatgtgaactcacaattaaaagtagaaaataaatcaaaaggttctcataaacttacactctcatctgcgaccgcctgtgaaacgaattggccactcctattggcgtgtgtttgtttgaacagctgcacacaatccactagttgacctagttttttagtgagctcatgttgtcgttgtaggaacgacttggacccgctgctatggttgtaaggctatttcgctctagcatccttgttggtccttgattgcttctacattcaaacaataaaaatgatacatacaaaaaaagaaaaacaaataacattatggaacattagaaattgaaatgacctaaaattgtcgacttaaatagtgatcgcaaaggaagttctaatcttctaaactattcaccaatttgttcagtgggttagcacgtgcttgttcaaggttgttaaactttttaaaatgtcttaggtagtctcccctgaactctttgaaagtggtgagcatttgatgctcacaaaatcaattaagtgcttgatctgtgaaatcaagcacgtaccattgttacaaatgaaagaaaatatggattagattcctgtatatgtaggtttaacatacgtgtaaagtaattaataaacttacctatagattgcccttgacaacctatgtactctggaggaacatcagcccatttaaggcagcacactaaaaaatgtacctcgcgttaatacacctgtagaccactcttaaggtgcaaagttgtcgaaccactaacctcacattgtctatcatggcaaagcggacataccacgaagataaattttgtcttctttagaggaagtcactgtctcccctaaccagaaggcatcatcaacattcgatttagagccttttgacgagtctggttatcttttatgtccttaaactatcaacatctccagcaacctattttcagttaaaaactatcttctttaaacctctgttggaatcattctttaactgcactagaacatcatcaccgtttaacttgcacttgtgtaatctagctaacttatatcagcacatcctgaacttgctcttgcttcaaatcgaagttcattttccattaaatttatccacatcaaactttactgaactcataagggttaacttatctacttcacttcctagcaaaaataacaaatagtgacaactcacaatattcacaaatattgcaaccagttttaggttagacaccgttgcagccgtagagaatacttggaaattcaagaaactatgaacccaagggtttaataccatttgttgggtaaaagctctcacttctactataggaaaaaatagaaaaataataaagaaattaagagaaagcaataaaaacagaaatgataagaatttacgtggaaaactctcaacttggagaaaaaccatggacaaaaaagaaatccactatgtgaaattgcttcaatcacataatagttttctctcttttgatcctaattatatgaatactctttcaaaaaatttggtcactcacacctttttttccactcttcaacgagagaatacaaaaaaaaaaaaaaaaaaaaaaattaagcgttattacattgcaacttaaagtgcttctaactaaaacaatttaaaaaccaagacataagctctttttaagttgataaaaaaaaagtaaaaattaatataaaatttaagggtattttaagaaataaaaaaaaattcatactccacgtaaaaaaactactaaaagataaaatttattgcgctttactttgatggattaaattttattctaattgtatctaaatcatttagaaattaatatatactactctaattaagtgaaattagggttaaggaaaactcatacgacttttgaagttttccaatcttcgtaatctcttcacgaacacgaaactaggataaccactatagtgttgacctactattcttcagatttataatcgagttgtgagatccgataagtgaatgaattgaccaaagggagagaaatggaaattagattagggttaagagaatttaggtgagtttttcactttttgttttaatgtcaaaagatttttcaatcttgtaaaactagcttttcgatagacaaaagacatgtaactattgcaagtgaaaattcacttaagtccagcactttacattatattgaatgttagtggaattattcaacaaaaaggttgaaatttttcactaatttcagttaaaggacaaaatagtcattcgactattcaagtcaaatcaaactttgatttttcaagtgaaaagtcaatattttgacttttaccattttgacctccttgactaattctgacctctcgagtatgaatctgcatttcattttttcaaaattcaaattacatttgaatctatagttggtcaaagtttaacttttcaaagtaaacaatcaacattttgacttttttaactttgactatttccatcgtttttgagatttcgaataagaagctgcatttatattttttatatttaaatcatatttaaatataaaactctacttctaaactgatagttgtatattatatcatatatatttgtcggtttatctctccttacctaattcaaactatttgaactaatcttgtaagttaattccatatgagcttgtaagagaatctaatggacctataaatcattggactctaatgattcaaaattaactggttaaactcttttagaccaagctaatcaatatttgtgaactaacgagtcattccactaaagtctcgtagttgcactcccccccactatagatatatttgtgtccatctgatatatttatgattggtaagttaaactttcacaagttgtttgtaacctcgattggggcaaaatatcgttttaccccaaagattacatcttgctccttaggtctcagtgatccactattaaacaactggtttttatgtctaacttaaaaactaaatctctctcgggccaatgtgagggtggagtccccttgttcaagacctagattaagttcttaagggaataacctatctactaactctaaagcgggtaggagtgagttccgtcttgcactctatgttcttagctatctatccaatcttacacttgaaatgggaggcttattaggtcagcactgttgagctaccctcatctatgtagatctagggataatttcatgtgaacaaaagttcattgttagctcggaattaagattaagttacataggtaatcaataatcgaaatagttagttagtcaacagtgttataacataaaagtgactatttcattattctagtcttatgcaaactctttacataagatgtctccactttcatctctctacatgaacgatttaggatcacattgtttgtactaactacaaagaggactgcaaccatagtgtactaaaaataatgtgcgcaacattattattcatatattatagaccgttgattaggctatatactcgaacttgatttatgttgatgtctctacctgaagttcaagtttactcatgatagcatcgggatgttattttgttggattgaagattataatatttaattttcactaataaatcctcaataaccactttattaaatgaaatataattttaaattacaaattacgagttttaagacataaattacaacatatttttctataaatcataaatactttctcaaattttctattttgaaaaaattttcccccaaattaaaataagtgttccaatcttaatctcaaatttataaataaattgccttttttaccgtaggatgggtttttatttgaaaactcatgaaatagtattcacaatgagcttatattattttatttttaaatagttcattccccaaacgtatttaatgaagtatttagttatattaaaatttatttttagagcttatattgaaattaaagagattaaataatgatagaaattgcaataactaactaattaagtttaaagttggagtttttttaagaataataaaaaaatacaaactattttgtgaaaaaaaaaatcacacaacaaaatttctttattttgtttaaaatgtcacttttctatgaattcaaaaaaaatatttcttttatttgttgaaactaacttaaaaaatttttatttttaaaaatatatattatttttaaaatattttaagaacttgatgaaactaaattttatttataaagaaaaagtttaatttgatgaaattaaaagaatatactaaaaagaggaataatgataatagaaatagaaattttccttcttatttttgaagacaatttttaaaaaactaatgtcataatttgaagtcatttggtaaggttttccaagttttctattttctattttctattttctatttcttattctgtttattgttaatattcttcaaattaggtttccattttttaaatttgagttctttgataacaaaaatcgaaaaatattgcttcaaacaattttctgaaaccttttcttttattccacaaaaatggaaaaaacagtaccaatcacttttttctttttctttttcagaataagaaaaaggacactattgaaccaactccttggcttcttctttcccgttttctcgtttttcttcatatttcaaacaaattcaaaaagtggtattttatccttttatatacaatgtatcacatcacaataaagttttaatatttttacctctaacgacagttgatggaattgatgggtggaaggttttagtttaaattttcactgtataactactaatttattattaattcaaaaaagagtacatgtaggggattagaaaaattaaaactgtgaatgtgtatagaccaaattgttataaattaaagttgatatttcttcttttattggtttgaaattgtgagcatagggatagata

SEQ ID NO: 8053 - DNA, 4454 bp, Cucumis sativus
  Intron number 2 from transcript Cucsa.184670.3 (locus Cucs a.184670) derived from phytozome v7.0 (chr-ID scaffold0127 4; pos 316049 to 320502)
caaggctattgagagaagaggtacctctgaatgaaatttgtgttattcgctctttcagtggatattttgtagttgttttcacatttaatcaacttagtattactacatttgtcacccctttccttggtgctctgccaccttagtacctgatggtcggataatcagtttgaccgtatgttctaatgccagtttgtgccactcaatgagacgactctcaagtgatactttcaaattttcttttcttaaatcagtaaaatattcagttggttctgttgtgttttctctctgaagctgatgcttgaaagacaagagggaaggaaaaaccacaccgaccctgtttgactctaaaggtaaaggtataaaggatcttgatcttgaccatccttttcctgaaggtttttggaagtctcagaatataaacagttggagggagatcctatccagggtatgctattaaaataggtttttatcaatgaatcattatcaggggcaacttgaagtatgtaatacctgtagacgtatagatgcctgaattgaataaaacatagaagcataaagaaaatttctccaattattgtggatataagaagttgcattgaagcatcatgagctggacttgaacaacaatcagggggtgataaaacaatgtcattgaagaaagaaataaaggaccaaaaactccaagtatgtaatacctgtagacggattacaaaagaaaaactcttaaataataaaagctgtaaaataaagagcaaatggttgcttgttcttgcacccctgtgtgcacacacaaaaaatggtgcagacaagagtataaggtccagaaaaggatcaaaggagtaggaaacctcccataagagactcactattcctagcactgtaaagagtccaaaagaaagcatggcttaaagcaagcccaagatgcttagtaataccattgaaaagagtggccaaccaaagcattatccaggaggtttaaaatgcttttaggaaaaggtaaagaccaaacaaaagcctccaaaataagtggatagagagacggcatggagtcttggctttggattcacacataatgtagaaggagataaagcaatataaagcatgtgcctttgtaaatgatcaaccgtattaatagtctaagctttcaaagaaaaatctttattttcttagaataagtgccctgatcactgtataaaggttgtgatggtaattggcattacccacctaattctctgtaagaggtttaatagaaaatcacatggaagattcaagaggccaagtccatgtgttaggagaactgtgaagtctaaaagtagacaaaaggtgggatatattgagcacagaagatttaagaggtcaagtccgtgtgtcaggagaaatgtgggtctaaaactaagcaaaaggttggatagattgaacacatagaagattcaagaggccaagtccatgtgtcaagcgagctgcaaaatctaaaagtagaaaaaaagtgtgattggttggcccgtttagttgtttccacatcaacgatgttttgacgaaggctcaaatcttatgcttcagttgcccaactcactcgtccgccatcatagcatatgcattagatgtaagcctaaacaagtagcggcatacagtctcataaacaccccaagttaaccaagaatccttccagaataaagtagaaggaccatctccaagcttacattgagcatgaccagcaatcaagtccaccatgtgaaaaatatcttcaagggtgttgatggtatcaccagttttattctacatgagattgtaacaggcagtgcttcttcttctcaaaagaaatatgagaaagttcccagcaactgtgatctatgataataatttagggacattatggtcaactgttaattcagtaaagcttaccacaattcacaaattattgctttcctttattctgctaaatttttcaatctatacttttttgtatctggtaacattatatgcactattaatgccaaataaaaaatgtcattccatggtcgtaacttttggaactaggttacgatatgccaatgagttcttgctcattttacttgattgttcttgacttgtttgatgattttggtccgctgcatgctggattcatcttaggatttctgtatgtgtcgagtctaaatcatcatccattcagaagttctgaggaatcaaattctaaatgcaggctgagcacatcaaggaacggtctaagcaggtatgtacttactgtttgacgatgtatgcttgagagtgtattttgggattttatatttgtagatttgtaccgttcaaataatcttgtctatgttctatgttcttacatgaactgcattattttgtttttatttattccttcatgtttctttcccctttttttttttattatatatattttacttactatttatttcgaggtggacttcttggaaatgtatagtatatatgatgagttcttgatgtgttaacttaatacttcacattcaagagttgaacccaaagcatattttcacagtacttaaacaccaaataacatcatgatacatattatgtttatatgatgtgtatgaactagtctcgtaatagtttaattgcattggtaactcagatacttggtacaagcattatcatttacaatgacttaggtgctagattagaggttagtaggttgtagttctagacagctgtaatttttgtctctcatattattaaattcggagtccatttgagcaaaaatgaacttagatgcaggcttaagcctaagtaactatatatgcctttagtttttggtttagaagttgtaggattgaagtttttgtccaatggaatttctgtattcaaataaatgcatttaaaaaattaaatatgatggataaatatagcgagtttttcttttctttttctttttccctgcctaagaaattttaatcaagaagaaaactactccagaaatatggacatatattatatccataaattttaaacttctttaagcaatatgattgtttgaagaataagtaagcataagcacagagataaaacttgatatttaagaaaatatgattgaacattcatgcagctttatggagttttctgatgtttcagctatatatcgtaatttatatgttctgtaaacttttcatgtgaaaccctgttgagagaattgggaattaaagagtttttaaaaagcagctataatcattttgaggattgcaagaagttattaatatccagtttatctttgaactactaatataagaaatgatttctacgtactaggattttgttatttcagttatgctgggtaatttagccttgtgacaaccatatgagaagatgacttatgtttcttttagcattgtcctctaattgcatttttcaaggaatagaaccaaatcctagagctttaaactaatcgatacaaatacaaccactcaggtctgaaaagatagcttaatgctcctagagatgctttggtgatatttgcattagttccctctttctgattctgtgtgtatactgtattcataaaacccagagtaatatattaatctgtaaaaggtaaaacccggagtaatgtattcattaacatttgtaataacagaagaggaatcctcattggaaaatcaaactgcagaattgtttgatatttgttcatcatcttgacttgaataacttttttgtcctgtatcagctattaggtgctctaagattcttgcgatatctcaaattcttctacctaattgcttcttatgctgaagaaacattaagattttgaaattgtgaacatcataagattttttttagtgttgtgttctttctgtacatatcatttattgttgaaactatctttttctatcgcaaaggatatgtctatttcgcacatcgtagtttctgttgaagtctctcatcattgattttttcctcaagtttattaggaaaaacttcatgcccagtttatttttccttgggccattctgaaatttgttcattgaatttctgattgacccgtgtgcagcatagaagttataatctaaatgggacctacctgaaattacatttacttgctgcacatactggttgggctgtctatgttcacagaaacagaataatcatgaattccgagcttttgcttgatttattttattataatcttgttatttcccacaagttctttaggttcgtggtatttgtcattttaattgattgttagtgtttcatcagcgtaagaagcaattgggtagaatttcattgaccaaaactccattagcatcctatagttgtttagtttgattgcatccaaatgcaggacatggcaagctactttaaatattacttcttactcctggattgatttcattctctttactagtagtattgctgacgaaccgattatctttattgaagctgaagaagaaactcattccaattagtgagaagcg

SEQ ID NO: 8054 - DNA, 1333 bp, Cucumis sativus
  Intron number 3 from transcript Cucsa.165840.3 (locus Cucs a.165840) derived from phytozome v7.0 (chr-ID scaffold0115 3; pos 1140659 to 1141991)
aagagtaagtcctacatttacttatgctgaatacctctgtatttgtttctattggaagtagttcatgctttttgtgtgcacatcatgtgatttctctaggaacacttatgttttaaaatttgtagaatgggtaatacatggggtgtatccccatcacccgtttttgtgcatccctttttactactcataaaaaaaatattaaaatatttataaaaaaggaaaaagcataatttgccacttgacaagttatgattggaaattttggttgggtgcataaagacagatgatagcccaaaaaacacccaaactatttttcttttagaattgccttggcttctatctaaccaaagtttatacgaattttgaaatgtgcttttaattggttacatcacatgcactttttacccttgcaaaagtcagcctaaatgcatccccaactatcacttcttttccttctttttagtcaaggttaatggatcccaatcctgagaatcagacattaatgttggtttatcgtcaagtaaactatctccacttttttgtaatttcagcttattatctaccctctttccataatgaagttgtcttcagtaactatttcacaattaggattttcttttgtattctacttcatcaaccgattaaatggcttttgtttcccatcaaaatttatatattactagacgttggcttacacatggattaggcatgagtttgattgtcttagctgaaggaattgagattggcttacaaatggattagagacgagtttgattgtcttagccgaaggacttgagattgcctaatataaaccataaagtggaaatggatgttttctgtccttgagtcgcgcatgtctgagaagaaccattgcgtcctgtgcattgtgttagtcttttatgtgaaaatgaaagaatagaacaagatgatttgtggacctctgcattctggttgaagtagggccttcatcaatatactgaatttgcatatgctgatttagaggaaaatgacattattctttcaattgcaaatttagttacttgtcgaaagttttgagaatctgcaatgctgctctcaaagaaagtacattatcttaactttaaaagaattcgatatcctcctttcattgccatgtagaaatagttgggattggatagtatgttcatgtacataaactttctagattgttaccgaaattagtctaatttgaagcccgaagtaaacgatgaaggaaactttccttgagtttggttgtgactttgtgagtgcttatggatctcctaccaattttcattatatagctaattggaatgtttacacttgacagcttttc

SEQ ID NO: 8055 - DNA, 3057 bp, Cucumis sativus
  Intron number 1 from transcript Cucsa.383480.1 (locus Cucs a.383480) derived from phytozome v7.0 (chr-ID scaffold0388 2; pos 491973 to 495029)
ccgtccagcaaggttcagagccttttttggtaagagtcagtaagtattcttgttctcttttccatttagagttggagttaagtgtttgaatgatatggtgagccgtttgagccctttagttgttatgtttgggtgaattttgaagttttggactaaatgctttgaactgttctaggatagattaaagtgtgtgtgattagtttttaacctgtgaaggcttgctgtttgtagttttggactagctcggactgatcgactcaggtctatggttgttgattttgggggtaagtattcttttaaacactctcaaatttcaattaaggtcttcaaaatgagttctaatttctaaattttttatggattctttaaacttcgaggacgttgatatttgtccaagtggatttatgatggagaattgtaggatagtcaattgaggtaactagcttccacatcccttccagaatatgaatttgtctgttggggtttgatgaatgtttgaaaatatgtttggaagtctgttttgtattatttgaaactgtttgaaattcttttggatgttttaaatgttttcctattagaaggcgtgttttatgtgatttgaggattggccaaaagtgtattatatattttcagttgattatgtcagatggaagtgttgactcttttgaatgatagttggaagtggttttactgattttgaattgaaagtgtttctgtttttgttttggacctttggttacttctgaaaacttttgaaaggtatgaatggtttgaattgagaaattcttctgttgaaaatgctatttgaaactacaatgttttgtttcatatgcttctaaatgattcaagggggactatttggatatgctagttttgttttaggattgtatgctagttttgttttaggattgtatgctagttttgttttaggattgtatgctagttttgttttaggattgtatgctagttttgttttaggattgtatgcttattttattgtaaccaaaagtagaatttcttgcactcaaacactagaattcttctgtataatctttgtttacaatgtttgcactggttgtacaacaaacagtcatgattaattggtaagaatcttttctttgtaaggcatagcattttaagccatctttagattggtcttttgccatttcattaatgattcgattggggttgacgccatcaagctgacgaaccacttttaaatttgagtgataccaactttaccattttgatctttggtgttcagatatagtcaatgaaactttctacactttttatccagtcaagaaagaaactaacttagttccttggttttttgtttacttatattcttccagaataagttggaagatttatcttgtcagatttattcctccatctttgaccaccaaaatattggtgatggctgtgaggtttttgatatggatcttgaaatggagactggaattcatggtatcttggtggttgatcttgtaaaggaggggggtaaccgtcatctctagaagaattagagtcatttcccaaattaagactaggaaaatcatgcaaaatatccatactgaagttgaacatggacaggaaattgattctgcagttgattttcatgaaaaaatttctttgttgggcccctggaaatgcttctttctggttcttgatgttgactcaagcctcttggaggaatgcttaccagttcttgatttcttggaaagttctatgagggttttgttgtctactttaactttccaacaaggttccccaatttattggcttcttaatgagcatggtcttgtttttggactcaaaattggttatttgataattttcctatttcctaagtaagaagtgcatttgcttgttgcactcccatatggtgtcattcatttatcctaaggtgacttcaacagtagttaacatttggttactcattttgaagaagaagatgcatccctgtcatgaggtgggggatcatttcttttgttggcatttcttctttccaccacttcacaggacgctccaattaccaattaatgaaaagtgttcttggagaatgcttgggacaaagtctttcttgatcgagtgaatgaagagaagaataacaagcccaagtgtagaggttgaagcaaccggctacacatgcttgattaaaacaaccagcagcaaaagactaaaaagatcaacttaaataattacttcctgaactaaaacatatctagaaaaaggacaaaacaattacaaaacacaggcttaactcaatctgaaaataccccaacattgtttggaaagaagattgaagattcatgtgtgttgtgctcacattgcctttacacttgagtaattgactgttgttttggttgattgctaatcaacatctctgattgtatgaatgaattagatgttcaacggtaataacatatgttggattactacaactattcatctttcccactgttaaaacgaaatacataagactgaaagttatgcttgagtgaaagtattgaccatatggtagctttgtattggaaaatattgaaagatttaatcttgttaaggatatgaaagtttatttattaaaggtattgaaagttcatttgagcgttttggatttactgaaggactgtttgaaagttttaggtccaaaaactccaaacctttagttagttttggaaagcttatttgatcgtaaggttttgatttggaaactacgctgaaagctttacgtggtttgtattcttgtgtacgaaagttttgaaagaaaatgaatttcaaaactaattgcttattgagtatttttgtattcatttttctttttccaaaatgctttcacttgaaggattaagtgttagttatgaagtgaagtttggcgttttggtgcaagacatcaaatgatgcttcgtttggacttgatagtttgacttcgaacttgtttgtactatgttacttctattgaaatgtgttagttgtaaaagcttctaattgttacgttttccactttttgtttcattagttggattgagaaataccgactattaaaccatcatc

SEQ ID NO: 8056 - DNA, 5348 bp, Cucumis sativus
  Intron number 3 from transcript Cucsa.212560.1 (locus Cucs a.212560) derived from phytozome v7.0 (chr-ID scaffold0154 3; pos 354469 to 359816)
agcacattcacttgcagatcaggtactttagtaactcttctattttgcttgtgtatcgaacttcttccttggttttattggattttgttagattttgtgggcttgttgtgggttgaaagcccaacggtagttttgtaaattatgttaccttgattatttggtcttgcacgaagcgctccatatgtaactatgtttcttacaagaacctatcacccaatttagagcctttacaatcagtctggccttaaaatgtcttgagtggaaaactgttgtcatggaaaagatgagagccctttaaaagaacaaaacttaggagctctgtgttctctctaaggagcataaaccatgggatgtaagtgggtgttcaccctcaagtacaaagtagatggaattctagacagacacaaggtcaggttagttgcaaaaggatttactcaaacttgggattgactactctaagagtttttctcctattgcaaagttaaagggtccttctgtctgttgctgtaaacaaagattggcctctatatcaactagatgttaagaacgcattcttgaattgagatttggaagaggaagtctatatgagttccccaacaggctttgaagcccagtttaatcattgagtttgcaagcttaaaaaattcttgtatgggttgaaacaatcattgagagcatgatttgacatgtttaccacatttgtcaagtccaaagggtatagttagggcactctgatcacactctgtttacgaaagtctccaaggttaggaagattgctatgttgatcgtctacattgatgatattgtgttatctggagatgacaccattgaaatcgtccaactgaaaaagatgggggatgaatttgaattaaagatttggagaatctaaagtacttccttgggatggaggtagccatgtcaaaagaagatatctttgtatctcaaagaaaatacactcttgatttgttaacagaaacaagtataagggatgcaaacctgctgataagcctatcgagttcaatgctaaattgggaaattctattgataaagttccagttgataaagaaaaatatcaacgcctagtgggaaagttgatctacttatctcacaatagactagatatcttctatgttgtaagtaccgttaatcagttcatgcggctctttacgaggaacacatggaggcaattaacagtattctatggtacttgaaaacgactctggtaaagggttgatattcgggatgactgacagaaagtgtattgaggcctatactaattctaacttggcaaggtctgttgtttgacaaaaaaaatccacctttgagtactgcacttttgtgtggggcaatctcgtaacttggaagagtaagaaaatctcgtctactaaaaaattgatattccaagatagaacaaaaaggacaatatacaggatgggtagaataagttgtgatagttggctcgatctcggatctgaaagaatgctacgggatataatacaggagaaagtgctttaaccgctaggctactccgctccactgaaaatctgaagggtgaaggcaacatagaaggcatgggaaatcaaagaagtgtctcctctggttatagaacattctcgcaatctatacagaaaaccgaaggaaaaagctctgcgtaacctagaaaaacggaagctcccttgaaagggggttatggacagaagtacaggactgagtctagggatatgaaggagatttggctacataaggttttatttgatcttcatcaagactatgaggttcctatgaaatttttctgcgataataaggttgctattaacctcgctagtaatctgattcaacatgatagaaccaaacatgtggagattaatagcactttattaaagcaagactggacaatggtagcatgtgtattcattgcattcctttaagtcaacaatgtcacaccctctatcggaccacctactctagacctaagagacaatgtgaagtcaattgatatcgtctttgtctcaacaacatcggttgactctaacctctagacctttacttgaaacttagcagaagcatataactcaatttttagagaaaggaagttcaagtgccattttactcacaaacttttagaatgtacttactaagattctgacaataccaggctttccatacaaataagttctttgttcccacaacacaactgactatgttctgaaacactcctttaaacatgatcactttagaaactctcctatcagattagtcgacatgacaacaataaactcggctcagaaaaatatgatcattatctggaaagtgagaatattttgaaagaatcagctaaaaatgtccaaagagtggaagttttctaaaacatgtttttctgaaataattgggctcaacgtttagcttttcaacctatgcaaaccatcatataagcttctaaaacatgtcaattcaattctagtaaatcattttctttataaataattctttgtttcataaaaatgattctctgttcattttgtaccctgaaactcggtcatgttagcttgataactcaatactaccgtggctgataaactttgtcatgatagtatcatgcttgaactcagtcaagatagcagagtaaaatcgatacgatcctacctgaatttggtggtagctggctaagtggtcagcaaagccccataactttgatactctgtgcacattgaccatagataactcagtgtatagaaagaacacggttttcttccaaaaaccttattcatcaaactcatgttttgcaaatatctttgtaaaaaagtaaataattttatttcagaaatctcaaagcatgctcataaatcatttctaactagctcaaacatattcaaaataatctaattgaaaacatgtttgtaaatagctttaaagtcatgcttaataaatcaagcttggaaataaacttcggaaaccatttaaatttaaatgcataagtcactcacaagctattgcgaggcggcactctgcatgcacgccaggtccaaggggttggctgcgtgttaacctcaaaagcccaagcacgttgcacgtgcctcactgctgcacatggtacgcttgattgtctgcgtgcataatcgaccacgtggtaggtgtgttgcgcgtcgtgtgcgcatgattgaccttgtctgtgcgcgcatcgcagttcgcatgacctaggcgcatgcctcttggatgcctcaaggcccacataacctctctcgcctattttgcacgtccagcttaccttgtcttcttaacacttgacccacccttggatcttacttagaaattggattttcgtccagattttttactcgactttgaagcttaataactcaaattaaaaaagctttcttctacaaacttgcttagaaatatcttaactagcatacctcaaaatttcagcttcagattccaaatattgattctgtaccttcaaaacactcggcactgtccagatttccttcgaaaatgacctttgttgctttcttctcttcaacgcattccttcctcacatcttctctatttggcagccctatccttgatactaggctcaatttaatagattttccgagtggaattatccaaattacacgagtgaattgtgaaaacccttcacccaaagttccctttatatagaagtccttgcatgcttccttaatgacacctcctgctcgctcttacatatcctacttgtcactttccacctcatgttaatcactttatactcctacttggcaaatcctaggtgccttgcatgtcattcccattggactcctcacttcttgcctaaaacacctagaacatcaatggccacctattacatgttttggaggttttcttaacaaggttggccgcctagatcgggtttacttggcctctaaaccatctcacaatgcccaacgcgtgcctcaacgtattaaggttcccttgacacctcgtgctgcctatgacaacctcatctcgcctaatatgctgctttggtcacctagcaactcatcacaacgcctagcatgccttgcttggtcatatagccttttccttactcaaagctaccatgtcaccttaaccatgatgctaaaacaatgacaccaatcataacacttacaaccattaaaccttagttaaatttctctccaattttttttgcgaacaccaatcttaaaccatttttctccaactaactcaacccctattcacctcttgatttccttagaagacctagggatctttgggtccagggtttacaaacaagttgctaatattctcaccaaggggcttctcagacaaagttttgattcttttgctagcaagctaggtctcattgacttttacgtcccaacttgaggagaagtgttagaaattgtgagcttgttgtgtgttgaaagtccaagggtagttttgtaaattatgctaccctaattattctttcattttctatttaggctcttgttgctcattaatcttccctatcttgtatccctttgtttcatatgaaagttttaataagataagttcgacggtggtttttttcctatactagggtttccacgtaacttggtgttatttctctttttatctctttcaatacatattttctttctatggccttgctttatatatgttttatggaagttgaaagagaatgaacatatcatgtactgcgtggggttttgattcaattgatgtgaaggttgcttgatgaacttaaattctttttctgtaactggttggtctaataaattaaggtgtaatgtaagtctaatgtgtgacagtcacatgaaccatcatggattagcctagtggtaaaaactaaaaaggatgacatagtttcaataattaagagatcgttggtttaatccatggtggccatgtactttgtaattaattttctacgagttttcttgacacccaaatgttgtagggtcagacggattgtcctgtgaaattagttgagatgtgcgtaacctacctcagacacttgcagatataaaaagaggatggatgtgaactatgtgaatacgaccaacgtgtcgtccttttttacacttgactattatttttaccgtatagactaaattgttacgaaagttaatagcatctatcaaattgtataatattaaagattagggactaaatcattataaattttgaactaactagcaccattctgagtgatgcagagatttttcctggccatgtcctggtggaattgttagtggtgatcacttctttaatccatatttcttggtgatcttgctactagtcttgaaaggcacaagaactgggacttgaattcattttattttattttatttgtatgtaga

SEQ ID NO: 8057 - DNA, 3701 bp, Cucumis sativus
  Intron number 1 from transcript Cucsa.097150.1 (locus Cucs a.097150) derived from phytozome v7.0 (chr-ID scaffold0091 9; pos 2497570 to 2501270)
aagattacctcgagtgccttcaccatttcaaggaggtaacaccttccatttcccttaactctatattgcttctgttttgtttttctcccaatcgttcatgtataggttagattgattgcccgaaccgggattagatttttggttcctcgttcctttgagcttctgttgtctaattcgaccagggttcttgcttttgacatcgcattcgaagggggtttagtgagatgtggtttagatctcgttttatatgtaatttgttgattgacaaaatttctggagagatttgaattctcggctacttggatttctgtcgctttaggtgatagtgatcgattagggaagaaagtcataatcagtttaggcattccttcggggacatcaatcagtataggcatttctgctaacacataatagtgtgtttatgttactgaacatagatcttttctatgaagattgcatctatttacacttacaataacagcattgagttctgcgtttgttttattccaaaagaacaggacagaatagtgggatatgtttttggtaaattgaacatatagatacttacttgttaaaataaaacagggcacctttatattgttgaagaacggggatacagcttacctatgatttgtgaagatttgaatttgtaaaaagccacttaaacaacatcacgggtttctaagattaacacaagactgtgataagcagaactgatttttgggttatgtggcatcttaatggatgcttgtgttaggccttggaatcaattttattaatcaacaagaacttgggaaggaattaagtgctccactctctcccaattctcttaagagaacccaaatacaagatattaacgaaaacctacctcacccactcagccaaactgtatatattatggaaacgactgcttcattgaaaaaaaaaaaagaatactagggtctagggcatacaaaaaaccaaacctacaaaaaaacccctctaaagaagaagtttctatgtaagtaagatgctacctagccaatcaatatatatctatatatactcagcaacccaagtcccttgaacaaacaactttctttgggacctacacgcacactacattctctctcacgtaactgcacctctcttcttatgcctacgagaataaactctcataactcgggcctatcagcctagtaatgaataacacaagaatgtcatgtctctatatggaagaaagcaactttagttacaaacaattaggaaatataaaactaagcttctttgttgttggggttaatggccattcaatgagcctttagtatgtaaatagggttttgcataactccatggactgcaaatagggttttgcatcatcacatcttcttgtttcttgcttgcaattttgtcacacattgtccgattttgagtttacattttctctttcaatttaaattcatctttgctggccacaacatccttcacccttgagtgttagatctcaacgtgttttcttaccactccttcacacacactcaagtcttgaatctctaggttttctgtttcagatgtttgttgcactatttcatagcttcatatgagttcttgaatttcatgagtgttcttttctttttaaaaagaaacgagttttgtattttaaatcaaaacctaaatactcaatgccaacatgaattttgaattacataatactacaaacacattccatcacacccaaacgtcaaggaccaaaagagatatttacccttttaatgacttgctaaattactcccctttttccccacttttggtttaggcgttggtacctgctgcttgtttaaatttgttttcattattagttctcttaattttactttcatttatctcgaaggtaaatggattgtgctagaaattgactttatttttatacctaaatcagtgaatctagcaccaagtaacaaaaatcacagtgctaggtttttgtatgaataggttaactttttttagcatgatcatagattcaccatggttattcttttgtgggatatttgggggaagaggaataacaaagagttttagaggtatgaagaggaaccgtggtgatgattggtccttagttggttccatgtttctttttgggtttctgttccaaagactataagtacttatcctccaatagtatcttactttgttggaaaccccttctttaaagtggttttccaagcttgttttttttttcttcttttttgtttcccttctattctttcattttttttctcaatgaaagcagttgtttctattaaaaaaaccaaccatgcattcatatgatcttttttgattttctgtgggatatactgctaacttgaggcagatatgaacctcaatccgattactatttttggtaccaccttatattggaataccatattcctttctgttcatgtcattgagcggtgtggcctctgtctgcaattgccatcatattatatggattagtttgttatatcagtaagcatagttaaatggactggtcgattctttaatttaattaatttattttatttttttgcatcactaatatcatcatcattggttgatttactagtccaaagtgcaagtggttatcttacatgtttttgaggtttcaatcatggttcaaaacttaaattatagctaccaaactaagatgctagaaattttaactagaatccttcacaagatagtacttgcgattattccatagactagtcatgcaccatgtcgttaagaaccaaagttttaaaatacctgctattttacagtgagtcgagctggtattcgattctgtcaattgctaatttgacctagatgacaaaactatacccaaatgggttagattatgttatggcgttattcttgctgttgtttttttttaacatataaattatctaaatgaatttatggaaccattatgattgtcaattgaattctaatatttatcaatcaagtggggtattcaattacgatcctcttccattggcctttcaaatagagatcgttttctttggtttttggaggtgtgcgcattatcgttgaatctttgggaggagaggaacaatagtgttttgtggtatggagagggacctggtgtggtttgtccttgctgagatttcatgtttatctttggatttcactttcaaagactttttgtaattattccttatgcaatatcttattgagttgaaagccctttcctcagtggaattttttgcagggtggtatattttttcttttctttttttcttaatgaaagctgttgtttccgtaaaaaagtcagaacaattaactcaaccaaaattcattatattagtaggattaagcacatcactgttaaagaataataggaactcgtggataaacatccaaaatggtatggatgtgatgagggcgctaagggggtgtcaacctagttgagatgcctgggtgcgcctgctgattctccctctccccctttgatctttgtatgtcccttatgtactttgagctttatctctctattttcattattaataatattgtgactcgtttccttcttaaaaaaaacatccaaaatggtagaagtatgatctgcttttattaaaaaggattctgcctgctttgcgagtatccgttttaattcaatttactttgtttgggccataccttcagttccaaagacgaaaccgtgtttataaggaggagca

SEQ ID NO: 8058 - DNA, 1146 bp, Cucumis sativus
  Intron number 14 from transcript Cucsa.050780.1 (locus Cuc sa.050780) derived from phytozome v7.0 (chr-ID scaffold005 57; pos 12854 to 13999)
gcattactcatccagtaagcttaattagaagctgatatttcgatgtactttatgtgttctgtggcttatctacctttttgaattgccaggattcaaaatactggagtaccaatattttgagcagctacaaaaatctgaacattgattttttaaaaaaaaatatttcattgttctcttggtttggccatctaattggttcgctgctcatacagcatgtataaagatgatttaaggatacattagagtgcaatatcttacacttctgaagagccattaagcgtgacaagctaattgttagacttgtatttggattcatcattgttattttgtattttaagattaattcagattacttctaaaactattcttggcaacttagatctcacaaataaactaaagaaaatacctaggtttgaaaggcttagcacttttgacaaaggccagactcttaaaaagactgatcatgaaccaaaaagaaatataacccatggactgaacttgattgaaaaatgtcttcaaacgtcaaaagtcttcacctaaccaaggctgtcttagaaaatgagtagcgaaaaataccttttttttttaaacagttagttaagattgagtgatatctatttgaacttttggccccatttggtaactattctgtttttttgtattttctttaaaattaagcctatgtcctctccatgttttacaatgttttacatctttcttaaatacattggccaaatttcaaaaccaaaaacaatttttttgaaagctgttttttttagttttcaaattttggcttggttttttaaatcattagtagaatgtaaataacaaatgaagaaagttggaggtggaagtagtgtctataaacttaattttcaaaaacaaaatggttaccaaatggggccttagtttttctatttttaaagaatatttagtccacagtctcaaccaaatatcagaaattaaaaaaaggtaattttcacaattgctaacagtttactacaattctattgtatcattgttctcatgttatagtgtttagtcagtaacagatttctttgtatatatttttttaagttctctctaaaaattttatgtattcatgattttgagtcattaaaatttgtttcttgaactaggttgtta

SEQ ID NO: 8059 - DNA, 1120 bp, Cucumis sativus
  Intron number 2 from transcript Cucsa.146590.1 (locus Cucs a.146590) derived from phytozome v7.0 (chr-ID scaffold0110 0; pos 36379 to 37498)
cgatcccccagaagagatattcagcctacgttgatgtatgttttatgcaactcttttttctctttaactcttttcttcccaattaatgttgattttttttcttgtattctgaaggttggtaacttggtaccacttaataggcagtaatagtagcccctttgccattctatgcttccttgtgacatttaatatcttgtgagtttttaaataccaaatatttttcacttttccaaaaatatgggaagcgaccaaaacgtgcctgtgagtaaaattagcttgagaaacccaaagaaggttggataagagtcagtcagatgtaaaacgagtcatgtggatagtagttgagttggagctgagaacgctcttagtcttaggaattaggattctcttgggaagaggatcaatcaagtgagtcgtgttatccttgtgtttagaacttgatactatcctcttccagccctttaaatgaaatgcagcaaaactaaaggaaggaaaattcatagatcaacaccatcgtctccgctctatggaaactgcatactgcaagatcacctggtgtatgtcttcaatatataggttatgaaccaaccatagagttctattcgacaggtgaggagcttatccttcaccctcccattttgtgttaaagggcgtttttttgtaacagactggggtatatgctattttgttggggctttgtggagtgggacaatagaatgttcaaaggttaggatagtttttcaaacgatatttagtccctcattagattctctttttctaaactcttcgtaagttgtaactatttgcctaattgtattgctctaggctggagtcctttgtagcttggcgtgtattctgctgtttattcataatgaaaagtggaatgcattggttgtccgcacttttgttggtttagtagattcttttggaagagtacaccgatgtagagttttattaaatgtaaaaagtgttgtaacaataacaaatcgacctttagcactttatcttgcatggtcttgttttcaagtacttcattggccctgaattcatcctaacattctatacatctgatctttctctttttctctttttaaattacgcttcatttcagtgaactaac

SEQ ID NO: 8060 - DNA, 1516 bp, Cucumis sativus
  Intron number 1 from transcript Cucsa.106590.1 (locus Cucs a.106590) derived from phytozome v7.0 (chr-ID scaffold0093 0; pos 138406 to 139921)
tgactgcagctctgccaagcgtggcggcgatctaggttagctcattaacctcttcttttttttttttgctcttttttttttctgatcgttgcgtactcgttactttttattctccatttcttgtctgattggtgtaattttcagtccggaattaggttgctttcactttatcatgcattgagccttgagccctggacttaactgtgagaaatattaggctcacgtttgatgaagtacgatttttctactttgggttgctcgcaattgcttttgttcttctcatggaaacaaacgtttgaattcgtagccaaattccaaaaacaaaaatgaaaacccgctttatttggcttggattttgagatcgtttataaaaagtaaaattgaacacaaaaaaaactttttggggaagttgtgtttaagtttaattttcaaaacccaataatttaaagcacaaatgattatcgaagggccgtagttttagggttttggtttgttgaagatttaagattcaggggttgaactttattggggatatgtgtctatatttatgtatttgcttcattcaagtgtgggattcatctcgttttggttggacagaatacccttgagtatgattatatcctgccactctcttatttgctttgtttgtgttgaattgttatttctatgagtgaggaaccgtattatatctcagtttctaagttgaattttttacttactttatgaaaaaccaactatcatcctgcattgacgctcgaagaattaccacatgattgtgatagatctggttatcttcttacttttagaacctggaagtaggttgatacactgtgatgaatattgtgtggaccattttacttgaaaaccaatgaaaggatgacttaatcagtggttgattttagttaaatgggttttgtttacgtgctgtcagttggttaaactaacgttcaataggagaatctatcttcagcttttctcatatatttagcaacaagcaagaacatcagcactttgaaattctctatttggaattctatgagatctatgaacttaaatgaaagctttgaaaaaagcttactctcatacgacttcattttcaaaacacgccaaaaatgcaattcctttttgttaaaattggattttcttcttcttcttatactttaccttacaagtaagagagaattaaagagaaaaatttagagtcttgttaatatgttttgcctccgctcagtttttctctccacccttgcttgtctgctagaaatttgtagttatgtactcagccctacaagcccagttgataaactcccgaagtgtaattatgtttggcgttcaatagcaggtctttcgacaatttcttggatcagaaggatatgtcgtgatgtgttattcattaatagctgatactttatcctagcaattgtgtttgtatgggttaggttaacatacacaatatagaacgtatctaaatgaccaacacaaaaatgttattacaggtcctttcgggcgtggccag

SEQ ID NO: 8061 - DNA, 5285 bp, Cucumis sativus
  Intron number 2 from transcript Cucsa.169910.4 (locus Cucs a.169910) derived from phytozome v7.0 (chr-ID scaffold0117 4; pos 140209 to 145493)
agtttacacaggttctggttttttttctgtttttatttctttattgttgatacttttgtatgatcaaaagcctaatgagtgcattaaaaattgtaataataaaaaagagcctaacgagtattgatgatttgttgttccaaattatttgcttcaacctaattgtctttcattgactactttgctggtatatatttggtttttcatcaatccttgttgaggccagctggtggttcttcccttatccctattgggcttccttcacatattagatcagatttagaaatgttcttggcttgaagctggcttgacttcatttgctctggacattttgattttatcccatgggctgcaagagcacaagatgatcctgaaatcacttgacgtcctttaccatcaattcccatccaccttggagaactagctgaaattttgggtagtaagagttgtggtcacctgtggatttagtataggctgggggcgaatgactttcaactttatgttctttatataatatatatgaaaaaactgaaatgttctttatataatatatatgaaaaaactgaaacaatttcagtgccagtagttagcctagtggtaacactgtggtgtgtgtctgaattattagacagaaacacgtaaagaaggctaaagtctttgttttggaaaattttctattattctcgtaaaatgacgaactagggatttttatactaaacccaatagtcaactaatatatcaggaaaatatagaacattacagcagaaacacgtaaagaagactgaagtctttgttctggaaaattttctattattctcataaaatgacaaactaggggtttttatactaaacccaatagtcaataaaatatcaggaaattataaaacattacagcttctaagatatcaagggaatataaaaccaacagtcaactaattactaacaacacagtgagcatagggagcataatacatcacattcctccccttaagaagagcaaactcgtccttgagttttaggttgaaagacgtagctggtcgggagggaaatactcgaatatatccgccacattgaagataggattgatgtgtatgatcagggagatcaatcttgtatgcattatctccaaatctcttgattattggatacggtcctatcttctttggctgtattttgctgtattttccagccggtagtcttgcctttcgaaggtgtatcattactagatctccttccttgaattctttaaatctttgatgtttatcggcttgagttttgtatgcttggttcatcttttcaatttgggtggttacgtctttatggagctttgttattctttttgccatattttcagcttgggagctaagatcaacattagaaggtatgttagtaagatcatagttagtttaggtaacttagtatacacgatttcaaatggtgacttccctgttgttcggtttttcatatgattgtacgcaaattctgcttgggctaggacaaggtcccatatcttaggttaatcacctccaatgcattttatgagattggcaagcatcctatttgtaaccttggtttgcccatcggtttgggggtgactagtggtgctaaacttgagagttgtgttgaattttttccaaagtgtcttccaaaagtgacttaggaacttgatgtcacggtcggaaactatggacttggggattccatgcaaccgtaccacttctttaaacggcatccgatgttttcctacaaggcaagaactgagatattttgctaaattgatcaacaataacaaggacaaaatcataccccctttgtgtttttggaaggcctagaataaaatccatggacaagtcttcccaaatgccttcgggaataggtgaaggtgtatacagtttggtattctgctgctgtccttcgacagttttgcacgtaaaacagtgcttaccagtctttgtaatgtctcggcggagttgaggccaatgaaacctagcactcaataactggtaagttttgtctatgccaaaatgccctgcaagaccattgctatgaaactctttaatttaggcttcacgaagagatgttctagggatgcaaagaagattattcttaaagagaaaatcgttagttagatggaagtcattacaattgacatgatcaacacaaagagaccaaatttgaccaaaatcggggtcgtctttataaagagtgggcaaacaatcaaatgcaactacttgagatacaacttgccttacatgctccaaagttagatcatgcatgtttatcactcaatgaatgaataagataggtatctcaaattcattgacaggtcttgccttcttttattttttgtatttcaatatatttgggggttctaatgtgatttttatctacgtagtagacaccctgtccatttggctgctgcacggtgcttgtgcttatgcttatgccctccttcatcatgttgggtgcaactgttgttcaccacacaccgctactgttggtgattatagtcaattaactgatagtcactcaacccatatagtaccaaattttttaggctaaaagtcaaatttttagggtgttagacttgaccttgaggattgggttatgttaatttttttattgaatgaatgtagtaaaaaacgaaataaagaagagtgagcagaaaaaaggaagaataaaggaagaaacaaaaagaagtgaagaggacagaaaagagataggatatgctttccctctacattgtttatatctcttgcaagcaaacctattgtttaactagacaaggcaaggcgtgtttcaagggcagataatgacagaaatgttatcagagtaattgggaacattgttaaacttcgagggttagtcttttttcttcattttagcaatgaatgtcgtcttcttttagacaaagaaggaacattgtgtaagatccctagttatggaataaaggagtattagtagaaaattaatatggttattagttgggggcatattagtaaatagctaataagttagttaggtctttttggagggaaaggggtaaagaattttgtagtgggatttccttgcaagggaatttgggagagtctatccctctcaaaaggctaggggttactttgttacttgttcttatagtattctagcatatatttcatatattttcatatttgattgtttttaattgttcttgagttcatcttttgttcttgagataattcttgttaggggtcctaacacattgttaaggtatcaagtcttaagacaggcaattaatagttttcctgtattcatactgaaaatcagaaccaaatgagcttttacccttgggcaattaatactttaattgattctcacttaaaagggcttctaggtacctcaaatactagggggtcattttactactttatcttacctatctgtctatatataagaaggttgaaacatctttaaagccaaagcctcaactgttgttgtcaaatgcggtcaaagcaatccttgctgaaatttggttagaaaggaatcagactcttccaagataaaccacttgtatggagggatcgttttgaaatcgctaggattactgcttcttcttggtgctctaagcccaagttttatgcagatttttctattcaagatttatgcttaggttagaatgcctttgtcttcccagcttagtctttatgtgttgtcgatggcttttgtctttttgtttttactatggaatttccggcaatatcatccttacttgtcttgaatgcttctatgagtgaaagttgtccccacaaaccatcatggattctttcagcatgcgttgtcacatgcatcctaggaaaattcacaggaggtcacataacatagaattgctttaagctaagtacacttaactttagagttcttatgattgtgccaccaaaatggaagagacactttgttggtatagctgtatagatagtaatttccaattcttttaggcttttcttaaccatactttcatgtcctcaagatccctctcattcagacatgatatcagttcattcacatcctcctcctaatatcaatgtgttacatgaaaaagttcatggttacaaaagggttaagaacgaggagagaagatgaatgtatgtcttatagaaatttcgagcgaatgccatgtcatcgtgctagactaaaggattttagcccatccatgaaaaggaatactctcatcaccttatcatccaaaatatttcgtgtacattcatagctcatagtcatgaaatattgaagtgaatttataatggatttgtgaactttaaatattttttgaaatggaaacgagcctcttaattgataaaatgaaataagactaatgcttactatacaagagaagcatctatgaaaaaatgtggtaaggcaatgatttgacctcatggttcttctgtggcttatagtttctgattgaaacttgaaattgcatacgtcatttgctttaatgatctaaagatccaccttgacctttctacttctttgttataaatgctttattcaacaacattgaaataataaagaataaaagaaatctatatgcttcaggaattcaagcgtatcaaaggaaacattaattcaatgagggaacatgcagaacttttgagttctgttagggatgacatcaacgagtataaggttagcacgaccacccctgggttgatgttgttacattgaatatgtttacagatgtatattcaatgcattttaaaaaataacccttacccaatttgtttcatacagtcacctggaaccatgtctcccagggtgcaattactgagagaaagagctgctattcatggaagtattgctcatgtaagcctcaataaaatttattgttgatctagtctcctccttcaatttactctctttttgaagcagaatgttttatttaaagcaacacgtgagaatgtagaggtagactcgggagcattgatttgtgtgctagacgtgcaaaaatcactgatatgttgaaagataaatattaactgataaataaaattagttctctttttctggattagtgtactaaactaaaacccttctctcaaacactttcctccttgcatatatgagtgctttttgcacgtctagcaaaaaaaaccaatactgctgagtacctttaaccatggaatgtagaaagggggttttgatatgcagtttagcattatgattttatattaaatagccttttaactcatggatttcgatgttttgccgcagttcatttttttcctttcccttttaatgtctttctgtag

SEQ ID NO: 8062 - DNA, 1828 bp, Cucumis sativus
  Intron number 1 from transcript Cucsa.286260.2 (locus Cucs a.286260) derived from phytozome v7.0 (chr-ID scaffold0265 3; pos 2355413 to 2357240)
tcctctttcaaacctctctttatagaactttccaggtattcaactatataaactgttcccatgatttcgagcttaattaaatttactcactaaacaacaaagataccacaacacccacctcctttttccctttttctaacataccaagtggattttgtttatttatgttccatttagctaggtagactttgttctttatctgtgtaatggggccactaacccagttaccccttccgcttggtgcttttgattatgttacttgtcattttggggtgccagttttatactcttttttatattttatgattttgatgattctgtattttggttcttgttaggcaggatgttagttgtccatctttaatctgttctgttattgtgtttaattgtctatggactgcaactactttggcatttacatttaccccaaggactggaaaatatgggagaaaatcaaaatgggattctctaaacttaaaatttcatcctattgaatcttaaatttagacaaatattgtgatttcgctttgggaagaaattatacttcagtttaagggtaaaaatggtaaggcctatactgtgagaaaatgttcttaaagatggagttgagttttttatttttaactttgaatgaatttgaaagtaatactaattctgaatttttatttttttttgggaaagatatcaattaactgctttaaacagactttaaagtattttaaagatgagtttgggatgttttgaatgaaaggttctttatatgaaaacccatgaacaaacatcactaatttagtagctctcttaatagtatttgaggggtttttttagtagttttagaattcatgtagtctttatcatttaaccaaaaactattgaaactttaggagttaaaaatacattgtgtccttaaaaaaaaccataccaaaactcacctacccatctttagaattttttaaagcatatttcaaacaaacaaaagaatataaacaatatatttaattaactataacagttttggactcttaagaaagtaaggggtaagtctattcaagtaattggtttgttttaccacgtctttaattgaatcagaatacttcggtcatcagttttagctctatgttagaaagcattctaaaatttttaggaacctaaaagctaaaactacattaaatacttggtatctttttcaaaaagtgaagtaatataatttatgtatatatatgtaagtatatgtccaaaatttgtattcaaaagatgccatgtcaacaaaacagcatcatttgcaattttaatttttaagccaacaaatgcataattgttattataattttgtaagattaatttatttgtatttcagaagattcactcttgaaagcattatccattttctgttccgtaggaagctttcataatttggctgatacctaattttatacacaaagtacaaaccgacatgcaatgaataattacaactttcactaactataatacgattacttgcttaagatggagtttactttatgtttattctttttgagctggctactgggttgaatgccattaggtaatttatttttggacaatgggttgctttttaaaaaatgtgacaggcctttgaattctctatatattttaaaggcttcactaccctgcttccaatagaaacttagcttaaactctctagtgttaaattgaagtaatagtgctttagaagatgaaacaaagaaggaagaagttaactctttcactgtttctgtttttggtggtctctttgctggtgtcttcatctgtagttagagtggaagctagaaagcaatatcacaacaag

SEQ ID NO: 8063 - DNA, 1483 bp, Cucumis sativus
  Intron number 1 from transcript Cucsa.258660.1 (locus Cucs a.258660) derived from phytozome v7.0 (chr-ID scaffold0222 9; pos 5503248 to 5504730 reverse strand)
caggagcacgataagtttcttgaagctcttcaattgtgagtattcagtgaggccttttcctttctctgattggtgaattcagagttgtgtagattttttttttttggaatcactgttttttagtagaaagtttctggagaggccgagagaagtttggaggagaattcactttttaggttagttcgtattttctttgttgctttacagttttggtgttcattgacgtgagaatatttgaatgcttggattccgtgcattgaccagtgaattcgaaatgaattgtgtgtgtgtgtgtgagtgtgtgtatctgtatccctgtttctttggtagaggaatattctggaaatgttgagcgaagttcgtaacatcgcttttcatttgagcactgttttgttgttcaatgactttgagtatttgattacctagaattctgtgcattgatcagtaaactctgctttttaatttccgacaaggaaacagaggatctttgccgtctcctgaatgcttttaaattggtcaaattggaccggaggttctgcagttcgaatccctgctatataattagccttgattgggctatccttcttagtctatgttaatctatgtttttaaacggaggtctttgagtctttctttaactgatgcagacattattgagggagattcgcattctctccacatattaatgtattacactactgtagtttcgaggcgagatttcactcacaagtatttagaggccgttctgacctcgtttacctcaacctccggcctccctgccggaggtatggacaaattaaaattaacagtgaccagaaagcaaaggactgtgtgatcttttacacttttgaaccaaattgagtgaatatcttttttcatgaaatcagttatttttaagcttctaatggacccatttctttggtcttcccactacccggtcctgtgaatcttttatcatccctctggcgtcgaaactttcttggtttcatctcttcttaaaagtttgtgaaaattatttcctcctttctcttctagaagtagaaagggcactatccataaagcactgtttggaatttgtcgtaggtttctatcactaagacctcaataatcacatcacaagttttcagtcctttggacgaagtaaggaccaaaggagtttgattctctgcatttaattgaaacctccaaatttattgtcgttgttaagaaattttttagtggataacatgggaaagtccatcgtaacagagtggaaaaaaatctttttgcctgagaaaagtcagtccggtttaattgtgagaaatccattacagtgactgcaaattagaatctggagttaatatcatcaatttatagtagtttatttctttaagatcctggtttggctgtttcttcttacgtaattatttctgagttttatttacatatctatgatccgttccttacagatttgatcgtgactggaagaagattgaagcatttg

SEQ ID NO: 8064 - DNA, 4612 bp, Cucumis sativus
  Intron number 7 from transcript Cucsa.357480.1 (locus Cucs a.357480) derived from phytozome v7.0 (chr-ID scaffold0357 8; pos 571272 to 575883)
gaactgtgagttcttattcatttaccttttaccatgtttaaacatatcgatacttttaggatcctgttgtaggaggttcttttgattcttcctttagagagaaataacgatacagtttttagagggatcgacatattgggtgatgaaatttgggggtggctagggaagttctctctctctccctttctctccttctcctccttcccttcaacttcattgccgattagcctctctggtagacactgctagacgttgccgagtactttgacatctacctagcaaccattcttaactcacaaagatggaagtaaaaagctgcaaaatcgacaatttttttttctgcatctggcatgaagatgaagcttttcacattgaagatgttgaagctgaaattactatgactttatcaatctttcaggttagatggttaattgaaatggtgaaagatttgaataagaaatctgaagaagagtctttctataagaaagaaaaagttgagtgtggaagggttgaaagttccaaattcagaaccaaaagtgggtggattctgagatgcactgcatggcgtagtacaggagggagatcttttattcatatccccattggtgaagataaacaggggtggaaaatctttggaaaaatgttggaagacttcaaggacatccatgaatacaaaatctggttctcctcccaaaccaagctcaacaccattgttgaagcagccaattaaaagtatgaatggaagctatacggagaaagcagaatcgaatgagacatccaagatctccttctccgatactgcatcacatagctcaagcaaatattgggtgattaagaatttgatagtcttcaaagcagattttgataatctttgggttgtttcaaaacttttcgaatttgatggttcggtaaaaattaatgaagcatcagaactctttttcgattcaaagttatcatcaaccctttatttgcagacaatgctctaattgaattggaacgtggtttgaaggagttcattgaaagtccaggcgaatgacaatattttggtgcctttcattttaagtttgaaaagtggaacagtctcatccatgtaagaccaatatattcgaaaggctgtggatggtggattacaataaaaatttacctcttgattattggtgtaataaaacttttgaagtgattggagctcattttggaggattagaaaatattgcagttgaaactatcaacttcattaatgtctcagaagccaatattcaagtgaaggagaatgtgtggtttcaattcgacaaccattgagatttttgatgaaagaagaggaaacatttttttgaattttggggatatttctatttttaatccacccagcaaagtacaaggtaatttatttactcatgatttttcaaatccattagatattgtcagaataaatcaagttatgaaggatgaaggttttgaggaagtttcatttagctccaagtttgaatttcttcttcctgtgaactccatcccaagcacgcaaaggaacccttataagttgtctgaaaggctgttcaatcatcttcatcagaggtcgatatcaactcaccaaaatgcaaagcagcgtcagattctgggaagtctcctcttcaagctccggctattggcagttccgttagtaatcagatggtagaaaacaaacggaagtcagagaatttcaaaagacgttcaaaattagaatcaccaatcaggagagacttagttttcgtgccaaaggagacatcttttaattgtattccgtttgaaaagtcacttgaaggaatccagcagtgacatatttgcagcattaaagataataataatgttgtttctaggaacaagagtgtcaacaagtcattaatcaccacaaaggccaatgatattaatgcattgaaacagccagaaaactaagagatgctattaaagaagagagaaaaaggttagaagacagctgtgatattaatttagtgggtcccaggtagcctccaacatctcctatttttgaaaatattgcatgtgaaaagataaaaaaggagaacaaaggtcaccaaactctaaaaataataaaaaaagaaaaatagctgtatctttcctattgataataacatcaccaagtcagagtctctatatccaatctccaacggtctctttcctcttgattcatcaaaagttgacacctttgcttcttctccaattactgtatcaagcaagttagtcatcaaagaaaaatgatctactcccttgtctgctcgtgttaataaaactaaaaagaactctcgtccctcaaagtttttcttgaagcattttataaggaaaaagacttccttcaacaatgtttggacgactcttctcaattccgagtcttttgcagtttgttcatccaaggctcaagagaagcattcctaggttcatcaatctcatcaatctcatcaatctttcaagtcttcgttcaatgaagtaaatccagatcttttggaagtttccagctctctaatccaagctactggttgtattaccaggcgaggacattgaactctcatcaagagtgcgagcgaattccaagcaaggtccaatatgggattgctaatccagaagaagctggcagtcttgatgctcaagaagctcttgaatcagattttgaatgagttccaagtgtaagtagtgaggaattagaagtgtttaatgcagaggaagaggattagcagccttgagattttggtgaacataatcagcgttgtccatggtttgtttgtggaggaaggtttagaaaaagaacaaccctctctccagaaatttagtgaagaaatccaaaagcacttgcatgaaatcattgaagcttgtggcaaatgtttcatttgagttcgttaaactttttctccagcattgtaattagtcttggatgtgatagtgcattgaaagtccttttggaattaaaggaagctaggagttttataaaaaaaaaatggtagttaggaagcaattaaagaagttcaccctggttttggttttgctacaagtatcaagaagtaaagttttattcttggatgtgatagtgtattgctcttttgttgcttatcaaccattttaaaaagatttctggatcacatttgaatatggtctatatgatcatcaagaaacggtgtatttgactgaaacttatttctttatcaaagttcattgtggagccttggtcttttggaggtaattaagtttggcaagacgatttctagccgtcattatggcttgcaaaagaagatgtttagctgtttgttagaaagtagcttcctggatcttttgtctcaagtaagtttgaaggttaaagaagtgagtgaatttcaaatttctttggggctttggtaacactggaaagaaagggttataattgatcaaggatagtggccgttgactcaagttggaaattttttgagttatttccttcctctgaataaaagttgtggatctatgattagaatttggtttttggtcactgtttatcctcttcagttgctctgccgctggtgactccttacaactcctgtttgctttttctcaactgttttgtattattgttataattatgcttgggaagattctagagatattttcagtgcaagcttcttagcataagtccccagtggagtcaccacttttcagcctccttgtggtgttctttctccaatgatctcgagtttgtctcagtgtgagtttttggtcaccttttatttaggatgtttagtcggttttagtcttgtatttgtatttctttgtacttcttttgtgtttgttttgcctttgggcattactcctttgttatgggttttagcttggttggatatgatgagggtgctatgggggtgtgaacctagttgagatgccgaggtgcacctctgatctatggttacatgctcattgtataattctcttgtctatgagcttttgtaatatggtctcctttaaaaaaaaaaaataaataaaaatttggggggtggctaggttcaatgccttattgtgggcaggaaggctactagattttttttctaaccatgagcttgatttgttctttgagattggagtcattttctgtagttaggatcgtactcttttttgttggggcctattttttgtgtgcccttttatattccttcttttatctatttgaaatctcgatatcttacgcaagaaaaggaacgaaaaacatttaggatccttggatgtgatgagggtgttaagagggtgtcaacctagttgctttttgtctaactttcatgtacctgctgatcctcctttctccctattgctctttgtataactttcatgtatcgctttgtctctttatttatattaataatagtgagactcgtatccttttcaataaaagaaaaacatctaggatcctaattcaaccattatttggtaactcgagtatagtttattggtaaaggcacccatgtctttctaaagtcggatgttaaatccccattctataattgtgaacttaaaaaagactaataattttttcttttgcatgttcccatttattgctttgtttgacatgcttttttgttgtcatttgcttttcttttttcaggttgat

SEQ ID NO: 8065 - DNA, 3247 bp, Cucumis sativus
  Intron number 1 from transcript Cucsa.095530.4 (locus Cucs a.095530) derived from phytozome v7.0 (chr-ID scaffold0091 9; pos 1388557 to 1391803)
agcaggtcacactggaagaagggcttaagaagtgagttttttcccctttttgtttttgatgtatggtttttagcttcttgcgtttatggaagttgcttgaattaagcgatttggttgattttttttcttcttccatggaggaaattgattttgtacttcttgttcaagctcttttccctttaatttccagcaattttcatttttaaatggttagattacgagattggttcctcggagttgtgttttacaaggccctgaatgtgtctagtaagtccacaaggcttttggggtttgtacttgacgaacaatttttacactttttctctccgtctcttaaaattcctcttttgaacattccctaagcataccggctatatttatggaccgagctggtttttatccagctgtgaaaatatatgagattatttgtagctaacgatttatgtgtgtatgtggaatttgaccttttgaagtctcaggtcagaactaatagcatctcgctgttcttttccattatttgcctgttatctgaatttcaccacatcggcatctgataatagtcatgtctgttgcttttttttaatcaatgttttcttagttgattttatttcttcaatttctcttggctcagttttcaaccgcacaaagatgttcaagtttctattgagggatggcctttgtttttaatgtgaaggccaaagttgtgtgatttaaaactaagttttacgttacaggaaagaaaggaatccatatgcttaggaaaaagcttggatgctatcataaagagttttatttgacttatgattgtaaactggattcagccttatagggatatctaaggtgtttttgaaagctaaaaggtgcaaccgcttcagatttgatatgtgcagaaacaataccatttactgttttctcttaaatgagccataatgtgattggtttggaagttaaaaaatatctatgccaatgtttcaaagtcattttttttttaatctttaattttacgaaaacatgcctcttcattaaaaatgaaatgagactaatgctcaaagtacaaaagaattatataaaggacataaaaaactaaggattagaggcacacttagacatctcaaatgacaccccctagtgtccacatcatttctgaacaaacgaacaaagactaaataacatctcaagctaaggaagaactacaacaaaatgatacatcataagaccaaaataaaacaagcagtacaaaacccttgactatgtgaggacaaatgcaaaagagactcaaagcaaaataacttgatgagctctgattcgtaggtgctacactccttttttgtgtcctttacccaagtgtttatgacgtagattgttctaaagaaagatcagtgacggtggtgtaggatcctagctgcttaaatcgaaaacttgagaagaaacttaaagtatcggaaatttgatgaatggatgcttttcattgaaatattggtacaagtctactgatcctcttgaatttacgttaatttggaacttggaaaagatatctctacactagttaaagttgcaagtcggtcctttatcataaacaatagtggaaggttggagaaggagctagaaaatcagatttggagattagttcacaaaaagaaaccaaccagtaggtaaaactaactaactgtcaaataactaatgactaacaattaatttcaactcctacatccaaaagtgaaggttcttttattgtctccctccctcatagaaaaatataaacatacaagacaagatactaggaagaaatccccatttttctcttctcctgcaaatgtgtatgaacctgcttgcataaggaatttacccgagcctcttgttggaaatgacttcctacttgagaactctgtttatatctagatctagggttggcaaggaaatgttaggtaaactatgtgggaaattagtccagacaattattcttgcaccttaaaccactatgagttgacctaatggtcaatcctataactattttatagatgttattttcatagttggagtctcttttcacaaagggccccccctttttgtgggattatttttctttgcatgcccttgtattttttcatattttctatcgattccatttagaaaagagccataaatataataaaggagttagatggaatgagttcaaggcatgatggccctccacttaggatttaatatcttgaaatgtagcatggttaggtggttgtctcatgataataggcatggtttgtgcaagtttcctcaactcgcacaaatataaagagaaagatcttgcctttgtagatctagtgtggccaaaacaagcacaagaagattctaacttaacgttctaccatttaattggtaaaatgagttctacttgaatttcgtatatctctcttgtacaatgagcttttgtctcattatatctttattaataaagagacacatatccttttcaaaaaaaaaaaggttctacttgaatattttgtgctcttggctcctggaattatgagaccatgcttcctatgaatcctcgtatgactttgaggatccctaagatgtttttcatttgttaaaagccattctcaaagttgctgtccaaaaggattctgttgatgtgtatctggagagtgtgtcgtgaagataagtccacctcatttctcgactctgcaaccttgcatgaattatggctttgatcaaatcctccgcaattgagagaccttggtgctttagttattttgggagagggaattcctgcctctctaggctgtttttttttgtgattaacatttattcctgtttcttgttagaaaaaaagaaaaaggaaaaatgaagaacagttaaagtttctaataatttaatgaacttctaagttctaactgctaggaaattgtttcagacaccagactgtgaagatgaagctgcctcttggctaaaactctatcttggaggcttcttttcttttatttttccatcttcctttcttcctctcttcattttctaatgtttcttaaaggggacaaaaggtcatacttgaacagttttttttttaagataggtcatacttgaacagttgaactgctgccttctgtgcattgttttattatcattactttcctattgtccttttaacctaactaaccttcttatcatatttttggtggtccagttttttagtgaatgatgttagtttggtttatacacagatatgccgcagagtctagtgttattcggt

SEQ ID NO: 8066 - DNA, 4767 bp, Cucumis sativus
  Intron number 4 from transcript Cucsa.219010.1 (locus Cucs a.219010) derived from phytozome v7.0 (chr-ID scaffold0165 8; pos 871040 to 875806)
attgaaaagcgtgagacacgttggcgtgtgcagtcagttatagaaaacacagtaggtagattatttaatggtttattaattctttctgtctgaataaatagtagtctttctttgcttgataaaataaggccactatgagcttgccttcatgttcttgaaaagcgtgagacatgtaggaatgtaaaatgattagttataaaaaatatatttggtagatgattaaatttttgttttgcacaatataaacacttattataatgtgaataaattacagaaattatgaagtcataagacgataaatgatgaagcacatattatgtgcgaattactttgtaattttgttttcttttcttgagttagtttagttgattatttagcttaagttatctataaatggctgtttcatgtatccctttgggctttgattttgaagaccttttgtaattattcaattggtaacattttacttagttagacccccttcttttagttgtggggtgttttggtgggctggttatttttttgtatgcccttatattctttcattttttttctcaatgaaggttgttatttctctaaagaaatggaggtttaatcccttgtatttgattctttttgattaataataaacaccttcatgctttattatgtggtgggggagggtaatgaaacgtatttttggaaaaataagtgggtgggggatagacccctatgctcttcacctctacacctccttgtctctaacatatatatttctttaaggaccacttgtataaatgacatttaagcaaacaataatagaacacatagcacaaggataaaataattgtatatatagcacaaaaacaagtaaaagactaaaaaactcacctgcaaccaccattatgggcacttcttcctgaatttctcaaattaaaaactataattgataacaactatcactaatagttgctatcagtgataactttcaatttgagaaatgattgtttcccacacttcttcctgattttctcacattgtaaggtgtagatgattaggcccactagttatctcagaggtataggaggaagatgggtacgcaataaattagtgttggttgcttgggcgagggaggcttttatattcgactaagtgtctggattcaagggagaaggcctagtggggtgtggattttgtttggcaggggaatggtttgtaaaacccatatgaggagggccacgtgtggacttggggatagaggaggaaggcatagtgctgttttgcttggggagaggcaaattggtctattgttcgttgggtaaatgggggagggagctttttggtagatgacgttggagctacgtcaaattaaaaactatcttcaacgagcacatagcctcagaaagggtagtaacacatgtttggattggcatgtgggttattttgatatgttttcatggatggcggtgatgtctccgacggggtaatccaaataaaaaagagtatatcaatctcttttgggtggaaaagagattggatctttgttggaaggtaaccataatcattttctataattttcaagcagacttccatcatatccatgcaagagagggttttttttcggcaaagtcaccgagatcaccgtatgcttgagcttgatcaatgtattcaaaggttgctctataaatctatggcaagttcctcatcttgatcgagcctccaaaagataagactttctatttcgcaaaaaggtttttacaattccatctagcaaatctggtttctaggaagcacaaacacatcatttttgacgaagtgtcagtgtggaacacatgtcgaacatggatacgtcctgacacattctgattgacatgcaaaaggtttgttgccttttatttattattttttttttcaattttggacacatgacgacaccacgtcacaacaccagacacaaacacataaaaaacccaaaccttttaaaccaataggcaacgaagagagggtggttggagtcaacatgtttgagattagtcacaaagggaaagccttattacatccaatccatggttcgtaatcgtggctatgcctgaatgtgcgtgggagaagggggaagagtataatcaagggagaaggcggctgcgtgggaggagaggagggtagtgcaagatggaaatattagggttcgggtttttaattttaaatgttgggcccccttttttataacttaaatgggttttctatcctaagatgtgggtttcattttcatgaataagggtttttttccctctcattttaaatgcccttctacttttctttattaatcttttaaaaaagtgttatttttaataattaataaaaggaaaattattatgaatggtaaaaaaatgaaactatttacaaaatatagcaaaaaatttaaatgaactaaggcgaccttcatgaattttgttatattttgtaaatagtttcaatgttttgctatttttgaatattccccttaataaaaattgtataaattattttattattttaaataaaatagcctatcctcaatgaggacgctaaggagacaacctagttgagatgtcagggtgtgtctcctgatcccttggtttctttatttgtacccctagtttatatctcttgtactcttgagcattcatcaataaagaggcagtttccttttcaaaataaaaaaaaaagcctgtccccaatgtgtcgtgtcctgcatttttagagattggggtatcgtgttgttttgtatcgtgtcacatgtcccgtgtccatggttccttgtctggtttgaatagacctccagctcggttatgtgaaaatggttgttgcatcgtcgttgctttctcaaataaggatggccctaccagcttgtagcaggccgatggaaaaaaagtcactaatgctatgtctcagggtgtctagtatgtcgaacccattctcattgcatgagcgtctaaatagcaaaaccactgctgtcattttcaatgaagcgaggtcatatgtttgaggttgaggtaagtgacttgtagatggttggttgattgttgaagggccattactactgctttgtggaatggacttaggtgaaggtgggttattgggtaatgagatggttaagggatgtgctttggtaacattattggttgttttcttaagctcatgacgatggaccttcgagacaaggtcaatgaatatcctccaaccttttctgttttctccacctgggataatcagtttgtaacaacctccattactttccaacttggcaatttcggcacaaatgccccctctagtttgagagttttcctacccagtagacatatccatccacacgtccttccatgaatttttttgattgaatggtgactggtgagccaataagttgtcgagcaggcaatgttagccactgaagcgtgcgaggcaggaggttgatggacaaggaaaggtcttttttctgttcagtaatgcgaaaggctcaaccattggcgtgtcgatcagggcaaaggtaaaggtattttggtcactggtgaaggaagatttcttttcggccagctgattgaggaagcagggtgtgggaggggtttggtgagatggtgggggatagtgtgtctagagaaaagcatgtctagagagagtttcatgctccactttgatgtcattagcttataaaaactaaatatgaatgatcctattaacttctcttgagtctaccatgagatgaattagaacaagcaatcatcgcaaatttttttttttagttttaactttttaattttgttaaatggtcactcttccatctatttattctccttcagggctgttgatttctcctctaaattccttctgttttatttctttgtgcctttcctctaacaaggcttatggcttgggagagaggcgtggatttcagcactttgatgcttctctaggtggctactaattttgtttggagacctgcaaaattggacacctaaagtttcatatgtaaaaatatgtgattttctttctcaaaattgtatgatcctttttttttttataagaaacaaacatttcattgataaaatgaaataataggaaaccccaagcacctaaaggtgattacaacacattattgagcaaaaggacaatgaataaaaaagatgagttggggattcatcattagtacaacacataatgaataaaatgagatcccaaaagccttaaaattgttgagcctttcgttggtttactgcttttggttggtacaaagcagtagaccaaccaaaagcgtccaaaatgaaatcccaaaattgttgagcaaaagaacaatgaataaaaaagatgagtcggggattcaacattagtacaacacataatgaataaaatttccatgatcctttgatattcatgtgtgccatttcttttctggtttttcattgttggtttggtgattgtcgagatggttatttttttttttgaacaagagacatctttttgcagatgtgaattctggtttgcaagaactatcttgttacctttgttttttattgggaaaagttattctgttatgaggatatattatgttgtttagcagatctgatggtgttttatgtgcttgtatcatgcatgcccatgggtttttgaataccagttcatagaattaactggcttgcaagttgcgtctttgtgtgagtgtgcatctggctttgccaaatgcatatcttttcacttgtactctatttgatcaaataaactgcatatgttttgctttcatctgataggtactatcga

SEQ ID NO: 8067 - DNA, 1543 bp, Cucumis sativus
  Intron number 27 from transcript Cucsa.083890.1 (locus Cuc sa.083890) derived from phytozome v7.0 (chr-ID scaffold008 58; pos 569027 to 570569 reverse strand)
cagcttacctgcattggctgcaaggctctactagggtaattttaacagctttgctatccttcatggtttttgctagtttaaaaggcatattttctttttcttctaacattcgttgtagcaagttcaatatcttggtaaagtgaattatgtgtacgtatggtatttgtagaccataatcgctcagtgtatggtgtgaattttccccagaacaggggagtaatttgtatgtacaatcaaaagaataggagttaggacttatcttcgaaggttctccttgtcctttccttccaaagctcccagaaggttctccacaaagcactaggttttccgctaaggctccccccaatccttaggcacttaacaaattaatacttataacagccaatcctcaaaaccgaatgacatacatgaatgaagaccaaaagccataacatttgattccaacctcactaagcagacttaggaagagatgctccagattctcttctcttaagcacaaaagcgccaggggtgattccaattttacattttcctttgcagtctgtcactgagtattcaaacttttgtgagcaagactccaaagaaaaacttttatcttcctggggatgttaaatttccaaattaggttgatcaatggagcttgaagctttggtctagttttagtaatcttcaaaaagagtcaaatgactggattcttcctattttagtttgatgcactaaagtttttggtaccctcgaatcatagacctaagtttggtttaggcatttgatctgccaagtatattttatttcttacttttaagccttaccagaagacttcatgagaatgtccgagctgacttatacctcctattagtgatggtagagggttacgctgtttatctatcaaaacttctacatctgatatgggaaaataagaaactttctcagggtcagttaaatgcccaaaattcttcgtataggcttgcacaaaaatgaaaaagagaagagactaattctcaaaatacaaggagaggacaaaagccaaaagaaatagaaacaaaacaacaaaatggacgagagcacaaaaagatcaaacaccaaacttcaaaaagctactaaaaacaagagcaaaagaaaagccagcacaaatcagaaatatgaaatcatagtagtcttagcatcggtaaaccaatagaagtttctaagtggtaagtttgtggggaacaggattttccacaattttagaaaattccgaaaattaaccacaagagagcacgtgaattggctaataactaaaagttggagcaataaagctggagttgagagtgattttgtttccattttgcgctactgttttgtttcacaataacgaaacaaaattttccagagtagcactggtttgttgccttgttttaccttggaacacaatttatgtttggtgaatattacctgaaatgttaatatttgatagtcagcctggcaatgttttttcaataaattccgtactattgttgactgtactccagcaagtcagacaaaactctctgctcacactgcaaag

SEQ ID NO: 8068 - DNA, 4509 bp, Cucumis sativus
  Intron number 4 from transcript Cucsa.032810.1 (locus Cucs a.032810) derived from phytozome v7.0 (chr-ID scaffold0042 9; pos 2045895 to 2050403)
acattgggcttgttgatcttcctataagatcttgtgtaagttattttaggtggcccccttgtgtacaccaaaatcttggagagtacttgaattcaactatggttgatgatctatctaaatacaaactgaagcatcctttaaatacgatctctgaaccacaagctgaaaaacaatcagctttaactactaaaacagccaactaaaacaaactatcaaagcttctaaaagccagcaaatacaaaaaactgatacatgtgaaaatcccaaaaagtccgtacatcatcccattattgaaaatgtttacctagaaattgtgtgcaagaaccttttaaatcaaacaaaagaaatcgtcaaaatgtactatcacaaaaatatggtagttggcttttgagaaaagtttgtttcttgtttcaaaaattttgcatcatgttatacatattgtcggggtaccacattgaaataatcaagatctttacaagatataaagtagtttccaattgattttaagatggaaccgggcgtcctgttcttagctttcttcacattctttatcaaatctttaatgatcttttcttcttaatttattatcttcagtagttcttagttaggctttcattttgtctcccgttagatttcacaaccttggttgaattcttgatctttatttttctctttttgatagaaacaacttttgttgagaaagaatgacaaaatacaagggcatatgatgagggcgctaagggggtgtcaacctagttgaaatggtcgagtgcaccccttaatcattttttatctcttgttgttttgctctttttgtaaaccttttgtgctttattgttatcaataaagaggatggtttcctttttaaaataaaaagaatacaaagatatacaaaaaaagcccaacccaatgaagcaccccacctataaaaaggggttccaacaaattaaaatgttttctaaggaatagttacaaaaggcttcaaaatcaaagcccaaatggacacatgaaatctaatcaaatcacaaacctcactatggtccttctctctctactactaaacacccgatcgttcctttctccccaaacatcccaaatcatagcgcacaccccaacaagccacaaaatacaccatttttctctgaagggtggatggtggaggaactcctcgatcatagcacgagcacttctttgaccaacaaaattaaagtcgaaatcctgcagaaaagagttccacatagcatgcacatgctggcaattccaaaagagattatcaagatcttcctctaccttccgacaaagaaaacagcgaaaaggtctaataagaaaagtcttactctctaacaagcctatcaacagtgttaacccaaccaagtaagacttgccaaataaagaacctagctttcttaggaaccttaatcctacagaccacatcaaaaacaaatctcctgaagggggagggatccaggaataaactaaacaaagtttgacacataaaaccctaaaaggacttcagacttgaatcccttctcccctccttaaaactgcacccctcaagcaagaaataagagaggtgttctgaaaaacggctaatgggatggtggggtttgcactagagatgataaagtgattgaggagaatataattagatcctcgctggcctttatagtctgaagccctttgtggaaggtgttgattggagtcctatatcggctatgctagaggtgagcatcaacacccaaaaaactaatccgaatgatcaaaaccaaatgaatcgacactcgatggtcggttttatgcaaaatacggtcggtggttggtttaaggaataggtttcaaaaaccgaccaaaattttacccaaggtggatcgaacccgaccgaaattaaatatattctagctggcccaagttattacaaatgcataattcataagcccaaaagcccaatccactgcccacattacttttgtttttttattttattttcccgatgaatgaattaaaaaaattaaaaattacaaacttccaatagcccacactgcacgccctttggccttcttccttcacatcttcatcaacaagcaacctaatcgttgtcgccggccgccgctcccctccgtccactatcgtccgttaacttccttttgttcgcttcccttcggcaagaaaactgaaccgaccaaaaccgaccagtggttcagtcaatcggtttagtccttggtcaattggcagtcggtttaacccattctaagctggggaggatgaggagttggtggtttcgttcaccttggataagttaaaaatagctatctttagttgtgataggaacaaattcccaggtgccgttggcttttttatggccttctttcaagataactggaatcttatcaaagatgatttggaataggtgtttaaagagtttttttagagtggtattttgaacaagtcgttgttggagacttttgtgtgtttgattcccaagaaccaataaggtcaaggagtttcgtcctattaatctcattaccgatgtctaaaagattttggccaaggtttttctaatactctaaggaaagtgatggctactaccatttctaaggccgatggtgcttttttggctgggaggcagatcctggatcatgcccttatggttaatgaagtcattgaggagaatgaggaaggagggagtggttttgaaactagactttgagaagggagtgtggattgggatttttttggatagagtgataacgaaaaaatactttggatataactggaggatgtggatatggggtgttttagggatgtgaagtattctattcttatcaatggtgccccaaaagggtcgatccaagtttcttggggtttgagacagttggaccctttatctctcttccttttcttactcggtgtggatataataagtcggctcattttcaaaggggtggaaggaaatatcgtcgacccttttaggattggcgagaatgcagtggccttattgcacctctaatatgcagatgatactatgttatttttttgggtagagaagagtctttcttgatccttagccacattgtggccttctttgaagatatgtctagacttaaaatcaatggaaacaaatgcactatttttggaattaatagtgatcaagacaagcttaaaaggtgggtagagatgtttgactgcgagattggctcttttccctcctctcaccttgggcttttcgggggttggaaacgtgagagctttgactttttggaatcctatttgggaaaaaatttgcaagagactaacggtgtggaagaaatatttttttctcaaaagctcatagactaactctaattaggtctctgttcctcgtgtattatctttcttttttaaaggcccctagctcggttttcaagaatattaaaaagtatatgagagatttcttggggaagggtggacgaaggttatggtactcgtttagttagttgggaggcggtggggcattctatgagtcagaggggtttagaggtcggcaatctaagaatctgcaacagagctttttggccaagtggctttgacactttccctttgaacccaaatctttacggcatcaaataattgtgagtaagcatggcacccttggaaagatatttcttttgagcccacatcgttctctcagtttactcgttgtattgtggggatggtaggaacacatatttttgggaggattagtgggtcgaggagaggtctctttgttctttgtgtccaaatctttttcacttatcctcttttgaaaccatgtgatttcggattttctggctcacttcaagaattttgtgttctttgcatttgggttccttcgcaatttgtccaaaaggaaaacggtagaggttgatcttcttttaatccaacaagctctttctccttgttttcttgaattatttcttttttgaactattgccattgttaaccacgttatagccctcatttgaactacaagcccacattattgagctcaacaattcttgccattgttctgaaagttattcatcttttgagtcatttcccaacaagcgttggatttttgtacttcgttgtcttcacacttcaaagcagatagttcgtttcattgaaagttcgtcttagttggctgataaaacactaacgaacattagggcatgaacaggaaacgaagtacagatagttcaaagcagattgttctttgaacagaaaatgtaggccatgaacagaaaaacacttcattagtgactctctttttgggtgctaaaacactaatgaagtgtttcattgaaagaacaaaaaatgtaggctattgcttcctttttttttatttatttatttatttattgtggttagatgctacagcctattgaaaactgcaacagttagattttcaagttctgaaatgtcattctttaatagtttgagtttctgttcgcaagataaaatattcttcttgtcttagtttggtagaacaacgaaggaggaccttgacagctg

SEQ ID NO: 8069 - DNA, 2408 bp, Cucumis sativus
  Intron number 1 from transcript Cucsa.074780.1 (locus Cucs a.074780) derived from phytozome v7.0 (chr-ID scaffold0078 5; pos 651029 to 653436 reverse strand)
gattttgcatttattttcatctccctttgtttctggtattatcccaatctccagctccgtctttcttctcgcttgaaaagcattaattaggattttctcaatgaaaaaaaaagtaaaaaatggagtggttgtttgattttgttttcatagcctaataacaacgctatgtggcaaattggaacgtgggtcgtgtcttgctgttccgattcttttgtgggcgtgtctcaattttcatttgttgtaatgtttataagaggggggattgattattgtgtttatgctgattttatatgctttaactactgaaccccatttgtgattgctacctagaatttgtttgataaaatgcttcgtgaatttgacgacttcggaagagagaatttatgctgaaattgttggagaatttatgattctgtgaaactgtttgataaaactcgtcggagctactccaattaggttctctcgtaatcagtcaaattgccccaattttcgtgggctctgtttatgattgtgttcctgattgaaaaatcaagttagtctacgtggtcttttattctttgaaattttttcattagctatcaagcaagggactctaaacccttggattgtttttgcaaatctatcatatgggttaatcaattctctaacatgggttattaacgtattagtacttcgtctcatgatatttttcgtccacatcatcctacccagttcagttgtgtctggtgttttgttggtgaacggttttgaagaattgagttcttagaatcaagtcctgtgcaatagcaagcttatgccttaaagttttggaagcacccttaagctttattcgtagttttatttgcttttgatggttctctaattgaactatgatgtagtttccatttattgaactttgaaaatttgatattgaattgcaaaatgataaattgttgaaacgatacggagtttgctttcctgcaacaacttcagcataaattctctcttctgaagtcattttttaaattgagtgttttagagtttatttattattatttttttggctctggctttttcttttctgtttgttcatttgtcctcttgaagttgtttgctgtcaaagttttatttattattcatatatatcatttttaatgataaacgggtgaagattgttgttgtgacacttctgacacttcacattgcatcatttttttcattagctatcaagcaagtgatgacagaaacattaagttttgttaaagatagtgaaacttcttgccatggaagggagatggaagaggagtgggaaattattgcaatttcttatgttttgttgtctttgttatatgatttgtgtttcaagataatatctagtttaagtatttgcaattatacaaacatttctagattgaatgtgatatatgttttgaattttgttttatttttgtcatgcatatttattattatttttatttagttatataaattttcaaatataaaatatcctatttagtaagttagtagttcaaaatcacttttggaattaaacattacaattcgaaatcacttctaaatgtttgaaaatcacttaaaaaaatgtggaaccaaacgtagtttaattgctaaaaaatatcaatgttacaaaatcaattgtatctaaatttcttttcctaaaatcataactccaacaatcaccctcaaacatactttaaatcaccggacaaaagtgaccttaaaaatttcaaaatttctcaaatatgcacataaaggaacctaaagattctcccttttggctaattttatccgtagtatagatatagaatttctttgaattgctttgattagacgctgtctaaagctctattcttccttttttcttcaactatgggtttctagggaatcgtctgcctgtaggttcaaaaagtaagcttccaatttttctctgcttcttgttcaccctactggttttctccgtttcgctgccagaatttttgcctgtaagaaaaattttccgttttagcaaacaagattgttactttgttttcaggttcttacttttggctctatggaattttatctttccagtatatcggttgtttgatgagaaatcaaataggaagatcagatgatttatttgtggtatagttgagttggggtgttttggatgtgtttcattgaaggtccttgtcttctgttttcttatttgatgactctcttcaagttcaagtaaaatatgaaatttgtaaatctaagcatatctcaactggtttcaattagtttatgtacatagagaggcaccacccccactagtttatgattcagtagcccattaagtaagatttaccatgatataatttgatgttcttcatgatcatatttttctgcttgcagttttcaggatttccttccctttttcttaagactgc

SEQ ID NO: 8070 - DNA, 893 bp, Cucumis sativus
  Intron number 3 from transcript Cucsa.155420.1 (locus Cucs a.155420) derived from phytozome v7.0 (chr-ID scaffold0113 6; pos 195267 to 196159)
ctcagcagaggacaggtaagatctgacttgtatattgtagtttcaacttctaaatgttttttaactctatgaaatatctccattaaaattttttcatcccatgttttggtgaatgctttttctaatagatgttagaaaattccatagatgagaagaaaggttaacaaagcagaaattgatttttcttcctcctctgtaattctctcttttttgggtaaatataccagtttcatttgttaaagagaaaatttaaattagatattgggaatgatctactcaaggtaccgacaattctctactattagatatggtctgtggggtttcatcaatttcccaggagccttccatctttgaagagagatgaagtggaatcatttcctgctgctctttttttcagtgtgttttgtgtcctatagttctgttcctgtcgatgtaggcttcatttttctttttctttatatagaaaatcaattctggcccaagatacttcttcttttggaatgcttaaaaataatgcaaataaggcattggcttgcatttgataagcactcattctggcaagtagaatctgtagaaagtatactataataaaataaattggttccaactcccatctgatcaccaatcataatcattattggcctcgtaatttcttttgtataacttgttgtggtgaacatgcttctggaaaggacaatccctttcacttgattttgaaaagttcaatttcagaatggctatttgcaccattgtggaaaagatgtcaagttacatgctttttcaagagcaatgttgttgaatctattcaattatggaacattatagcttttgtgctatgagaacgttcggtttaccttctctcacttgtcagttatttacaacataggttgaac

SEQ ID NO: 8071 - DNA, 4578 bp, Cucumis sativus
  Intron number 2 from transcript Cucsa.388200.2 (locus Cucs a.388200) derived from phytozome v7.0 (chr-ID scaffold0396 7; pos 653536 to 658113)
cgagctcagtttcccaccattgacaaggttcaagttctttaatttcatttgatttgtgtctttatattggtttctcaagacgagtatgttattgttcctttcatggagactttaagtagtgagagccagatatctgtgtaatgtggatattcaacttttttttttttagaggaaacaaacaggttaaggagacagaaaactccataacccatttattaaatagagaatggggctattcaacttgtttaatcgagtatttcgaaattataatagctagtgggtttttctttgctagtgaattcgaagtgttgggtatgagagtatcggggttgttccacctccacgtccgtgggaggtttccagttgaggaggaatttgatgtaggaagcttcttttttggttttataatggacccaattgatggagaaaatcatatttgtctatggattgtggtgcttgttaggattatggagttcaatcctcaaactaaccgagttcaattccaaactgatgtcgggtctagattcaaatgatagaatctttgaagacatatgggcgctgtggcacaaaggtcttttggactgcattgaagaagagacggattctatgatatatggtccaggcatgagtgcatggtttccaacctataaacaaagttttaatctaggtacaacttgagagtaaatgggggatttaagaaaaggcgagttgttagcgatctgtgaaggttttggtgcactagtcattactcattagttgacagaaagttgaaagaatttaggtcatattttcaaaggtgagaaatactattgcaggaatgcatgcaatttctactgtatatgaaggtgagatatattatattcacgaccttcaatgggattgtctttttgcgcagttgtgttgatctggagcagatggttgaggacttttggtttatgtttggcttggaggagagattgtttctccctgattgaggaggttctcttgtctttggttttccatgagaaagaacatgtgatgtggcaagtgaatttttttttgctatcgtttggagtattaggctagagagaaagaatgggatctttagagaggttgagacatccagggagaaggtttaggagggaccggttaaatgccttcttgtgggtgtttgttttagttacttttgtaattgtgatcttggtttgatttttttggattggagctaggagctattttcttagtttggggctctctctgcttttctatgaggtgtttttttgtatacccctttgctttcattatttctgtacgagagtttgattcgtaaaaagaaaaagaaatttggtgttcttagttgaacctacagagtctgaaggagatataatttaattagttaagggtaaatttatataactttttgttgtttttattctcattttatgtttcttctcttgcttatgtcattgttattactgcttatgtagaaggaaaattaaggattatgtgaacatttcaaatttctaacaatgagtatgaaagcaaggttcttgatcttgatgtcaatcgacactaggttgttgttttaaatattagatcaattaaatgtttttctagtgaatagctaaacctaatattgcggaagacagattgctgatggatgaagacttgaagtgtttagagaaggcacttccttttctccatcgaagtatttacagaaatgatacaaattatatgaagtttcagattaacatagaattttaagggaataaaagtttcaaccacaactttgaaaactgtagcaataatagatggattagcatgaaagatgccaaatgcttctcttgctgtaagaaggatgaaggtgcttcgatgggcttgttgttttttatgcctttgtattctttcattctttcccaagtttggtttcaataagaaaagaaggatgaaggtgatgatagtaaattaaacaagcaaaagaacaactcaaaggaaaacttcgtggaaacttgtctcataagtgttcgcattgagttattgaaatatggcttacatgctatatattatattgggcaactgacagacaacatatatcttgtgatctcaaatcaagataagttatgaccttgcagtataggtattaatgaaaatgtgagattaaggagtgagaacacatcttatggaatgcatattggagattagtttgaagataaataaatgctgcagattgttgttgtgtaggataaattatcaaatatattccaggtatttgtctcatagttaaaaaaaaaaaaaatccaggtattaagttgaatctcttctctataaataatcttgatggaggttttttttggataaagaaaaatcaattgttaacttgacgatgaaggttacttgagtgataaaaggctaccagaagtttacttgaggcttcatgttggttgatggttagatgccacgatagttctacactagaaatgaaagtttgtaaggcttttcgtatatcttttacacaaagtgcaattcaatagggttgattatgactttatattacattagctgacaattttttgatagaaatgacaactttcgttgagaaaaaatgaaagcttacaagggcacaaaaaaacaagcaccaaaaaagaacctaactgaagaaagtgttttactttagctgacaatgtaaatgggacagctatgttctaagctattggtttaagtagaacgattgggaagatatcaaagcggtcagaacataccctcaagtattaggtatctgatagacctcctattatattgcagtacagtagaaggggaaagaaaaatgtagttagggtgaaaggtgatgagaagtcagaaaagttagttagttagccttgagtgcggatgagtataaatagggctgttatgtgagaggaaaggttagttagaattcgagaaagaaagagagtctactgtttcattcttgaaagagaggataacagttggagagtttgttctatttctattttgtaacactgcaatgcctattcctattcattaaaaaaattcactattgaaagttatcctatctctcaagaatgaaacagtagactcactaactttttcagtttctaactaactttccctctcaaacagactccctatttatattcccactaaccgacgtgctgccctttccgaattctcaacccctttgatgttcactacatttttctttccccttctactatactgtaatataataggaggtctatcaggaagatatgaaagtagtaggcttatgtagttggtattcttagagtttcaatttcagtggtgtttggagttttcgtctaaagggtcaatttgttccattatgggttgtgtttgactgtatttggttttttgtaggtaagtccagcattgggctatattttgttgtattttctttaacttgctttttatgtctcattgtatttcaagcattagcctcttttcattttattaatgaaaagttctgttcctattaaaaaaaagtaaatcgatgtagttgcttaatgacaagtctgcatttaggataggtatctgttcaagcataagactgtgtatagttctagagatataatagagtggaagataactatgaaataattataatttgatatcgtacttcaaataggcaacaatattgcttgtatctatgatgttgatgtatttgaagagggtactatagacattgctctgcagttagaaatttagaatctttttctactggttgttattgatgggctgacagaatggtgatacattttgacctctagttggggtgagtgttagtgggtttcatccattgaataaaacccataacaaggttcatgttgtgggagttgttgatgtagagggaagttcaagattgctgtttggtttccacaggagagatccttaatattttggtgcttggttatcaattgaacttggtctaagttctatttgaagtttaactgaagatcaagtgaatggatctttgagttgccatgttttggcgttagctgataaaaactccttgtatggttagaaggccttcgtaaggacatgttactaatgacaacaacctataatcagtgttttctctatcagtttgggaacaacttgtgggaaatgaagaacatagtggaagggaggattgtttgcaatttgtaagagccttggacatgagtagggagaaaatttagagaaaaatcctatgagaaaattctacaaagaaaagtatatgcgtgtaataatgtcatgctctctattattcttctcttttaatctttattggtggaaattgtagagttgtagaaggctgaggagaatcaacataacttaattagtgatgaccatgagaaggaaaagttcatgtcaatgtgcagcagatactcttagccactagttatttattagtctgtccttacgaaattggtctgtgccctgttttctgtctgctctgtattctatgaaggatttgcatcttagtttagaagactgaacataaatagcttattacacgtggtgtttatttacttttccttgttttcaggtgtcaattcagccattcattttgcaatcacagtt

SEQ ID NO: 8072 - DNA, 1006 bp, Cucumis sativus
  Intron number 1 from transcript Cucsa.189540.1 (locus Cucs a.189540) derived from phytozome v7.0 (chr-ID scaffold0130 5; pos 356629 to 357634)
caatcacttgccttttcatcttctcccccgacctggtgcgattattactatttttctttctgtcttctttttcttaattatcatttttattcacatcatcctatatcttcagattattgggttcagacttattaatttatgacttaacattctttttgtagctcgtgagagagttgattatacttttagatttcaacatgaaaaagggtgatttattttcttttaacttttgtattatgtttaaactcaaaaggttttttgagctatgctatgcaaacatgtagtcctctaaactatagcttttgaattattgctcatgcgaaaacttaattgtgtttcaaactaatgttttttattattattattattattttttaatatttagtggttgaatgtgctacacttgttttgtgaagtctagtcagatatttaataattaaaatttattctgtgcaatataatatttattaaataatttcatttattttttaaaatgttgcataagaggagtacactttaattaaaattggaacagtcaatttttatgattttcagtttcagatatggagaacatttgaatgtaaatggggtgactcatctattgcgcaacccagacagcatccatatgctcctttcacaacttttgttttttagtttaaagatggagttttcattagatgtttgatggaatagaaacgaagggatttttttttttttttcctttttctcatcttttccttataataaaataaactgaatatagtgacacatgttttattttagcttattaatattaattctatggcatgtttctctattttgttatgaaatggtgaatggtaatggacacagcaaattatggacagattctcttggaatgaattgcagtgacgtattcagtttagtaagaggattgaactaagacattattaaaattggattaaattacttgttgtgagtttctaagagatattttgtgtacataggctcagaaacaagcaacgaa

SEQ ID NO: 8073 - DNA, 2138 bp, Cucumis sativus
  Intron number 7 from transcript Cucsa.007160.1 (locus Cucs a.007160) derived from phytozome v7.0 (chr-ID scaffold0008 9; pos 24216 to 26353 reverse strand)
ctgttcttttccttgccaaaaaagtaacacttccatcctatttctttcttgcttattttatttattatttcagtttctttgtctgatgtttggcgatggttctatgctaaagtagtgtcataatgcacgtaggaaggaatgtattttagaataaatgtttgggctgggtagttaaaatgaggtaggaagtgcactgagcttggttatacgtgggaatttatatggagcttgacacaaaggggatgtgtccatgtccacaagagatgtggaattttatgctttttgcattttttttattcaatacatcgcttatctgttggtttcgtgacaaaatgttggtttgaaaatttttatctacttttaggatttagtaataatgtaatatttggtttttatttagaccttcagctatttcccaacaaaatgtcgggaaatttttttctcttcttcaaggacttgataatatttggtttttttcttctactttaatgactggttcacgaatctagtcggtaatagcatatgatatggcagtagtgtagcttagttttcctgaattggcacatagcaacattgacttggagtgttcaccattttcctgcaacaaaattgagaatctgtagccttgcccacatggcacttgagacttaaaagaattggcaactcacagagaacctgttcagctggtatggaatgctggtttcaacaaatgaaactcaaaacctaatcgtctaaatttatgaagaacggttccctcatactcaaatgaatacttatcactgtaaagttgactcttcagtcttttaacaataatcaaggatttaaaggtatgaagagcaatcataagcttcgctggaacatttagttttaagaaaattaagcctatatacattaaaaactatttccacatattggtttctttattttgttatctactgtttaggagtgttcgcaaagtttaaacaaagttttgaaaactgaaaaaaataatagttttggttgggtagtggttttgaaagctgtggattttggggtataggcataggaagtttaggagcccataattggcttacttttggcaaattgatgttcaaccagtttccctctgctgcctttactattaaggtagctttatatgttctaaaggcgattagtaatatctgaggcacttcattacacttgtgtgcattggaaatagcttaataaaaatgttagaactcttactagattccatatttctttgtgcaaagtttgtttgtaattattcctttagcttttgttttgcttgattggaggccttttagatagtcttcacttttttgtaggcttcccttttttggtatgtacatctattcctttgtttattctcaatgaaagcgtggttattcacataaaaaaacaagaaagattttgtttttggaatttgtctaggaatccaagtatttacttgggaaagatgaaaaccatggtgaaaaagaaattgtaagaaaacaggcaatcttggaaaataaaaaactgaacaatgatcgaacttactctcgtcttattggtcaggaagagaagaaatatgatcaaggtgtgcctttggttagaagtttgatagtttgtaccttcatatgagcattttagaataggcggagtacattgtttaagtcctcctcttaagcaaagactggtaaaaggtatagagtatttgttggataaaatatagagaatattactgttagaaagattaataactaccgagttggtgatgttagatttgatagtatgggggttttatctcaaaaccaattggctacgagaagagtacatctattttatatggagtatgagtctccttagtttttccaacgtgggactctcaatttctccaacaagtgaaaacttttggagatctccaacttggttgagacttggagagatagggagagatagggcttctgacaaaaggctataccaattactagtataatttccttttttctaatacaataaaaactttagtgtgtggttgcacattctcaacctcaggatcttatcatagagttagtgttaagttttgtaatggttgcatgaacaactgaatattgtttactgcagattcagttgaagtcagacaagcggatattcagtat

SEQ ID NO: 8074 - DNA, 884 bp, Cucumis sativus
  Intron number 2 from transcript Cucsa.158250.3 (locus Cucs a.158250) derived from phytozome v7.0 (chr-ID scaffold0114 2; pos 390867 to 391750)
ctggtaaatctatattgcttactcttccattcatcattcaatttcatgcctaaccttctgttttggtttttctatggaggcttgaaatatgatgagaatgcaagtatttattgatctcattgtattgttacggtagcttggtattgttactttcttttctcaaatgtatgcctaatgcataaaaacgtttttgaggcttgtgcatttgggagcaaccctcaaggtacggtacgattgtaaggtttcaaggcaaaagctcatgcttcaatacaagattagaggttcgatagttacatgatgacaaatagttagatgattgatgcttgaacaggatttgttctctaggttgtacaactgtgtctttgaatttcaaatagttatacgatgggtggaatagtacaactaacaaatagttatatgatggcaaataggatctgttctttaagtacaacttatgtgtccttaagtttcaaatagttatatgatgcgtgtaatcaactaatagttgtctgcttcaaatgtggtcgtccaattttgaatgcattgggacatacaacgctggttgtggtaatggatggatatttgatttttttctttttggtagtttcgtaaaatcaaaattttctaattaacttgaggattatgcttcagcactggcccttactctttagaattgttgggtatgcttttaaataagcagaatttttctttttccttactacattgtttggagttactcagttgcgttcttctatcatcaggtttttggcctgttctaattgatgacttcgtcaagcgcatgtacatggttcatccttgcactaacacttggtctgctgacaatcattatgcaggcggtcaggatctaataaagtctcaaagtt

SEQ ID NO: 8075 - DNA, 1446 bp, Cucumis sativus
  Intron number 2 from transcript Cucsa.261710.1 (locus Cucs a.261710) derived from phytozome v7.0 (chr-ID scaffold0226 5; pos 162205 to 163650 reverse strand)
ctgattatactgctggtgttgtggttgctttttatgtgagtaggattgtggtattcgttggttttttgggaaatgctttgaactcttgtctctttaatctcttactaatactccttcttttctttgtttttttttagtccatgagtttctgataatcggatgacgattttaaatttttagttactctcttttcatttgattttgttctggattcttttactctgcttttgtgtgtgtgtgtgtgtggtagtagtagtaggggttttaaggtttaggattgtgttaaaaggttaaaggaatctctaaacacagctgtgcctttttaatacggcgtgtttacgtgggagtgcttttaaaacttagttttaagcagggcttttctttttcaaaaaaacaattttttatgggacctaaaagtctgaatgagatttgtaaagtttttaaccttttgttagcatcaacaaaccttttttcatagttattattattatttttccattattgttatggaactcttgctcctattttctctcttgctcccacttctaacgcaatggggacttgattggaagtttccgtcagagggtgagagcgcaagggagataatagggagtgagtgagagcttaatggaaaagtgggagtgacagcgggagagagaataaatggagcagagaaagagctaagaggggaacatagagagcaagtgcaagaggtagctcaaggagcaagagcacgaggaaaaattagggagcgagagctaaaggaagaatagagtgcaggatgcaagtatgaaatataaataccaagaataaagaaaggtttgttaaagctagcgaagggtttgaaaaacatattttgagacatcaagttaaaagtcattttgcaaaatttttagttcaaattgtttttcttacattagaagcaatatggtatggaagcgtctattgacctgtcactgttgtgctttgctctacacttccataaaaaacacggtcataaaataaattgctaagtgggcggccaagcctttctttaactggttaagacattgcttaaagttaaaaaccactttatgagtacattcttgtaaagttgattgcctttctaagtatttattaacgaatttttgcatttatgaacacttggaaagtcaatccaaacataccttacaatttctcttaaaaacatttataaaccattttcaaaccagatgattttgggtttactatgttcttggctaggacacaacccaaaaatacctttagttgttggggttagaaatttgcactatagtttaattgtgtatggactcgacctgtagttttagttggtttggttcagttttttgggtcatttattcagattttttctaaagaaaaaatagcaagaatattatcccttttaactcatagattagtaactcaatgtcgtaattgtgatggtag

SEQ ID NO: 8076 - DNA, 3040 bp, Cucumis sativus
  Intron number 1 from transcript Cucsa.341340.2 (locus Cucs a.341340) derived from phytozome v7.0 (chr-ID scaffold0335 6; pos 3740969 to 3744008 reverse strand)
ttcttcaaaccctgtcgtctttcactgatatacaggtttctctctacatcctttcttgtatcttttcttcatatcgatttgtttgattattcatcgttaatgctctgttttttaacttttcttaaccttttccctcatttcttgctttgatttactctttttttcccttgttttaatctctgaaatcgatttctgttggatctagtttcgatttctacgtttttcttcgagtttttttttttgttattgaacgttgatcgtttgtttgtgtttgtttgtttgagaaatattctggccagtaagctttgaataggccatagatgatgattatcgtgttttttaagtgtgtattatgattagttgatgttttgaacatgcggtgtgtgattaggtggtagtgtagaaacctgactaacttcgttaatctcttttcatctaatgcctctcgggaggtggatgatgcggatgtagtggtatcggtggagatttttcttctctgcggtgtttctattgtaataatttgtttgattgttcgtatggccatttggatgtattgtcatcattaatgtgatacgtgttgtcctcttatataagcaaaacattagatttcatacaaatgaaaaattattaatgataaaaacacctctcgatagtttatccatacaaatttttttttaaaaaaaacttctctaatagtcatttttcattataaaaaatgtgttacttttcaaatacaaaactgaaagtgtattgttttgtccaatgtacccaaattttaattgtaggtttgtgataaacaataaataattaataaataaagtgaagcaacaagcatccatggttgaaggctacctgaaaatttcccaacctaggaagtgcaaatgctctgttttgatccaaaactcacaaccactctgtctcagtttcccattccatttcagtaaactcttccactcacctctctatcaaccctccttcaactacgcatctcatcagcagagttgatcatcaaagggtcagcatacaaattaactaaattagcacacatagttcatcactattttagtagtcatatcagatactgttgatcttcttcactttcaacgatccctcaatacaggtttctttttatctctttccaagctaggaaaatcaaatgggtcttgactatttatttataacccttttgattgtttagcttttttctgggtttttggggcttgactatttttctataacccttttgattgtattcggaaattaccaaaaataggataaaattttggggcttaaagagttttggattagttttttaaaatgtagggttctaggtcaaataaggtggtgaaatatccaaattaccctcagccaaaaaatgctaaaaggtaggtcctttttctcccacttcctccatcttcacgtcttccattctcaaaatctctcacgcacaggtgacttttacgaagggctttggatggtgacgacgaggctttaaacggcgacgacgagcttcaaacgatgacgttgtggcttcaaatgacgatgacagctaggtttataaagattttcacacaacttgtgggttttttttttctattttacttctattttacttcagaaacatttttccattatatatgcaactagggatctaaggacacaaaaactcctctatatgcaactggtattcgcgaatatgaatcctaatttctgcttctctttacctaacaacaagcaaaaagtgaatgagttttctaaactactttttcttttggagcctctgatctacctgtgttcacaatttcccccttgttttggttaagtggcgagatgcaacaaacaatattctaaatcttatattcatatttcgtttaggtgtcagtggtgtggccattgtgcatgttatatcgcataaagctttctttatatgttgattaaattacacaacatatggagctttttcttcctattgttcttgcatttactttttattttgtagatatctaattgcacttatacttttttggagatatgggacaagttggtctcttacctcctagtatcaaacatctgcaatttagtcagcttcagaaaattgaaagtgtgagattcatgtcacatactggaacatcgcaagtttcttgtctcatatgaatcagattgtaaattactatttcttcaatcaatatcatcttagccaaaaaatattgtgttatcaaattacatgctatatagatctatcatccatgcttgccaagggaataagagaatcttgactagtcgaaaatgtaaaatttaaattctgttttattacctctctgtattcatctctaacaattatctcgaagtctcaatgccaaaagcaaataatagtgaactatatgataaatacccttggttctgcgttattagctaaaattaacttctagaattataccatgacatcctcaatctaaagtctggtattttgtagtaaagagtgtccatttttctacaatcagattctaaagtttggtattttgcagtaatgatgacgaggtttaaagattttccaatctacatctacttcaactttgtatgtagcagacattaggactatctagtctcaccctagtgtaaataggacacgttcgttgttcattttcatgacttgattctttgtctttttttatctcttttgtaggatttagagaaagttattgatcataaaatctcaagttcacactacaaaaaatatcaatttgatcgttaaaatagtaagtgatgtacattgttaatttagtttttgtgcatatttttaggttggtttaagaattaaagtgatacttgggaactttttaggttgttttgagaatcaaaatatgacatagacactttttaggaatttttgtacgcggtttttggagttgggatgtagtacattttaagaggttaggagtgaaatggttagccatagtgacatgtacttcttgttccagaatgtgtaatatattttgtaatctaatagatgctaactagttgaattgattctgcccccagg

SEQ ID NO: 8077 - DNA, 6659 bp, Cucumis sativus
  Intron number 2 from transcript Cucsa.183450.1 (locus Cucs a.183450) derived from phytozome v7.0 (chr-ID scaffold0126 1; pos 393784 to 400442 reverse strand)
gacaattctttatttctttggcgatttgacaagcggtgagtataatttggccatgttagataatttcattattaatgtgtattttgaaatctaattgtgatccacaatattgtttgttgcaccaggatatcttcttgtcaaattgaacattcaacgtatttgtaattgtgatgattttggaattaatgtttggtcaatttctttttttcatatccacagaatcaatgattttggagtgttgaaaccttcttatttaaatattttaaagagctatgagttttgaggtggagaagttgttctctttgtgttgttttttccccctgttttgtgggtttgttttggatttgttgtttttggttttagtcgttctttggtgctttgttgtcatttcttttggtgcttttgttttcttcctctgtttgtgttggaactccagtatttagtatttcaacagtaaactttattgatgaataacgatgtaaatcctttgtacaatataagaatgcaaagactctccagctgttagcctatctttcaaggatgaaatagaaaactcactaacctctttagtaactaactttccctctcaaacagatttcctataaatatttcaactaaccgacctactgcccgattcactgacccctgcctctctcactaagtaactacccttttcgaattctcaactcctttgatgttcactacacctttcttttcccttctactatattgtaatataataggtggtctgtcatgcgattctgtgagatactgagttgtgggttgaacaacaacatgttccccgagcaacttctttgactgtgatacatgaaaaaccgtatgtaaggttgcttcctttggtaattctaaactataggcaaccagccctattcgttcaaggagtttgtatggcctaaaaaacttggtcaatagtttttcatttcttttctttctcatcgatgtttttcgatatgacctcaacttcaaaaacaccttatcacccacttgatattcaacctcccttcttttagcatcaacatacttcttcatcttctcttgcgcctctcttaaatgctctttgaaggctcctaaggccacacccctttctacaagttgttcatccaaggtagagtttgaagtagcaccttctccatacgaaatcaatggtggtggtactcgaccatacatagcctgaaagggtgttacccctaatgctcgctggtatgtcgcgttataccaagattttgcccaatgaagccaacatacccactcctttggacattttccacagaaacacctcagataaatttctactcctctgtttacaacctctgtgtgcccatcagtctgtggatggtatgcaattcttctatccagctttgttctagccaatcaaaaaagctccctccaaaaatgactgagaagcaccttatctctatcaaatactatagattgcggatggccatgaaaccttacaatttctttgacaaatagttccgcctttgacttagccgtgtaagggtgctttattgtcataaagtgtccatacttgctaaacctgtcaacaaccacaaagatcacttcaaaacctctcgattttggcaagccctctacaaaatccatggatatatcactccatatctgattgggaatctccggaggaaacaataaccctgcaggagacagagccatagttttatttctttcacacaccatgcactcttcacagtattttttaaccgccggtttcattccttcccaatataactcccctgttagtcttttataggttcttagaaacccgagtgtccgtcaaacactgcatcgtggtaattatgtagtatagcaggaattaatgtcgatgactaggaagtcaccaacctatccttatacctcagcattccttgtctaacggaaaacttgccttctgcctgctcttcctgcctccacaacttttcaactatcttcttcagtttatcattattctctacttcttccttaattatcttaagatcaataagagttggagctgatagattgtacaagtggactgttggtggcatccttgagagggcatttgttgctttgttttctatacagaacttcaaacgaatatcccgtaagtttttctatccacctctgatattgtggttgaatgaccctttgctccaaaaggaacttcaaggatctttgatcagttttaaccataaatttagtccctagcaaatacggtcgccatctctgtactactaatacaacaacaattagctctctctcatatactggcttcgctttgtctctcatggctagtgtttggttgaaatatgctattggtcgctttgcctgaactaacactgccccaatttcataccaagaagcatctgtttcaatttcaaagggtatactaaaatctggtaaggctaacacaggcaacgacatcatgctattcttcaacttcataaaagcttcttcagcctcttctgtccacttgaatgaccctttctttagcaattgcgtcaaaggggctgctatagttccatattggtgcacaaactgccagtaataaccagtcaatcccaagaatcctcgtacctctctcacattcgtaggcaaggccattcaacaatagaccttattttttccaggtcaacctccaccccttgtccggaaatgatatgtcctagatattctaccctggccttcgcaaagttacacttctttttattggcatataattcgttttctcttaacacttccaataccagtttcaagtgttgtagatgatcctccaaattcttgctgtagatcaggatggcgtcaaataaaactagcacaaatttcctcaagtatggcataaatgtatgatccattaaagacttgacggagcattggttcaatcgaatgacataaccaagaattcataatccctctaatgcgttcggaaagctgtcttctcaatatctttagcattcgttcttatctgatggtaaccgaacttcaaatcgatcttagagaacatacacgccccattcaattcatcaaacaactcctcaatgaccggtatgggaaatttatctggtatagtaacattattaagtgcatggtaatctaacaaaaatgccagctcctatcctttttcttaaccaacaatactggactggaatatggactgttactcggccttatcactgcagatgtgagcatctcctccactagcttctccatttcctctttctgctgccaagcataccgatggggctttacatttataagatcagttcctttcttaaggtgtatatgatgttcaatctctcttctaggtggcaatttctctggccaatcgaacacatctgaaaacttgtttaacacctctggaacagattcttccactgtgtaaacttcatcaatcccataaaatttggccattatcgtttcggcaattagagttctacacttcactagaaattcccgatctgattcatcccaggatttgatcatgttcttaagactcacccttgccttagtaagactaggttccccttttagattcacctttttcccttaatgtacaaaagtcattgttaaattcctcaaataaatcaacctctgtcattcctaagggatacaaccattgcattctcaagatgagatctactcctccaagctccaagggcagaaaatcatccttcaacttccattcattcaaaaataactctactgcttcacagactcctttccccttgatggcagctccagaaccaagaattaccccttaatgtgaggtttctttggtttggagttataactcattgaccaacttttctgagatgaaattgtgggtagccccgcaatctatcaacaccacaatctcttttccttgaattcttccatgtatcttcattgttctcgggttagtcaagcccactactgaattaatgggtagctctacacaggcgttgccatctactgctagttctaacgcgttcaactcctttgactcctccggtatcgcctctatgaattcccattcttcgttgttaggttttaccacaaacatccaaagctccctttgttcttttggcttacatctgtgatctgcggaatatttctcattgcactggaaacatagccctttttcctttcgtgtttgaaattctgcatcggacaatctcttggatgttccctccttttgaatctctcctgtagccgttcccctcaacgtaatcgtccttattggaaaaatagtgttgcctttgttatcattgccgtttataacggtattagttttggcattagtggaagggtaattcgggaatttcgctctagagtatctgggaagatttgcttccttccttagaatctctcgattctccaccatttgcgccaatatcatcatttgagacaatcttaactgttcgcaaaactccactttcgccttaatccatagtaacaaaccgcccataaatgtttcttcaacaactctcttgaagatccgataaaggtgcaaccagcttattgaaaagatttctatattcttctaagcttgattcctgccggattctaaaaaatcggccataaatggatccctctcgaatcaatcaaaatcgaattaataattgttccttcagattcaaccaatctgtaaacttatctctctcctcttgtgatcggtaccagtttaaagctggatcttcaaagctaatagtcactacaataagttttttggaatcggtaggtttatggacttgaaagtacctgttcacacagaaaaaccatgaatctggatcatctccgttgaagactagcatttgaactttttaaaacttgtttcgatcattgtttccatcatcgcttttagttttcttctctcgtgcttcgcttctaattctcttgctcacgaaccttctcctttggatttcatcaacatcgtttctcgtgcatctgattcggctagtttgtcgctcgctagtgaacgttccttcgctatcgattccttaaacaacaacatcatttgatgagttttctctatttaagcactaagagtttccatattcttcgacatcgacatcaatttctcttccattgccggtaacttgctctgttctttctttattccaatcagttcttgatcgtatgcttgcaacctctccttgattcaggtctgagccatgataaatccgcttccaagatcgatgtgctctaaaaccaatttgttggaacgtgatgaataacgatgtaaatccttagtacaatataggaatgtaaagacttcaactattatcctatttttcaaggatgactctgaagactcactaatctctttagtaactaactaactttccctcccaaacagatttcctatttagattccaactaaccaacctactgcccaactcactaacccctggccttttcgaattctcaactccttctcaataatctaactttccccttctactatattgtaatttaataggtggtctatctgtttgtgagcattttctgctcgtgtgccttggccttaggttaacctgaggtcctccttgttgttgtataataatattatcttttcaaaaaaaaagttcatatttttcttcgtaataaagtgaaaaatattgtgaaaagtttactttgcttggataaaatgaaaattggaacatgaacaacaatttaaattattattcaattcaacccaaagcaacctatgaacttgttaatcacctagctacctaaggtttgtgttggagcattaataggtaaacgggaatgttattaggatattagtacggtagattggtttttaataaagggtatttggaaaaacaaatttacaattaataaagggtatttggtgatttggattacagttagatttttgtgaatttgtcttgttcgagagagaaagcccttggggaaaggtgtacaaacaagtggaaacattccttgcagtatcacaattacaatcatgctactatttgtttcttattaaaaaaatttataactatgcttctgttaataacttaataacattcctagtatttctctgtacagtgtttaaagggaatgagtgcggactataatggtcacctgtctaggatatcgtatcttggttgttcccttgacaatcaaatgtagttaggttagatgtctttttttgcgagaatagtcgatatgcacacaaactagtccaagctcatggttaggaagaaaaatgaagattcttctcgtcgaaattcgaatactccagtagttcgatcatagtttgaccaagataacacgaattaatagcttccagataactatcctaccttttgcaccgagtatcatgacttagataggtgcgacaaacaaggaaaatttttaaggacttccaaacagagacagaatctttaacaagtcttttgtggtgcacttctcaagaagttgcctagcttctagcatttgtgcatcagtgttgtattagtagctgttggacacattagtggttttgctactgctaatttctcctgaactgtagcagtaatcctataaaaatctatcaggaagctgttcacatgttacagaagtggattgttaggtgtttatagagtacttttcattgaagtataactatctcgtcaactaatggtgcttttctttactttaccacttggtcaggg

SEQ ID NO: 8078 - DNA, 5018 bp, Cucumis sativus
  Intron number 3 from transcript Cucsa.011910.1 (locus Cucs a.011910) derived from phytozome v7.0 (chr-ID scaffold0015 4; pos 1311338 to 1316355 reverse strand)
agaacaggttcttagttaatttcattgcttggtgtttatttctaagtggtatagtaggaaggaacagcaactgttgctcatagtgatttctttggctcttcttattcttctaatttttggtgttccttggtgtttatttctaagtgtacaggagaaagagcaaaaaaataaattaatatttccaaaaacaaaaacaatatattaaatatcttcaagatataagaattggaagctcaaaataataaatacagcctctcctatttgttctaataagatcactttggaatcccaatagtcatggccagatccacaaacaaatgatgaaggggttgcgtttttatcccctgtttttcattcttctctagactatgtttcatctcttcattctaagaaacgaaggaagttctctcccctctctcctctctcctctctcctctttcctcctcggcagccagcccctccggccaccaccaactctttcagaatggaggtttttggctgcaagatcagtctcattactgcatatgaaacgaaaacaattattgcatcattgaagacgtggaagcccatatctctcctccctcctccctcctccctcctccttcatcattctccccggttcagtcaaacctctccgaccagcccctcaacatggaagttgctagctgcaaagttaatcaatctcattactgtatgtggaaggagaaagaagactttattattgtagatgtggaagctaaaaaatccatttcaatctccgaagctcaactccgatggactttgcacactatttctactctcctcaataatccagtagaccgcttcttcaagaaagatggtgaaattgacagagggcgaatgaaaatcttcaagttccaaggcaactcggggtggatcctcagctgtgacatttggccttactaaggaggtcattctacccttagaatatgctccggaatcaatatgcaaggttggtcctccttctttagaatgctggataagtatgtaaacatagtagattacgcccgttggttctcaaccctttctaccaaagctcccttccaaccttcaatggagaaacaaagttatgctgctactgttaaatccaaaatctccaaccattcagtacctaaatctggaagaatggaaccaggcctgaattccatccttcaagatccttctcagggttcagtttgccatgcccttctatcaaaaaacaatggttaattaaaaaccatgatgtggctaagctaaactttgataacctttagattatctcaaaactttttgcttctgatgattgcagatggatttgcaaatttctggaatcaaaattccaatccaacattgttataaacctcctttatgatgacaatgctcttatcagccttgatcaaggctcccttagtgaattaattggtgcagtaggtaaatggcaggcatggggtaaatttcaccttaaatttgaaagatgggacagcttgaaacatagtaggccactgatgttgaaaggctatggaggttggattaaagtgaagaatcttcctcttgatttctggtgtagaagtattttcgaagtaattggagaccattttggaggactcatagaaatagccactgaaattttaccaattgtagtgaagctcacattaaggtcaagaagaatcaatttggttttgttccatcaaccattgaaatttcagatcaaaagagtcatattctaccacgcaccttatttctgatgttcctctcggggtttttgggtgcactgcctttgtccaaagtcgtggccctaaaccaaaataagtttaccccttgtgcacataaatgtatctttattaggtacccccttcaccaacgaagttataaattcttccaccttcccaaaaatactacatcttcatggatgtaaccgagtttgaaatcaaggacttgggaagcttgatatattttcttagaatttgaggtggcaagatctaaggatagtattgtcatttctcaaatgaaaatatattttagttttggtaaaggagactgaaaatcttaggtgtaaacctgttgaaacacctatggatccatatctaggcaagacctaagtgaagtgattagtccagttgacgaggatatgtatcaaaggctggtgggaaagttgatttacttaccacataccagttcatacatatcatattctataagaccttgaatcaccaattggcccaacatattaaacttatgggtgaaggtaaatttaatcatatattgtcttgaaaggcatcagaagtggaaatgaatattaactggggaggaaataacaatgttggggtttgaacacagtgttgaagacttgatactcactagggcttattcgaaagtaggggaaatttggtccgaaagatctgggaataaagtttatgttgtgttgaatgtcaagtagtggaagtaggtcatgaggaactttctttgatttcttgttgcgacttatcaatgaaacgagccacttgttgactatcactcttggctaaattgtttctagcactcaaacgatggaattcttctgtgtagtcttcaattgatcaagctccttgtttgctatgttgaaattggttgtgaagaagtcgctcatggttagccggtaagaagtgcttcatgagtttcagtattttaggccaactagtgataggttttttgccatacatatgtcgattgccttgaataggatcccaccatgtcgatgcaccacttttaagtttcaaagaaacaagtttcacctttttgtgttccagggtggccatataatcaaagaaattttcaacgtttttcacccaatctaaaaaggtttctatattaatcttgccattgtacgggggtatgttgatttcattttgaagtcatgttcatggcgccactgtggttgtccttgccactcttgatattagtcttgatttttccatagtcttgtgcttgttcaacaggattctgttgttgaaacagtgggttatacctttgtggagaatgcatcattctagctcgaaaatgtggctgtggactaggcaaatcttaatctttggatgaatcagaatacagtcccaataaattaagcgtgggtctataaggtgaattatctggcatatgttgatggtatggaatgagattaggccgctgcacacctctgttattaattctttggtcttcttgctggttcttggattcttggaggattctctggactattcgatgcaaatcttggttttcttgcagtatttactgctgatttttaggtctgtgatgagcttcttgctgcagattttgtacatttccggctgcttgattccctgccaatgcctcttgatgagttcttagttgattttaaaccattcgtcccacgtccaaggtcagcttcttgattgcttgtccacattgcctaaccttcagcttgtggtttgacaagaggtggtgaaggatgcttctgcatcattgggtgggagtgaaggaagagtggggagtttactgagccctttactcgtcatgaggtcccttctcgaggtcgctataataccaattgttgaaggctaaagagtcttggagaaatcttggaagaattttggagcaggagttttattaattgtgaataatgagagaatgaaaacattgatccctttaaatggaccaaagggaaagggtggttacacaactaaactgcctaactagataactaaacctaacctcctttaaagagacccgaagacgaagggttttgtcacacttgttaaatctaaaatatttaaaggtgaatataaaaggtcaagtacaagaaatatccaaaatacccttgataaccctacatcacacacgatctcctgaaccaacttactttgatacaatcttgaatttgtagggagtaatattatttttctattggatacgtgtaatttaggtcttcgttgtagaagaaattcctccttgaaatatagaaagaataaatataataatgataaatatcttgacaattgtcatttatatacaaatataggaattccagcacattgttagttagccgtgaacagtccaaatgaacatcatctttgggttattaacaaaattttaagatacttgaaaggaattccagatcatgggctactgtttaaaaagttgtactagaacttcatactgatgctagtggctggagatttaactgatcgaagttctacatctggatattgctcttatgtttggggcaacttagtcacttggagaagtaaaaggcagtcaaattgttgctagattcagtgcaaaggataagtatcgagcactaattttggaaatttctaaaggaatgtggattcaaaagtttttaaatgagctaaggataaaactcaaaattcaatcaaattatttcgcgacagtcaagcaacaagcaacatagtgaagaatcctatacaccatgagaacgaaacaatatcgagatagatcgaaatttcatatctgagaaggttaacatgaacttagtggaactaaactatattccatcttgccatcaaattgccgacattcttaccacaactttattgagaagaaattttgatgaatttaattccaagcttggattgtattctatatatatcttttaattcctagccaagggggattgtagttttgtgtaaatttatttatatcttttaatatttttagatgtccttttcttttctaatgaattcctttgttagtatttggcttcgttttatacttacccattatttggtcttgtccaaaaataagagaaaatatacaatttctccaaaaatcaatagttaggtttatcattttctatattgtattttgagcattagtctcttttcaccactacaatgaaaagagttgtttccatttcaaaaaaatcctgtcttatctggatttttgatgtaggaaacttaatggtgggcttactgtaagcattacaacttagttaatctgttatttatttttcgtttgtttggtgatgttagatacaagaagctcct

SEQ ID NO: 8079 - DNA, 5189 bp, Cucumis sativus; identical to SEQ ID NO: 7435
  Intron number 1 from transcript Cucsa.237100.3 (locus Cucs a.237100) derived from phytozome v7.0 (chr-ID scaffold0202 3; pos 124634 to 129822 reverse strand)

SEQ ID NO: 8080 - DNA, 2677 bp, Cucumis sativus
  Intron number 4 from transcript Cucsa.053070.1 (locus Cucs a.053070) derived from phytozome v7.0 (chr-ID scaffold0058 0; pos 3349 to 6025)
ctggtacaacttcattagttcctgcttttattctttgttgtctataaatgtgattcataagacccttttgtccccaggctaactggcatctccctcatgcaaatgctatatatttaaattatgattggttattattatgtatcgtaattctatcagttggtacatgtgtttctatgacatggatgcattgagataggtaattttttcacgacccaaatatatgcgcattcaatttggcagggtatttgaaaatgcagtttcatgttgtatgtttttttttattattataaatatataaaaatgaaacaacccaagggatgagaggaggcttccaatctaacaatatcatgaggctataattacgaaaaggaattttttgtggtttgaacacaactaaggagaagttgttgtacattgttccaaatattttgttagtagcactattttcttacaagattctcttgttcctttccttccacagttccacagcagccacaaaaatttgttcaatctcctttccacacggtttattcaaggaagggcaaaaaggaattgtggctctttctagtgttttggagtgctaattctagttagtttctttggtgaaatgtttttgaactgggaattatacctccttcagtcagtcatgttgatttagtttatatcttttgtttttcacatggagatttggcaatcactctagaagatgtgatgaataacttgtattttgtgggtttgtaaacagtttaccctctcggataggtcagactctctagttgtgttgaattttcttgttgtagctctagagttggttctctgtccttggaaccgtgagttcctaatggatgcttgtcatgcactgtgtcaatttcttgttctatttcagcattgtgtcaggcatagtgttgcacttacttgccatatctttcaattattcgtcattaacttttcttcattgatggccctaagtagtgaagttgtgtacttgactctgataggttcaaatgatattagcatccctcatgcaacatgctgataaacatcgttttggatgttacatctcttgtttgaggtaagctactactgcatccgatgagccttccatccattaatttacgacaatggataacctccatggaaaaaggattcaagcaacaaggcttggcaagagtagaacgtggtaattggttttcaagcatggaaacgtgttgtgatgccaattgtcatgttgtcaaaactcactatttaatttttccatcatgttgtctaagaggtgttcttccttggtcagttttccaacacgagtgtgcagcctctatgccacacggacattttgcaaaacgcaaagcaaggcatggttcgaacagggccaaggcagcacacatgtgggaaataagatgtggccaaacacatacctgcaggtagcaccccaaagccatgaagaatgcaggacaaatgtgtaggtggtctcacacaacagaacatgtaagcacaccatgcatgtaaaaatgtgcagcgtagaaaggtgcacaagtgtgcaagtggcacgtagcgccatgggggcagcataagtagtacataagcaatgtgcatatatgtgcacagcaacgggaggggactgtgggccaaagctcaaggcttctccacggtatttagaatctgaatgtccaaagtgtgatagaggtagatttggaactctagtggaggaggtactctgtaagggaaagcaggtagtcttactcccaaagtttacccaaaagctaggagggaaaattgggcaaagtcttagcaaagtcaaattgagtgagaggatccttttggaggctgtgtaccaactgagggaggaaagtaatcagtttcaaattaactgcaacggagcaggtaatgaaaatattgcatcgtgattctgtcctttttcttctttgttggtatgagtggaaccagtttggtgggagatagccagccaaggggctccgctttgtaggttatggtgggtgttgaagaaagtggctaaggagaattttttcttacagactctatagcggtgggtgagtgctattttattgacccctagggacaaggtactgtgctagacctggtagagaatgtaccaccactgtccaccttccaaaaccaaaagtctgctctgtttgagaagtgaattgataaaacgtggggtaatcataatacccattcttggatctctgtcatctttttggacgtttctttgcatccttcaaattttcagagtcagctaagactgcatcattaagaacgcctttcctgttatctttgataaccggtggcaaggttggagcctctttttctttttcttgacaataaatggggtgagggaattgaacctctaaccttgaggttgatagtacagacactatgccaattgagttgtgcagttgtgctatgctattttgacgtttgagctacaaattttgatattgaacaaactcttatactcataaatacatttgcacaaaacataatatttccttgcaaattagaagaaaaactttaaaattttaatctctttaaatatgtttacatctatcttagacatagctttttgtttgtttgttcgttctttctcggctgtgtcatttgacagttggttcaacttcatgcagggtccggaagcatatttgagacattgagactgggt

SEQ ID NO: 8081 - DNA, 853 bp, Cucumis sativus
  Intron number 1 from transcript Cucsa.365460.3 (locus Cucs a.365460) derived from phytozome v7.0 (chr-ID scaffold0361 1; pos 3259110 to 3259962 reverse strand)
ttcagtaagctcccatttttgcatctgggtttctctttaatcctttaattctttgtgttttgtcttcgaattatctagggttaacttcatttctccattttttttcacctgcaatttgtttgattttttttcaactgtaatttgtttgattttccttcttgctcatggttaaattttgtggagcctgatctatttataatatttttttttttttgaagtaacctttgtgatttagaaggatggatcatgtttgatgatgaaattcttcttttcatttgtttaaatgttacttcaaaaacctctgtgatcatctgaggtccctctttacttctatgcttgaggagccgcaattttcaggcgtccacaaggagagctatacacgtcaccatccattttactaccaattgtttttggagaaatgacggcagaacatcatgaatgacacagaatagcctctattgacaaaaaataattatgttttatgcattggatctcttggtcccatttgaattcacttttgttatttgaacataacaggctaatgccttctcttagagtttaacgttccagtttagcataataaaaagaaaagaaaaaaactcaccattctacaataaactgcagctagctattaagttttacttctgaagttcaagaacattgattggaacttattcaatgtccctcttttaggcgttggcaatttttttgaagtaaatgaagtatttttttatgttctatgattttcctcacccggctatgtcttttaagttttacgttattctctaaacgtattgcataatttttgttttatgcagaagattcaaagacttgcagtcttttgttggaatca

SEQ ID NO: 8082 - DNA, 4781 bp, Cucumis sativus
  Intron number 1 from transcript Cucsa.151390.1 (locus Cucs a.151390) derived from phytozome v7.0 (chr-ID scaffold0111 6; pos 276462 to 281242 reverse strand)
tccgcctcttgtccttcaattcccccggcgttcaggtacttctcatctctactttctctctgcttttttaggaacttccatgtaatttcctcatttcacgcatatccttctctttgttccttttctttcttttttaatcaactcttcgaaattaattttaatgctcttttccttaattctaaatgcacaattatgagtaaaaactagaaaacccttaggtggtcatcctacattgaaaattttcccctatggaaactcgttttatttaatatggtactagagcactgtaattccaaaatgcaacaacagaaacaattcaagaagattgaactcgaaactcactgaccttgagggatctttgctaattagttttcccaagttcaaaaaagaaacaaaaagtgttgtcaaaacctccttgggagataacctttgaattttatggttgtattcgttgtttttttttttagcaaaaactctttttctattttgtccttcttaagtgggtatacttgggagttaaggatttggatggatctgatatggaccgtctgattggtgtatttcattgtttttgttgttttaaaatttcagagaacttttgtgtatatattcatatatacatatttcagaacttttttattttggttagggacagaaattgagttgcaaaaggatttttgtttataattggatgagtatataaatgaagaaagtcgaaaaatagagggaaagcgacaacagtagtttgcatccttttctttcgtttttgctttactttcacgcccatttttccgaacgcattatcacttatttatttatttatttttcctaattgtttcaagttaaagatatccgattagcttccactgaatatcgcttctattggatccagacattgggttcaaattgttttgtgaataatataaaactgaagactgatgtatgttttaggtgcattttttagttccagtttttggtttctaaaaaatagaacaaaaaaacaccaaaatatatccaccttctgaaacaattttgcaaaaaagaaaaagctcataaacctacaacattaaataacaaaaataccccgtaattaagaatttacacacagacaaaaacaatctcgtatccttgtatccagtctaatgaccttgtactccgtctaaacgatcttgatacattatatttccttgtatccaatttaaatgatcttatagcgttgtacccaatctaagcaatcttttagcggtagtggtctatttgtagtaaaaaaaagaataataacggtaattgataataaaaaaagaataagaaaataatattgtgtttatgaaaaaaatgactttaaagaggagagataacgaataaggaataaatgatgaaacgctttttttattttattatatgggtcataaatattttcaattttattctctacttaaattaacgtttataatattataattttatcttgaagatttgatttttatttttagattttaaatttcatttaactgaaaactcagattttaatctttaagaagtgtgaattgaatttttaatttaattttaattaccaatgaaaaagagtaaaataattttttttatattatatagatattgacattcaaaacaagaactaggagtttagtgaaaattggagtttaaaattgtgaatcgaaaattgaaagaaactaaattttcaaaggataaaattataacagtttgaaaactcccttaaaactgaaacaaaagtggatttttaaaataacatttagaaacttatggatcaaatggtaattaaagttaaaacctaaggataaaatagataatgtttatattgctttttggacataggagcttaattttttacattgtaattggatgaaaggttaaagtattatctcaatcgtaacacccaagagattgtgtcgaataattttagaaaaagaaaatgtttttcatctatttttatttaaatattcttttaaaaattccttattttggaacttttttttttttttgaaaagtgtttttatgtgaaagtgtgtttgatttattttatgtttaaagtgtttttatatttttaaattataaaaaaagatttttttttttgtggaggttggaggttggaggtggtcgtcaacattattgtaaagtggtaacaagaagttggtgacaatagtcggtctaaagtcagtcgacaatagtcatcgaaaaacagttgatggcaattggttagtaatggccattgaaaaatggtcgacaaaagttgattgacaatactcaccaaaaaacaagtcgataggcaatggtcaccgagcacgatcaacaaatgtaagccgataatggtcaccaaacaacagtcgaaaaaagttggtctacaaaggtcactgaaaaatggtcgccaatagttggttagcaattgttattgaaaaatgatcgatgaaagttggctgacaatggtcataaaaaatggtcgatgaaagttgacccatgatgttctcaatgctcgtcgaaaagtggttggctaaagttagctgacaacagtcatcgaacaacagtggacgaatgttgggtgacaatgttattgaaaatctgtctacaaaaattggttgataacaatcaccgatatatgcaaatgaatgttcacctacaacagccgtcgaaaattggtcgtcaataataaagggttgatgaaagttggccgacaacgatcattgaaaaatggttgacccgcaagatcatcaaagaacggtcgaaaaatgttggttaacaacaatcattgaaaaactatcaacaaaaatttatcgacaacagtcaccaattaacaatggataaatgttcactagcaacagtcaccaagaaatagttgataaaggttggtcgacaacaattaccaaaaattggtcaacaaagttgaccaacaattgtaactaattttttttaatgaaacttagctggtaacaattactaaaaaatagtcgacaaaagttggttagcaatggtcactaaaaagtggtcaacaaaagttgttaggcaacagataccaaaaaacagtcaatgaaagttggctgacaatggtcacccaaaacgatcaacaaaagtttgatgaaagttagccgacaacgctcatcgtaaaatagtcgacgaaagttggttgacaactgttaccaaaaaatgtttgacaaaagttggtctaccatgattgtctaaacatagtcgacaaaggatgactgatggcaatgtcagaaaacgaagatcgatggttgacggaagtagttgtcagaggttgaccaacaactatcatcgggaaacaattgtcgaatattagcaaagacgatcataaaaaaatggtagccaaaaattgatggacaacgaccacttaaaagtagttatcgaaggttgacccacagtgacaacgaaaaataatagtacacgaaagttgattgttagcggttggcgatggtcgatgatgattgattgtattccaacaaaaataatcagattacggtcataaaaagatgccgtcaaaagtttgttgacaacggttgttgaaaaacaaggacaaaagaatgagtggaggtcgttgtaaaacaatcactgaaagttgacaggtggtggacataaaaaattgttctttagaagttggtcgacaatgattgaaaggaattgttggtggttgacgaaaaaatagtagacaaaacttgaccatcatagttgatgaagaactgtacccagaaaacaatgactagaggttcgtccatgacggtcaaccgtggtcgatagttgttttgctatggttgctaaaaaacagtcacccgaagcttggccgacgacaattattggaaagcagtagtcgaatgttggatagaagtggttgtgggaaaaacgttagacgaatgttgacgatcgcgtgaaaaacgatgctcgaaggtttactgacgacagttgctagatacagtgattggacgttgtccaacaatagtcaacgaagatggttgtcaaaggttggctggcaaggatagctaaagatgacgatcagggtgttttgtccgattagagaaattaacttttctaaaaattgatttgaaaaacacgctaactcattctttttaaaatttattttagatagattccattatttaaaaaagaaaacttatattttaatttaatctctataaaatgtaattgaaacccaccttaaatctctttatagattaatttaggtgttacagtcagtttgagatgatttttagagcaacattctaattcagtttgagatgatttttagagcaacattataattctaattctagaggtcatttcaaatgatctaatttaagtgcttcaagatctacacagagaatcatctttacattgctgatcccaccaaaataaattgtaagaatcacagtttagaaattttagattaatgtatgtatttgttgatgttgcatctagtgtgtgtgtgtatatatatatataatacttaaaaggaaaaacaagaagtgagagaagcaatgctgacagctagttttgaaagtctaaagttgcattatgtatgatgaaaggaactttcggatcgttccctaccccccccccccccccccccatgtgacttttgaatcaaatctctcttcccacctcatttcctattcctttaaccataatattactatattatattgtttataatatcacattcaattatttacattgctcttttctttttgggaaactgtataggtttcagttgattgtgcaattgtgattagtccaag

SEQ ID NO: 8083 - DNA, 6363 bp, Cucumis sativus
  Intron number 3 from transcript Cucsa.149750.1 (locus Cucs a.149750) derived from phytozome v7.0 (chr-ID scaffold0111 0; pos 633934 to 640296 reverse strand)
acccattccaaaacaatctagtacagtacccacacgtaagtgtaactcattttcctgtaagtttcttcattattttcttccttttcttttatgatctcttaatcgaatggtttcttcgtttttcctgtacgtacattagctatgcggggacttggatagcaggggagcctctaggcttttcttggtgaggtgaggaagtgactgagggagaattggagcttttgtttttctttgaaacggagacaaactactttattagtaataacaactcaaagtacaagggagttatacaatgagcgtaataaagaagcctagagagcaataagtgagggaggatcagaaggtgcactcggacatctcaactaggttgacacacccttagcactaaaacaacatatcccaactaaagctagaaaataaaatatgccaaaatacaatggagacatagtccaacctaatgcaaagagctgagacagagaaataaagaaataaaagggaaattgggtgcacacagcagtataaaggctgagcctatagacaaaagcaaaagtttctattgtgtaaactagaccaaaagaaaatgtaggctatgctccaaagaaggccggccagagaggggaaaacaaagctgtcaaaatgcaaaacaaagtaacgaaaacagacagggcctaggggactggttgaaagataaagactgcccagttgagacaaggaacttgagtgtagtaattcacaaactgattgtttagagagcaccaagctagtgcattgcgttcttttcaaagacacaaattgcggaacttccactgaaagagaaatacctaaatctcttctccttttattacattatctccttaccctttttttaaaggttaaactgccaaccaaggtatttccaattgcaacaaaagcaaccttgccaaaatcggacgttgaaattatagctactgaacgcttgttctttgtgaagacattgcaatacttgctattgacagcaattggattaacagtatacaggcatccaagtatgtctacaatttgttcaacgaaaccagagactagaaaatgaagcgatgaaaatctttgcagaatctggttttcgatgatcattactattcctctgaacattgttatccatcgtgcgatgtgctcgagggttattgttcttgctaaagggagcactgctgggttgaggaatagacacactagtcgaagagctttcaatgcgaatgacacgtgtgaaagcatcatctaatgatggaatcttagagtcagagagaatatgtgcctttgccattccaaattcaggtaagagtccattaaaaaagatcataacaaccatcttctttcgtcgagcttgttgaactttaacatcaggactaaaaggtaacaataagccaagctcgacagttattttcttaagccgcataaagtagctggtgatagactcaactttttgttcagcacgaaaaaattgcatacaaacttcaaacattctatgtacttgctatttgcctaaatatagaaaatctaaaaattccagaagttctttaacagtcacaatgatcaaccaatccaattatctcactctcaattgagtttttgatatgaagttcttcggtcgcataaagtagttggtgatttaacagtcagaagttcttcggtcgtatgatcattcatctaagtacttctcaaataaaacaaaattgttcgatgtcaatcctaatatttagatccatttaacttatgttctgtgatcttagaggctaagggaataatgttggagactaccaatttttttatgtcggcaatattgaagtcacacactgattgtagtctacacaaacaaagaaaaagtcaatccaaacaactgcaaaactgaagaagaccctaaaacaatggcgtaatcttcagtttttgtcaaaccccaatactatttgatagacccaacggtatagactgactggaaacaaaggttcgagacaagcctagaagatggaggtcaaatcggagtcctcaagcgctctcgcacgcctgcacgtggatgaagtacagggagatttcggcggcgtgtgaagatcacgcgtggtgtttcccgacgatcggcaaagacaaacttggatggacggaggtggcgcttcttatggtatgggcggtgtcgacaaacagccacatgaaaatgatctaaacttaagccctaatggataacgaagccaccaactacgatattccaaaccctaatggctctgatatcttattcatgtagtgtcagagtaaaattacatatatagagagagagcaaataaaccccactgtatgtacaattacgataaaggacatatattacttttctctgaattattgactacatggtatcagagccattagggtttggaatatcgtagttggtggcttccttatccattagggcttaagtttaggtcattttcgagtggctgtttgtcgacaccgcccaactcataagaagcgccactgccttccgcctcattttgtcatcgccgatcgtcgggaaatgttgtgcgtgagcttcacccaccgtcaaaaaatttctgcacagtctccatgcgttggtgtgagggagtgcatgaagcgtccgatttgatccccgtcttctgggcttgtctcaaatcctattttctggtccgtctgtgcagttgggttcatcaatgattattcgagtttgacgaaaattgaagactaagaactcgttctagggtttgtggctgtttttgttcaattttttcgctgtttggattgatttgttttgcttgtatggactacaatcagcgtgcctctagtatggcctacataaaaaaatttggtagtttctaacgttattcccttagcctctaagatcacagaacataagttaaatggatctaattattataattggcatcagacaattttgttttatttgagaagtactgatatggatgatcatatgaccgaagatcccccagaagatgtaaagaagaagaaagattggtttcgtgaggatgcccgtctatatcttcagatcaaaaactccattgagagtgagataattagattggttgatcactgtgagtctgtaaaagaacttttggaattttagattttctatattcaggtaaaaagcaagtacatataatgttttggggtttgtatgtaattgtttcgtgttgaacaaaaagcagtttgttaccggctactttatgcaccttaagaagataaccgctaagcttgctttgttgttaccctttagtcctgatgttaaagttcaacaagttcaatgagagaaaatagctgttatgatctttttgaatggacttttacctatatttggaatggcgaaggcgcaaatcctctcttactctaagattccatcattagatgatgctttcactcgtgtcctttgcattgaaagctctccgaccaatatgtctattcctcaattcaatagtgctctcattagcaagaacaataacccccaggcacctcgagcgatggatagcaatgtttagaggaatagttatgatcatcgaaaaccagattctgtggagattgtttctaactactatagtaagttaggtcatatgaaacgtgattgttggaaattgttatacaagaatagtcaacgatctcaacatgcttagatagcttctgttagaattagtgggcttgacccttggagtagttttggaaagtactttggaagattttctttatttcttaaatcttttccttttttacttcttgttgtattctatttattcttcctctttgtacctattgtattcattcattagacaaataataaaactaaaataccgtggtttttctcccgattctcgagtttccatgtaagtctcgtcttagtgttaattgttttcaaaatggtatcagagcaagacaataacgaaaccctagaacctaacctaggagaaacccagatcgaatctgaacccaccgccaccgccaggattgctgccgccatggaaaaattgctccaaaacatttaaagaccgttgatctacccaatgggagcagcctcgcagccatatgtgtctccttctgagcagaatatgcttcacatgcagatcctgtccggcgcatggtcccatgtcttcccctacagtggatcattgggctgcagtagagcagattttgtgttatttgaaagctgcttctggacgtgggatcttatacaaagatcatggacatacgatagttgaatgtttttttgaagctgattgggcgggatctcgagaggataggagatcgacatctggatattatttctttgtaggtagaaacttagtatcatggaagagtacgaaacaaaatgttgtttctcgttcgagtgttgagagctatgacacaatttaagtgcgaaatagtatggattcaccaactattatctgagataggcttcagcattacagtgccagcttaattatggtgtgataatcaagttgtacttcacattgcatctaatccaatatttcatgaacgaactaaacatattgaggtggattgtcgcttcattcgtgagaaaatccagaatgggttgatgtccacaaggtatgtgaagaccggagaacaactgggagatattatgactaaagctttaaatggagcaaggataagctatctgtgcaacaagctggacatgatcgacatatttgctctagcttgagggggagtgtgatggaactcctcttgaccaaaaccgatcaagtaggatcagcctcattacgatagtattaatgccaaaagactaacaaaataacaatgtaaacgaattgaggatacctcaatttggaaacgataggctctcctttgctctccttttctctctaggaaaagcctgagtttacccacaaaattctaactaactttctctctccataacaaactcctatttatactctattatttattacggaaatatctactaacaatattaaagctattaaagctattctccctggcacgtgcggttatccttgcttcttcttccttctactgtactggtgtataattgggggtctatcagagtgttaggatatatatttataatatatgtcatttatcacaattgaacatacaatagggtttatttattctctctatatatatgtaactttactcttgactttacatgaataagatatatacttttctttgaatcattgagtgcaatatcaaaacttataactatagcccacaagcttaaacttttgagttgatgggtgatttaggaaagacaacgtttcgtcttttggaaaataacaattgaaggattgattttggagatggtgcttttgatgagggttctcttcttccaatatccgagacccatgacattccaagttagaataatcattaagaagtacgagccctttgagagtagaggcctgcccttttcttcctttgaagatgtagatttgagcttcttagtttcacaaataacttgggactgcttcaccaagagtttattctttttctttataagccagaatagccataatatacagactgcattttcccaaccatagagcagtacctttcaagtttcaaatgtggtttatgagaaggaaagaagaacggtcgcggtggctgtatggatgaggtccaacaaggcgtatcaaggagtacaattgtaaaatcactagctggcgacatcaaggagagagagtgagagttgagggattggtagagggttgtccttgatgttggttctaacgacaaagagacaattggagacaatatgcttctttttgggtatgaagatggtaggttgttgatcaattgacattggtatttgtgaaagttgaagaatagggagggtttggaaggatggatagggaactgggggagggtgagcttggagagaggtagtgataaggacatggattgtttctttgttttgttttgtttttcttaaacaaaccatgtccttaacattacgtctatttggataatttttttaaacattccatgtcctacttttagtggacttctaattttattagaatattcttctttatgatagtttttctttttctttctctcacttctttctttcctttcactctccctgttttactcttttcctgtactagtgtcttttacattatctaaaggtggattgtgatgtagatgcacgtggtctaagttcacgttattatgaaatttttttattacaaatctactcagttgaaccttttcttttcatttttacatgaactttctttggtccccctctttttggtattgttatatactcttttcatgtatcttgcacctgatttaaagttggattatgtgtagaggcacctgctgtgagtttccgta

SEQ ID NO: 8084 - DNA, 411 bp, Cucumis sativus
  Intron number 1 from transcript Cucsa.161010.1 (locus Cucs a.161010) derived from phytozome v7.0 (chr-ID scaffold0114 4; pos 1072572 to 1072982)
tactcaaggtctcttacttctctctcgattaacctttgtgtagtttcttagaatttggagttcgtgtttaagcagtggagactcggtgttagcgcgatggattcgatcttctttagctgctgtgtaaaaatactaactcgtcactggttaatttgtaggaagaattagatagaatatgcctccatgttttgtttcattataatgagattttcttttttttttttttttgagaaattcctaatttatttattgttgggcattcgttcttatgatcgtttttctcacttttatcttcttttagatttggcttattgagatgcttttgtagataattaatcgcatcatcttttgtgccttacattagttagcgtttgtataatttttcagaaggcgttcgtgctggtttcaaga

SEQ ID NO: 8085 - DNA, 3120 bp, Cucumis sativus
  Intron number 14 from transcript Cucsa.127010.1 (locus Cuc sa.127010) derived from phytozome v7.0 (chr-ID scaffold010 17; pos 818676 to 821795)
agggctggaagaattcgacctgggaagtgttacaggtcttcatcattgctattaagtactaactactgttatattgatattgacctactataattaatttgaatttattggcatcaatgaagttatgttttttatttgctcttgttggtattaagttgacagtcaagaacatgaaaccttggcagcactcttgcaactattaaaatggagttaacaattcgtctctcccataggaagagttcataccattcaatttttatacacttgaaaaagttctcgttgatcgggctgttttgctgtatcctttgttgaaaagcagaggaagccctagattatatcatatgaagctacgagtatgtagagttctgagtctgtcaagacttgcttttttgctatatttggtatctagattgttaggcacatgaaatgcaggggatgattgaagagttcttttgtcacctcattttcgagataaagggaggcttctttggctagttggaatctgtgctattctgttgggtctttggggaaagaaacaataaaacctttaaagggttagaggttctgagtttctctttgggtgtggatgaaattattctataactaatacgtttgatgttattgttctttattggagtctcttccttgagtaggctcattttctttggacgtcctcgttttcattccttctcaatgaaagttaagtcctttaggaaaatagaagagaaggaaaatacctttttggtgtccctagttttcatttgatctctatgtttgacacttttacccatgtgttttgagtttaatttctatttgttcccaaagttttaacctgtttcactttacccttgagtttataattttattttcatttggtttctaggattcaattcaagatttacattttctatttgaacttttcacaaaatacacttgcagtccttattccttagttcttagtgttaatgtcaattaattaatttaaaagaattaaattattttcactaatttttcatcacagttaaaattaactaaataaaactgtatcttaatagttttaattaatcaactaaaagtgcgttttactgtgaaacttgaaggtaaaattgtgaaatattgaaagctagggaccaaatgaaaactaaacccaaaacacataggtcaaagtgtaacattttgaaatctagagaccaaatcaaattgaaactcaaaacacagagataaaagtgtaatattttgaaacatgagaaccaaatggaagctagactcaaaacctgagaatcaaaacgacatctttcccaaatgatgaagaaaataaattctctccctgataaatttcgtcgagatgctaggaaatgtcctaagaaaactgaattctatctcttagctgaaattttaaaagtaatcttgtaaacaagtcatagggcttataggtatcaaattttctgttgtatgaggtttgatttttattggaatttggtttataaagttttcttgaatgtaggagttatgaatgctttgatggaaaatgcctttgacactcgaagtgtcttcagtaatggttttgaaagttttcttattagaagatttagtagtactagtagtagtagtaggtagtaattgggaatgttttagagaatttgttagagcctacctcgtagacatttaaagctggctttctttagtaaaaatatcaagagcctacctcgtattctagttgcagaagtgatccttagttttttctactgaagaaaaaaaacagctgtcctacagaggagtcataagaaactagaaaggacaccaatctaaaagaaagaaaggggctccaatttaaaagaatcaaacaaagctaataattgcaaaaagcccgaatggtagaaatttagtacgagacattgtatttaagacttccacaacccaactcaagatcctcaacgcctctaaaagctctactatttttcttgagccaaacacccaatacatgcaaatcaacaagcttgccaacaaacattgcacatatcccgaaggaaggcttgggggtggtgattccagcatgaaatgataatattgtttcttgctaacaagacccaaactgctccaagaccaaccccctaacaaatgagtgaactgggagctacgtagaagatgttctaaatccttttcctagagtcaaagaactacttaatgccaagggagagatactcaaaagggataatagagttgacacctctatcatctccttattgaaaaggaggaggatttccttgagacagatatcatggatgccacaggatgagtagaatgcaaccttttatcaaacaaatgatacaaatggaggaataaggtgcaaagaggtttatctcccacccatcggtccaaaacttttctactaaatttaatgccactgccaattgcaaacattggacataattttcttagacagattcacttctataccgacaaacctcgagaaaatcttagcatcttcaggaaattgcaatatttctcctcttttcttgtcctttaagtgcagacgattggtttgaatttaacatcttgtccgggagcctttgaggagactattttgtttaataggggcaaccaacgagaaatttgggaaaaggaccccttttattacactgtgatagaatcatatgaaagtcatagttgattgtcataattgatgaccgttaatattctgattaggaaaaatttctgcattatgctgtcaattgaactaaagtaagcataattctgatcactgttttttctgcttaaccatgatttaccacttacagttttcttctgaaaagttactactaaaagtggcacgtcaagcttattttagttgatctttctgccttttattgtttttccaatctcccatttttcttaaattattactgatcctcctttaaacacttcacagttgcataattggattcatcgacttattggtttcttatgcaccatttttgaagaataatatgacattttctgcatgcatggaactaaaattattgtaatgctaccaagcacacttgtccggtctgtttcactttactcattcaactttttatgtggcttcaagcagactgtatacagaagaatatttcatta

SEQ ID NO: 8086 - DNA, 2004 bp, Cucumis sativus
  Intron number 1 from transcript Cucsa.363880.1 (locus Cucs a.363880) derived from phytozome v7.0 (chr-ID scaffold0361 1; pos 1462703 to 1464706 reverse strand)
gaaggtccatttcatttccccatcctttttttttcttctttttctttgattctgttgtggttgcttaaatttgaacgggatttattcttgtttgttcgttatgatatttctgaagcactaaaaagaagaaataagttttgagaatacaagcataaaattttaatttttaagagagagtactaaaagtgaaatggttattaaattgtatatgtttaaccatcaggtcaaaggcttttcttgatttgtagaagtaagctacactgtggtgtcaacttccataaggcttcaaaaacttatttgactagtccccagttaatttttgcttgtagttgcaagttttgattatgttcaagtgccaaaactccatttctttcttttatctttatggataaccaattcatttcaaatagagtcgtttgcaacactttctctgtttgagcattcatggtttgcatctgattgagttaaaaacagtccctatgtgtacctttgtttcgttccataatgtactgggtgtcatagttgtcagtagggatttacacgggatgaggtggctttcgaagatgtccaacccaactcttaaaattcgagttgggttggtgatatggaaacctatgatttgaaaattaggaacccacctctattataaattcgagttaatttaaaacctcaattcaaagatgatatgaactggtatgtctttgtgttgcctcgggaccaatcacacgtttcagaactaagaaaatacagttagcattacgttcaagatcaggaagtgcactcaattgaggagagaagattataatcggaatcagttgacgctagaagatgaaaccaattgacctttgacatctcatgactttaagactgttgtgcaagtcttttatttggatttgaggatgaatccttcaaaagtaggaggaggggttgatatgaaccgaaacatcaaattattggtgaacctctgatagcaaattccaaatgatatgaagaccctatcactagaggatttgaaaaccttaatatttgaaaattagaaactcaatcagtgaacctcaatatcatattctaaaatcccaaatcaatttgacaacaatccaaaggaaaggactagaattgaattaccttttgatcgaaaatcaaaaaataaggagaactagttcactcaaggtgatcaaacttaaaaaaggtggtgataagactatcatcaatttctattcatagaaaagctctaaaacttcaattgtcgaaactaacttgaaaaacctaaaggcaagacttaaatatcctcccaataaaatcctaatttattgtgaaagggctaaattaaccctacttaaatgttattaaaaaaataaaactgaaaaatatttaaattgcatcacaatttttaaataaaatctaagcgataatttgatgtttggtcgattcatattagttgcattgggttagtttgtcaaattcttattaatttaaaatacttgattttatcggccacacatgaataataattaaaatcttgtaaaacttaaatgtttaatatcaaatatccatgatatctatcctaaactaaactttggacaaaggcgaacaacgtaactattctaaaagaaaaacattgaaaattcacaattatccatccatagtcagtcaaacataaaacaaaagtcaaatattagtacgtggttgggttgggttgggtcaacacaaaagttaataaataaaagtattaatcgagatccaatccaaacagacgaaaacagaaaaaattaacttaacccaactccagaacaaaagtaatgcaaccctatccaacaaatagaaaatctttaacccaaccataaaagtaacacaacccaacacttactgggttaggttgtttgggttgtctagtcatttcaatacctttagttgctatactatcagatatcagttgttccgtttactgttaatgggtgatacctcactactttccttggttgttttttactaaacaggtgggct

SEQ ID NO: 8087 - DNA, 1652 bp, Cucumis sativus
  Intron number 12 from transcript Cucsa.218140.1 (locus Cuc sa.218140) derived from phytozome v7.0 (chr-ID scaffold016 58; pos 308711 to 310362)
aagtggacaggtgcattcttttcaattggaaacatagatatttgatactataactcgcccttttgtaatttcataccatcaatcaaattttgtttggttttttcacataaaataataataataataacaacttgcatgttgggttacacgggtgaaactggttttatttaacaaatacgaagacctcaaatctctgaatttcattgctcctacatactagccaatggacctgaaaaggcacaatgaaacaatgagggacgggatatacaatttacaaagaaagaaaagaaattaaatttttaaacaacaaatgtcactaagaaaaaaaatggaagaatacagccatacaggacatataaaaaaccatgaccacagaaaaggcccataggaagggtctccaactaacaaaaatgttacctattaaataattttaaaaaacttcaaatatatgtgactagcctgtctatgctaataggaatctgtagattgcagttgaaattgatagaaaatttattaaaagaggaaagaagatctacaatatccttgagaggcctggacttcgcggcaaaaaccaatctccaaattctgactatccccacaatttggaggagtgcaaaggaatccttaggaaatttggtccctcatttgttttcatgtttctctgtaggctttgatttcaaaaactttttgtaagtattctatagacattatttcacatagttggagtcctttttggtaaaggaagttcccatttttgtaggcttttttttttctcaatgaggtcgaacggctgtgatcagtggcggatccagaaaatttattgacagggggcttcgagttgtaacttagaggaaaaataaaaatctggaaaaaaaactacataagtaagacttgaactttgattggaaggagggctgacacatagttatcactaaactgtctacaaatattaagtaataattgattttgtttatacatattatataaaaacaataaagttgaggagccccatctgggcctatactaaatccgcaggtggctgtgatggaccaatgtattatcctcattgtttctttcatttttctcaacgaaaattgttttcataaaaaaatgacggatttgcccctctatggaaatatcgtttatagttggactccatttctttagaggggtttggttttctgtatgagtattctcttgtgttcttttcttttttccttgatgaacgccgttgtttctttaaaaaaatgacatgtgcgcatctagtattctagtgacatccttttttatagaaagaaaaaagagaagagaaacagttacctgattcaactaatagcatccttaatattggactaatattccttacatgtgcactatgctaaaattttattgaaacaatttaaaatttgatagtatggggtttcatctcaaaaccaattgacaattagaagagtagcccatctatcttatatgaagtatgagtccccttggttttttcaatgtgggactctcaacttctccaataatttattcatttcattttgaaaaaataaataaaagtagatttgaaaaactttaagccccggatcaagatgcttgttcattttcttcttatttgtaacttaagatacatttttttcctttttatcagc

SEQ ID NO: 8088 - DNA, 6458 bp, Cucumis sativus
  Intron number 4 from transcript Cucsa.266240.1 (locus Cucs a.266240) derived from phytozome v7.0 (chr-ID scaffold0235 2; pos 751092 to 757549 reverse strand)
cctttggttcttggacttgaaaaaatcaacccaaggtatgttttaattgtttactggccttgtattttttaatactttgggcttgactttcattttaataacagtgcaattagattctcgttcaagatgcagtaggtttagccttagcagctacagttttttccaaataattggctttagcagttttgttgaaaattattactgttgattagaagtactaaaaattgacgctctaggtttggaaatggttgatgtatcaagctcttttaagtctagcagtgctttatggtgggagggtttgtgggtaagggtgggtgggagaatttgtgggtaaggatttgtatggatgaggctaaaacccatcttaagaagcacaagtacaaacactttagtttgactagggtgtctgtgtctgatgcttgttgggcacatcttagacatttgctggttcaatagatgccgtagacgctagttgtacaaagagagagtagatccaacatttgtttgacatgcatcaaacactagttaagtatgctattattactgttattttttaggagatgtgtaaagtatccttttttgttattattattttattttatatcaaaccacttgttaagtatactaaatgaaagcacatatgataacaattattttgagtgcaaaatacaacaaactatgaccaattttctaagcatagaaatgcactgactttagattcttttccccatcaataaaaactgaaaatggtgaaatgttgacttttgaggagaacccaggcccagggtacaaaatgcagctgaaaattcaaataatgggggaacaattcttctctaagagaggtagattcatcttagcgtagacagttcgtactagtggttcaattgttacttatatgtgtttaaagtcacttgtgacaaaaggtttgatgaaatttaggttgttagtttgatggattcagatatataggaaaagggatcgtgaagggaattgactatgaattaccttgttttggaactaggtttataaagaagggcatgtgacctatccccactgatcttttgtcgataggagggtatttcacatcctccaatttacatgggttttctccatttcctttaaagatgtgctgattgtgatgggaaaaatgtggtctagtgaattttttgcttcttaataggtcaaacgtagggctggagaacttttggttgcttcttgccattaatgttgaattagctaggaattcattaagagcttgatacaatcgttttgctcttgcaatgagctcaactgtcaatttcttctgtctgctggttgagatcgttgctaatatgaatacgatttagaagatcaaaatgtattagaacaactctttaaggacctcgaaagtaatttggaaatgatgttaggccacaagtttgtaataggctttcaatatttagcaagaattacttttcgccgtagagcatcctcttcatgataatatttccatatctgtttggccaacaaaaccctgttttctcttttcttctttcaaactttgaagccctaggttaccataaggaatggatctagtgacttcttcccaattaacaagatgtggcagagctcccctcccaaagaatcttttggtacagtaagaggggaggtaaaggtttgtgacttgtgagagtagcttgtggacgagtaaatcgacccccttagtagaatattaatgaccccaagcgaagagtcttctttcatcttctcaaaagaacgataggagtctagaaagccatagtactccttaccaaataaaggaagaccaaggtaaatatttggccattgaccacaattaaaaatattttctttgagcttagcttcttcatcatcaggttttaatcccaatgatttcctgtttttgatgattaacattcaatccagaagcctgttcaacagcctcaatgtggcttaatgattcttaatggctagaaaggttcctgggtcaacaatgaagtggataatgaagagcaagcacatcattttggcttgatagatggttgacttatgaaacattgggctgctttttatcccctggattactccctctccttgcacaaaaattcctttatccaggacacttctggtgatcatggtggctggaatttattttttaggcgaaatctttctgatgaggaattggaggaaggacttaatatcatgaatttgttgaataatatccaattgacacaatccagggactattgggcatggaagttgactacaaaagccatactttctattaagtctgctggttgaccttaatggcagtgcacggtgatggtagacgacctacatggaatgatggaagcaatctaatctgattttacttgaagacaatcaaaattttccttcgggagcttatccactatgccataaatactcttgatagaatgcaacactgtgcctcatacatggttttgtccgtcactttgaatcatatgtaaattagtaaagctgtccagaggttcaaagtcacttgtccccacaattttggcatcatctgtaaatctttagaactgtccagagactcaaagtcacttgttcatcagctgtcagtttgccactagtgtttggaaagatttgattgctacatcaatttggcaccttattattctgaatgacattaattgtttacttaacaaggaagggaaaagaattctttggatggatctcattttcggaaatgcactttcctttataggtcatattctctcacctttcttttgaccaagtcgagagatcttttgtaactccttctattgattatttacttttttgtattatattgtattgtattggtttttattgaaaagaagaagacgaacacaaggtgtatgtggaaatccctagtatagggagaaaaaccacgataggagccattcttactattttctagtaaccaaaagagtacaagagggaagaatatatataggttataataagccttaacaaaaaaggaaataaaactagggtacaataagttacacaaatacctttggggctataaacaaacccttagcccctaattttcaacactccctcaagttggagcgtagatgtcaattagacccaacttgctaacacagtagtcaaagctctgcctgagtaaccctttgatgtggacataagcaatttgttgactagaaggaatgtatgggatacaaatgctaccattgtcaagtttctcctttataaaatgtctgtctatcttcacatgtttcgttctctcacgttgagctgggttgttggctatgctcaagcagctttattgtcatagaagagctttatcgtcatagaagagctttatcttcatagaagagctttatcggtaactcacagttaggtgaagatcagacaaaaatttctgcagccagatctcttcacagattcccaaactcatagctctgtattcggcttcaacactactcctaacaacaataccctacttcttactcttccaagtaacaagattaccctacacaaaggtacaggatctcgaagtgtcctttcgttagtaatcgatcctacccaatcagagtcggtataagccttaatacattttctataagtttttcagaacatcaagcctttacttggagtagtttttaagtatctcgaaatgcgattcacagcttccatgtgttcttcgtagggtgcttgtataaactaactaacagtactaattacataggagatctggtcttgtgtgggttagataaatcaactttcccactgaacgctgatacttctctttgtcaatagaactttgtcactaggattttttggtttcgcattgaattccataagggtatcaacagttttgcatctagtcatacctgtttcctttaacaagtcaagagtatacttcctttgtgaaacagagatcccttccctcgatcgtgccacctccatcctaaggaagtacttcaaaatttcttggtccttgatttcaaactcgttacccattttcgtttttagcctggtaatctcaacaggatcatctcctgacaagatagtatcatcgacattcacaatcaacacaacaactttctcagattcttactttttgtaaacaacgtatgatcaggatgttccagagagaagccttgagatttaacaaaggtgggttttggccattcaatttcttccgtccaattactcctatggagccagataaatcatttatagaagttaaggtaggggaaaaggttaccgggatatattggtaagactgaaggagtggtcgtatttgtggagtatgtggaagcacctagaactgccctaagagcaacgattggttgctgaaaacttgtttgaagattagccaaatgttattgtaccattgctggagataaaccaacctaaccttaatgttcataactaggcgacatatgatgaggaaaacccggttgttgcgataaacttgttgtcgcgtagggaatttacctttatggtaggcagacgactcactaatctcgttttcatggtgtatgtttcggctagggtttccatcaaagggtgtggtggcactagagttgcatggatatgcaaggattgaagataactatcaatggcagcttggacagcagaggcagtatcggcagtgggaaaaatcacagctccggtgactgaactcactctgtcgttgcctggttgggggcgacagttgtggctaaggcgaggctggtgctaaactaaggttatgttgcactggttgcttttcaccaataaatggtggctagagtttcatcaccatgccctaataccatattgaaaagaagtgaaaagccttagtacaaggagaaaaaaccacgataggagccactcttattactttctaataaccaaaagagtacaaaagggaagaatatgtataggctataataagccctaacaaaaaaggaaataaaactagggtacattatattgcacaaatacgtgtgggactataaacacaccactagctcctaatttccaatgcttgtattatatttgccaaaattattttttttgtatctgtaatgggttgttctatttaagaaaaccctcctctttgtgaaacatatagaaaattacatatttttggcctgatatgagtagaaggttcttgaaaccctaaaaaagctctaattttttgaaaacctaaaaaccctaaaattcttacagcccgctgctaccgcctacgtgctctgtcaccttgagggttatcatcgtcagtgtagacactgatcgatcgtcaccaccaaccacccctcgttagactccaccgacagctgcggtttttggctataagttggtgtttttttttctttgtcgccgttcgtcgtggtcctcaccagtctcccctttttgtgttgtccgtaaccgctgacgacttttgtttgtgttttagatctattctcttcgtgtttttacctttattgcttctgccatgtcgaatactaagttactatggctaaagtcgacaatcatatccattccaatttccccaccatctaaatcaccacgatctgacttaatggaaacaattttcttcattggtcaaagtgtcagacaatccagttaacatacgttctcctcctacttctaattctcccagttcttctcataattccttccctgatgtctttgaccttgatattccaattgcccgtaggaaaggtacccatagttgtgtcaaatatccaattgcaaactttcttatcatagattgtctgatagtcgtaaagcctttacatccaaaataaccaacctgtttgttccaaggaatatacatgaaaccatgaatgatttgaattggaaattagcattgatggaagagataaatgctctgaaacaaaattgaacatgggatataattgaactaccaaaagataagaaaacagttggatgcaagttggtgtgggtgttcacggtgaaatgtaaagctgatggtagtgttgaaaggtagaaggcctgattggttactaagagctttacacagacctatggagttgattatcaagaaacatttgctcctgatgttaaaaatgcttctcaatggggagtttgtagaagaggtgtttatggacttgtctcctggttttgtagtgggttatttctctatttaagaaaacccttctctctttgtgaaatatacataaaattacattttttggcacctttcgtaaatttcatgcatcaatgaagttttgtttatatataaatcttttactgattttcataaagatgtatttatgaattatgcgttgagtaactcatatgctaaaatatagcagcttcacctaactattgcaagggcttacctgttgtatccatagtttgactagtagaaattgagcttagaaatttatgctcaacatatttattcaatttttgaaggtacatcccatcattgcgaacaacatttacctttc

SEQ ID NO: 8089 - DNA, 901 bp, Cucumis sativus
  Intron number 2 from transcript Cucsa.144350.1 (locus Cucs a.144350) derived from phytozome v7.0 (chr-ID scaffold0108 0; pos 774418 to 775318 reverse strand)
gagtagcagtaaataacactgttgtctggtttcaggtttgctccatcaggttacatatattttttttcatttattttttataatgagaaatgtaattaaaagaacaatcggatgtacaaaaataaaaatcccactaaaaggagccaaactacaagaaagggcttaatcaagataaataagatctaacgaatattgtttttcattaaggatcattgacacattttttttaataacgttttatccttcctttagattaaatatttcaaaagatttgcaatacatgctcacgtttttgcaaaagttatgtggttactaaagaagaattctttctagctctatctggttgttttacaatgaaagacattattcacattcattcttttcatattcgacccaatgttacaaccctagatttgagggagaagatttaacaaataaggtaacaaagcctgaggtaggaccgtaggaggacaaaatatctgttgtggcaggaaacaactgatgaaagatacaaatttatgtaggaagaataaagacagatgaatgtgagcttggtccatgagggtttggatcaattgttgggttgtttccaacattttttatcttttactttgtccagcatattcttagtgtgttaagaagactagatgtcatttcctttgatctatacatttgcagtttctttgtgtgcgttagcaacttgtatatgcacctattatatatatataatgaattgatatgagaaagatacactcaatcacccaacgtataataactctagcgatattcttataatttttagcctgattttggaaatctattctatgattttccatgtgtttttgtgattagtttttttttttgaactttatgatatcttttatgcttttatggagcagct

SEQ ID NO: 8090 - DNA, 2727 bp, Cucumis sativus
  Intron number 11 from transcript Cucsa.032980.1 (locus Cuc sa.032980) derived from phytozome v7.0 (chr-ID scaffold004 29; pos 2250416 to 2253142)
gcgtatcatatatttgggtaggttccttttcactttgttagctcctttaaagatgtctctctctctccccttcatttttctgaaaagaaacttggttactatagcctaaaactaataaccagagaaatttggagaagatttctaatcctggttattggagacctcagaaagggtctctaattttgttatatttcaggatagaactaaagagatctttgatgtccaaaaataaacaacagaaaattatttgacgtcatacacttgggacacttaaatatttctaggattcttctatttctcttctcaaatgtcccaaacacttttttactctcgagtcagtggttaacgaggtccttccatatggatgaagataatgagataaatgctgaagttggctcatatcttcctttgccacctcgcacaaatcatatctcaaggacatgaatgtgcgtttctgtatgttctgactaattatctgtcacttttgcttctgttcaccatttcttagatgaggttggatctattgttgatattttggtatataagtgggtgaagattattttcgtgtttaatgatcattgtttggtgcttctgaaagtagcatcaaacttcttttaggagaagcgcaagaaaagatatgtgtaactactaagtgtttgtacttaggaagacgtacccaactcatatagtgagttggttggtcagtagcactgacttctatggtcagttggccattagttgcagggaggagaacaagaagagatgcgtagggaagggaagagggcatggaggatgaaaaagatataagatgacttgtcactatacagatgttaaatgaaaagcacatgcaaatattgtaactgcaaaatactaataacaagagagcaagtaaagtcacgtagaagttggtaacctagtttagtgaaatccacctacgtctgaagtgcagcatgcctagacaagataatccactagtatagagtcaaacaattacaacttggtacttatttgcaatacaataactactacaactactcatgtagagcccactcgcagatcacctagatttcccctagatgtgagatttcctctcaatgaacttaggttccccctaagtataggaatattagtgaatgatcacttagactcccctcaatgtgggactccctctcactaagactgttatttttcctccaaatgaagaccactccacttgatgaacttaggcctccattgagtttgataaacccttctcaagttgatgaagaacaaatcaacaagatctagagaattactcaagattgacaatgacaaaagctttactatctaatgaaatgacatacttgtgttcttcggcacaaacacagcacaatgacaagaatattcttaaaaaacgatctaccctaaaattgaacaagacactatatctttgtgtatgaatgtatatgagtagctttgagaatatctttttgggaagaataaatcaactctaaggaaaaatacaacatatcacgaaatctaggaaatactattgatagacaaggaaaaaatctttgcagaatctactgcctttcacgttacagatgtcattgaaaaagttataacatcttgtgagacatgttatagaaacatgttcaagtgttgcctgtaataaataaggcaactatattgcaataacaccctagcaaaggacatggtagtagagtagtggcatgtttgaaaccaattttagagtgactaaaatcacttttgacatgtcgaaaatctttctttttgtctaatggtttttaactctagtttttttctcaattaattttttactctttctctaatgttttgctcttgattttttctgcctcactcttaaatttttctctctttgaagttattctccaaatttttttatatctttctaactttattttactatcttcacatttttatcgtctactaaatttcttgtcagactaacatttattattacttttgaaaattttctctagctctctattttgtttctttaaactttcatatttctctcaataaaattctctgcctctaatttctagtgatttgatgattctagaactatctttggaaactaacattaatcacttaaaaatattttaaattgaattaaaattatatatataagtatggaactttaacatgatttgtcacacttttacaaaactaattatattaaattattcagctcaaaataccgattccaaaagttaatctcaaacattcccttcaagtcattgtaaaaaaaataaaataaagcaaaataagaccaaaaaaaaaagaaaaaaaaacattgaaaataactcttaaaaagcttagaacaaacattctatgttaataagaaaatcacttgtgaataattaaaatttgttaaaatcactttctaaaaacactccgaagtatgtctttaaagtcctacaatttgtaaataaatacaattaattgttctagagttggtgatctatgttaatactttttatttatgcaattggatggtgttgagtgtcacttttaaaattgctgtcctgtaattttgtaacttctttttgacctgatatatttttctttcgttttgaactgcagttaagctgcatcatggttttgttatgatattgtttttttctttttaatttctatttacgttcaattttcttcgtgacgtgctgattagttgattacatttcttctctccatacagaa

SEQ ID NO: 8091 - DNA, 3260 bp, Cucumis sativus
  Intron number 10 from transcript Cucsa.340590.1 (locus Cuc sa.340590) derived from phytozome v7.0 (chr-ID scaffold033 56; pos 2978760 to 2982019 reverse strand)
tttcttcacaacagcaaagttcacttctacagcaggttctcttgttcaaaattctgagctctctttcttcaatcttcatttcacgtttggcaattatttgtttaaaaacggtgccctttctgcaactcctttgtaactttttttcctcacaaggatataagacttttatcaaggaaatgaaaagagactaatgctctaaaatgcaaaaataatagagaacaaaggacaatcataaaagaacaacagcaaacaaaaagtaacggtaaaaaagctaaacaaaacacaaaacatgagaaataaaacatctcagtttcaacatacatctttcactgaagaaccaccaaatagctttttttttttggaaaaaaggaaacaagtccctttacgaatagtactctctactactcaaagtacaagatacaatgaacagaaaatgaagagcctaaggatcaggtggcacttccgggcatctccgttaggttgacacccccttagcgctctaatcacatccagaataagctacgaaaaataatgaacacaaagatcttttcagctgtttcctttcaagaaggtacgttgtaatagcaaaaaaatgaagaaaataagaaaaaaaacagcaccaacagactaatgctggaaaaaggctctccaattacctgcactgagtcatctgcgtccttagataaggcacaccgctgagaggcgttgaaatttgattctagctgcttctacacagtttgaccaagtggatgactctgatgaaagacctgctgattttgctcgaaccactgctcagaaaggtgagcttttacagcattgagccaaagtaaattggcttgtttcttcaattttacacccgacaagacctgctgcacattgttcagaaaagaattatcaaacacccatgacaatctactgattgcaaaaggctctaaccaacaattactcccaagggtacagtttaaaaacaaatgtggtgaatgctgccaaacacaaggggcaaactgaggaagacaagtagtgggtaggcagcttgtgttgaatcatttcagcactgttcagaacttcaaaaatcataatccatgccacattattcacccttctcggactcatggacttccatagggctttttccagctctttaaccaaaaagactctgcaggactctagggaccaagtccttttaccaggctgtccaactcctttaacctccaaaacaactcaaataagctttgaagctcaacaatcttctcttccttaagtgatcttcggaataatggagttcatgaagagcaaaataatgtaccaatggtcaccacctagctttatgattagttgaatccaatctctattgataagatagataagaactttgggtttctctctggtttcttttaaactataattcagaaagaacttcaactatgttgaaatatctagatgcatctcaagatcataagatcttaagttggaaggctctctatatttaagcattagtttcatttcattttatgaacgaaatgtttgtttcccctaaaaaaaaactatgttgattcaaagaagattttccataggagtcattgtagggccaaccaaaatttgtgtatattatctcacattatttgaaaaagcccacttaatgttgaataacatgagaatcttgccccagcaagaataagaataagaacgctaaaaaagatatgattgagagattctcctgtcttatatctataaggaaaatcgacagaagaaaacatagataaggagtctttctttccaaattttcagccgaattagggttaccattgagcagaatccatatgagaatgttggtcttttttggacatttaaacttcccaatgaagaattcaaacgatcatccaaaggagaagaagactccaaatatctggacaaagacttcactgagaatttgtccgatggttcacttcaagagacaaatttctagaatcaacattcagagtaatcaaggagatgagcaattgagcattaacagattctgggaatcaataatttcttcttcctttaacaaacatctgaaggagaaaccccatgacaatgttgaagagccccaaaaggcagagactggaccttcttcattcaatgataatacaaacaaacgagggaaaaaccttaagagggtaattgttgatccaaggatcaattcagaaattgagtcctttgtccatttcctaaattgaagagcttcaacttttcacctttcctccaagtttaagagatcctcacccatggacttttaaggcttaaattatttctgccacacatgtaccaaataaaaacgtgaggaccatgaatgcttaatgctcacaattacttttctccaaatggaatgaggttcttgaatgagccccatccttttgagataagggctaaatttctgaagtttagtgttttttccaattgcattctgatgtggttgtgttagtgttgcttgtgaaattcttcattttataactgctaaaagtaaggccttctgccttcatgtgaggcagtagcctgatgactcatcaaaggtggtacattttccgtgttgtgaagaaagtatctggagcttaagtgctcgcttaaagaactggtatgtgaaaccagaagttcaaagaaaacaaatcaacattaaggagcttgttgttcgtaaattaaataatctgacttactagttcttttttctttaaaaaattgagaacaactttgagaaaatacacgggaggcccactaaagaaatgggctctaattgtgctaaatagtatctaattataaaacaatagaaattagaatactaaaaattcagattaaaaaaaaacatgaaaggatagggaccaaataaactgacttggctacttgagcatagacaactggttaagtcattatatgaaccaagaggtcaaagattcaaatccaatccacaactctacttattgaactaaactgaacaagcttaccattgtgttacaccataatacaattggaaccttttcttgattgttctgtggaatctttcttatttgtacatgtttattgtcgataattatggttcactgtctgttcttgctatgatgtttgtctcttgattttctttgaatattctttttccgtttgcttggagcattagtttcttttcaccaattcgatgggaagtttagttgattttcaaaaagaaaaaaagtgatttgtttgctatatttgcagtttaattcccaaaattcatctgttagttctcaagc

SEQ ID NO: 8092 - DNA, 4370 bp, Cucumis sativus
  Intron number 1 from transcript Cucsa.372110.1 (locus Cucs a.372110) derived from phytozome v7.0 (chr-ID scaffold0370 3; pos 301277 to 305646)
caggtgcttgttctataatctgtacctttttttttatgtttttttattcattttctctctgtcttttcgatgcttcttatccttggcctatcgtgaaacttaaattatgtttggatgcattattgctggattgtgattaattagacatggaagggttccttgcccatggtttgaaggtgggtggtactttgtagcatgcagaaattggtatgtcttgattaccacaaagcttaagtgaacctgtgctaaagtgcagtgttggaatggaacaaagatgcttcttcagtgtagggatcctaaataatatagcaattagttatgcgcatgtactcaaaaatttgggcctgatgtaagagtggtgggagtgagacatcattaatatattttatgttgagaaagatgggaagtaggcgaggatttggttgtttgaacgtctaggaagcaggcgcggtttaacgatgtattgagaggtatggtataatgctgcacaggagaaaattattcctagacaagtggtctatcaacataaattctgaagaataattgtattgttttccatataagaataaagccttagagacattcgtgcgtaactcatccatccatgtaattgagttcttttttttttttttggtaagaaaaaaaactttggaggtataccatgtagacttgttcattgagttctccatgaaggaggtagttgtggtcacccaattgaggcattcacttgttaagaatatgccttacagagatacacagctgtcaattttatcgatgggagagtttgatggaggacttgggaatttaaagtctagacatatggctttgttacctagataggagcagtgttttacgaatgaaccacatgcttttcggaggaaagtcattatcacaattcgtggttcttcagttttttattggacttctgcttcaagaactaatttgggtcttcaaagtgcttgaatgaacatctcaaagctttggaagcaatttaatgctcttgctcttttcagattgggtaatgggagaagaattatgttttagaatggtatttggttaggaacttatttccctcggctgcttgctgtattttaatctcctaattgactttttcggatcactgggacgttccaattggtgcttgatttctttcgtcaacacttaatgaagaaatacttgagtttcaatcattaccatcctcagtttcagcagtttctattgattctagaatttggtctcttgaaccttcaagtattttctctatcaaatctttaaccacacgtttcgtatcttctttgccaagggataaagagttgtactcaagagcctttggaatttcaaggccaaaacggataaatattttgatatggattacgttgaattacaaccttattacttcagtccatttgaggacatccgatacaaccttattacttcataggtgttgaaaaagaaaaaattcatgaagtgcttaatggcatcagttcgccagcttttgccttgtgggggagggaacacttcttcatatattcttctatggctcctttgctaatcagatttcggtatgattgctttctattttgaatatccattgaacattcttcaataattttagaaatattgttacttgcttactggaattgtgctacacatcaaagccggattgttttcagtaaatgcagttagaacaattaaactttggttggaaaggaatgagcctatcttccatgataaacttttactggagtttgaatgttttgaattcttgaagtcctctacttggtgttctctttccaaattacctggggggttcttctattcaagtctagtgtttcaaaatgcccaaggctcactaaggcatatttgcctctaaagcctaggcacaaggtacacaaaaaaggtgtgggattttttttcgcatatcaaaaaatatatgtatactatatatatgtttatttacacaatcaaaacatagatggatagaaatgagacttaaaaagaatatacaaaaaacaaaagatagataagatttaaatagtgaaacaacacaaaaacaatcacaaatacaattctagatcctaaagatagaactcatcttcactaaataggtcttgatcttcattcgttccatcattcgacttataaccatccatatcttctttgttggtcttatagtcatccaaattaactggtgtgagggtggtggtttgtggaagatgaagatgaagatgaagcgttagtcttagacttcatttttaaggtaccgacactagaataatatgcaggtttttttgctctagcaactcttaaaatgtcgccccatgttaaagagtcgttatccaaaacaagatcctcctcctcctctgatcgtcaaccattctttcaatcagtcactcattactatcatctatctcttttaaagagatatggtcgaggatgttttgaatgttatgtctgcgtttcagtgctctattatattttatgagtaataaatcatttagacaactttgagcaaatctattccttttcatgctatgaagctacaagtatacataacaaaattttcatttttaacatctagaggcactacaagtaatagagatacctaacctatcaaaaacgctgcaattactttcacatctcaagacaccacaagtgaaacatcaaattctcttagcaaaattttgcaagttttgagttgattgtgtgacgatcccaccattccactaaagatcaaaactatattagtagctttcaattcgaaatgatattcaatgtttaatcaaagacttcaagttcaagttaactggagatattttgtctctgtctaattgctaaaggatgtccaaatagtctttcagctttcttgtatttggttacctctctaaagtggtttgtcttgaatgtccaaggaagcacccattttgttatgcatgtataaaacccgttaacaatttcatcatcaacttgaacatttggatttgaataataaaattttgggtttagataatatctggctacatgcaaaggaggatgcaactgaagcttcccattgttgatcaattactgtaaaaatatttttatacttttcttctttaccattgaaggatttggcgatgacctccttagctctatcacttgtatcccatcccataacaggccttttcttgctatccactgagtacttgaactaaagggccggatactttaagagcaaaaacaatggtattccaaaaactttaagagcaacaaggtgtttaggggcgtggagaggaaccctagtgaggtttggtttttggtgaggtttcatgcttctctctgggcttcggtttcgaaggtgtttttgtaattattatgtaggcagtattttacctagttacctagttggaaaccctttctttagtgggttctcttttggggcttgtttttttttggatgcccatgtattctttcatttttttctcagtgaaagccgttatttctataaaaaaaaaaggttgtcaacaaaattgtttgaacaaacttgtatgaggctgttcattgtatggaagacaaatttgtcttttgtttaaaaataacttatgttaagtagcagctcatgaactatgaagtgtggcctatgtgattctctgaccctttacttttgtaatttgatcttgcattatatatcttcatttattgatgttataaaattagggatttgatatgtatctctcttctctctttgcaaagattgattatattagtgatttgtttgtggaagtgcaccacgcgttttgttacaaggaattaatctattagagggtcccacttataaaaaatggtaaaatagtggttgacatgacaactttaaaaaatgtctataggatgtatgaatattagtggttactttgttctaagtttgtagacctttagaaagatgttgggaatctacaaattagtttgcaaacaacaaacgcagagtgagcaatagtatccttacatactagagatatttttaaaagttgtccaccactattttgccagcagcgccccaattcatggtaacaaaaacatggtgtacttttgatgcctctcttgttttggggagaagaaaatgtttcttgttgaagtacaaagaaaaagaaaaaaaatgatattcgagttgaaagcagatcctaatatctatctatcaaaagcaaatcacatgaatgggcttagagtcattcaaaagttttagctgcccatatggattatactgtgattggttgaatgctctacctaataacatgcgcactttggatgggctaatgatctaacaatcatttgtttgctgatttacttggcaaagctcattctcatcaggttctgctttgaggttcatattggac

SEQ ID NO: 8093 - DNA, 889 bp, Cucumis sativus
  Intron number 8 from transcript Cucsa.185890.1 (locus Cucs a.185890) derived from phytozome v7.0 (chr-ID scaffold0127 4; pos 1275489 to 1276377 reverse strand)
ccaagacattgaaagcagacgacttggcttcttcagtatggcccctacacttgaactgcattgtattctgattcacatttctctgaaatgggaggattttgttgtttgatagtgtccttttttctgttatgttagcagttggctgatgttaacattattattttcctgtttctgtttggactctgtttataaaattgatgctgatatgtatgttgaagattaaggttttgacttgttatataggactattgttttgatgcttaaagaaaatataatttagcttttaattccttcactgaacttacatttcactgttctagttcctatattttagtcaattgggttttcatcaatcatatttggctaatcaccttttgcagctaacagatggtggatattaatgagaacaatacattagctgattatttttcttgtttgatttgtaacttccctccaatattttatggtcgttggacttgtacaattttgattgatcactcatttaaaaaaaaaaaaacagttgaaggatagtaacttggagtaatatgtttgcggattatgtcttatttatgctgcatataacattgattagacctttatctatcagatcagattgaaggtttgccaagtggccatagcctccatttgtagagagatgaagatacttaggcctttattctataaaattagttctatttcatattggggatgctatttctgtaatccttttttatgctaacaaattttaatactggaccgtagagatcagaaactactattctcatttgtcaatgaaattaaacagtgaaaatagaagttcctgtgtgtgactgaagataatggttatattgtgtgcatttgtgattaggtggttggaactcccaattac

SEQ ID NO: 8094 - DNA, 8894 bp, Cucumis sativus
  Intron number 13 from transcript Cucsa.096110.1 (locus Cuc sa.096110) derived from phytozome v7.0 (chr-ID scaffold009 19; pos 1829231 to 1838124 reverse strand)
acaagaccattaaagtaagtaattttttgtcttatttaggtcatttgaagaatggaagaaggctatttttttgctgaaaacctttttttccctttttgatgttgttaggtctgggatgctggcaatggtgcaagacaatatatatttgaaggccacgaggctcctgttttctctgtttgccctcactacaaggaaaatattcaggtttgcccttgatgtgcaacttgagtattcgtgagactgcttgatggatattctgcctaatctgctacatgtatgtttttgtctctcttagttcatcttctcaacagcacttgatggaaagataaaggcatggctatatgataatatgggctcacgagttgattatgatgctcctggacgttggtgcacaaccatggcttacagtgcagatggtacgaggtgtgtagtactttctccattgtgttgagaggttacttggacttgcctttttttgccacatggtcaagaaacttacagcatttttatttgtatctcacttcaattgtttggtgatgggctttttaggctcttctcatgtgggacaagtaaagatggagattcttatattgttgagtggaatgagagcgaaggagctgttaagagaacttatcaagggttccgcaaacgatctctaggtgttgtacaatttgatacgactaaaaatcggtttttggctgctggtgatgatttctctattaaattttgggatatggacaatgttcaacttctaacaaccgttgatgctgatggggggctcccagtaagtttccacgcaagtaaactgaaaatttaaaactatagttgacagttgcttattcttactttgtccttttcatccccttaaatatcataggcaagtcctcgcattcgctttaacaaggatggtacacttttagctgtttctggcaatgagaatggaattaaaatcttggccaatgtggatggaatccggctgttaagaacatttgaaaatctttcatatgacgctgctagaacatcagaggctgggacgaaggtagtttgattgtgtttaattgatgtgactcttcaccatatagttaactcttctgtcaaatacctaattaacttctatttaatttttcagcccacaataaatccaatttcagctgctgcagcggtggcagcagcagcagcggctggtagtgccgccgatagaggtgcctctgtcgtcaccatgtctggagtggttggtgttgcttaattgaaaattactgttttttatcaggagctttatttcttttattgtgctctgcatgtacgaaaaaatcatgaaaactttagttcatacttttccttaccaattgatttaacatcaagcatataaatcctgccaggctggggattcccgaagtttgggcgatgtgaaacctagaattcctgaagattccaatgataagtcaaagatttggaagctcaccgaaattaacgaaccatctcaatgtagatccttgaggctgcctgagaatgttagagtaaacaaggtaagtcgttagtgctatatgatgaaattcagcgtacattccttttaattctgatttgagacattttgggctttgtgctgaacatattgagttttttaatctttaacaataattagataactatgcatatgaaaatcttgagtagagttgtattttgggcttcaatagctcgagattttctgggatccctgtttttttattctctgactatgccttgtacttgatatgctcagatatctaggttgatttacacaaattctggaagtgcaatcttggcattggcatcaaatgcaattcatctgctatggaaatggacacgaagtgaacgtaattcaactggaaaggtctcagttttttgtgtgctatctggggcctctttcattcagcaacggactctaaattttgaatgtatctacataatcaacactttcctatcttgcaggcaactgcaaatgttttgccgcaattgtggcaaccatcaagtggcattctaatgaccaatgatgttgctgacactagttctgaggaggctgtgccctgctttgctttatccaaaaatgattcttacgtcatgtcagcttctggtggaaagatttccctcttcaatatgatgacatttaaggtgacttacattatccttcaattagtcaatgcaattatttgctgattagttaggcctacctaatcttcaccttctttgcaattgcagacgatgacaacttttatgccaccaccacctgctgccacattccttgcctttcacccacaagataacaatataattgccattggtatggatgactccacaattcaaatttataatgtccgcgtggatgaggtaaaatatcctctggaactaattattctctaagcgatgtggcaatgttatgcaatcaaatcaatgtttgatgcaggtaaagagcaagcttaaaggccactctaaaagaataactggcttggccttctctcacttactgaacgtgctagtttcatccggagctgatgcacaggtaatttgcctacgatgtcagttctgtggattgcttattgttgtatggtttcatcattcagatatgtagaaatgtagtaatgtggccaattgcacttttgagtgaagacttataagcattcttgtactttgagctctcctcaacttcttagttactcgtcatttgatagacatttatgggaccgtgtttgagcctattgtttatttggcgaattcttaaattggagccacttgtttgtttgttgcttatccagctttgtgtgtggagctctgatgtctgggagaagcagaaaacaagattcttgcaacttccaagtgggagaccaccatcctcacaatccgatactcgtgtacaatttcatcaggaccaggttcactttctggttgtgcacgagacacagattgcaatatatgagactacaaagcttgagtgtgtaaagcaggtccttttttacaccttttcctgtttgttaatttgttctttgttctggaagcaatggccttacccacgtctcctttatcaattcacattttagtggacgccacgggaatctggtgcaccaatctctcatgcaacattctcatgcgatagtcaaatgatatatgccagctttttggatgcaactgtctgcgtgtttaccgttgctagtctcagattacgttgtcgaattagtccttcagcttatcttcctgctagtgtgaggtatttctctcgctccaatttaatgtttacctaatgctcctgttttaagggcaattcataagttgatgaagttatgctgtaatgactcttggatggggcatatgattatttgatatgttggtttattctgttacctgttcgttatgttgattcttggttgataacttgatggcaaaggttgctgtatttttcttttttgttccaaataacataggatgagttaaaagaattcagagaatatgatgccaatagaaagtatgccactttaggttcagttaaaaaatgatgataaaaatatgcaacaatatactcaactatatcagtttttatttttcgttttcgtattccaaaaatgggaaagagcatggctttgcattcaaatttcagactcattttctctcctttttcttacctttcattctactcgttcttttcagcaatgcttccgtacaaccactagtaattgcagcacatccccaagaagcaaaccaatttgctctagggctatcagatggtggggttcatgtctttgaacctctcgaatcagaaggaaaatggggtgtgcctccacctgtcgaaaatggatcagcatcaagtgtgccgacgactccatcagtcggagcttcaggttcagaacaagctccgagatgatcgagcagctagcacgagtacttttacatgcttgattgctggctctccaactttaggtatacttcagattttaactggttgacctttttttttttctccttggaacatttgttagccatgcttgtattttgtaatttttttatggttgattttccattccccccagtttgttgttcatgatatgtagttttactcaaggaaacagcaaaaagatgtagatttatcttctttcctcagattctgtgtaagttaacattctgcaggagtattactaatagccaaatgaccttactgataattctttctcaaattttcctcttccttccatgaaattatatttgttattttcctatggtgtccctctttgactccatttctactttctgcttgtgcttctcatattgcttgaattgttcaggttgcttatctgctcaaatcaatcaggactttattccaacgcaacgctgagatgtttgagttgagttggtttttctgtccaattgaaatttatcacgtgtggatgtataaaactaacctgattcagttagtttggttgatcaccttagtagataacacatcaattaccattataatggttggtggattgatctctatcacactgtaatttgttgaactaaaaaaagttgggaaattttgaatgatgagaaccatttggatgatgactttaatgatcaacctttcaagaacaaaacatcatgaaggagaagggagattcattacaaagttgggagtacactttgtttaaaaccgagctctatctttagtaatcgatatgtagatctaagaaaggaggttatgaggagactcgtatttacattcattttttataatacaattattcaagtttgaggtaggttatcattttctgggttggtatgatctagactgaatatgaaacatctgatcttacaatggataaaatccatgtttgaatagatagtcactgtcttttgtctcattgcacttatacaggtgctataaaattatatatcttgggattacactctctcactaatccaagaacttggcttatgattgaatcataaacatttagttagttaattagatgatcattgggactttgcaagatgtaattacgatggtaaaatacacatttattttaaccttaattatgattacttgcaatgattatatacatgttcacatcttgtcatatagtgcataagttgcaattatatacctctggtggagtcacagatatataattaattcctagtttgaagttaatgtaatccctcatgatttctttttaatcttctattttgagaaagaaagttgatacaagtctaattaagaactctaatacctccctaaataaatgtattaagggtaactaaatagattataatggatgatgtatttactataaatagctacaattcatcacatgaggtatacaaatatgaattgaacttgaataaccgggactatccaaccaacccatatgggttgggtagttgggtaaattttttttttatttttttgggttgagttggatcttgggttggagggttgaaaaattcggttcaactcaacacaaattaatataatatataaatattaaatattattttaataaaaaacaaattaaaggtatataaatctagtttgaaatttaaatataacgattttaaatttttataattttagaaattagaaaatggattttttttataaaaaaaattatatacacaaccggacaacccaacccaatctatattttacgggttgagttgggttgggttagaaactaaattcgggttcactcaacccaactcaatccgatttgactcctacatttcaagtttttattatttatttttaagaaaaacaataaaagaggatgttccaatacaagcaacttttgtaaaaacatttcactacctgtccaaaattggataccacaactacatctttttagtcttttcactcctttgtttggtacccgagaattcaactgacaagaataaatcgatgtaacatggtatgatatagtaaatataaactctagtgatgttacttttaatttcactcttaaaacatcataccattagagataattgtctttcccttatctatgacaatcttgttattagatcaacgtgagactttgatcacatattcaacactaatatatatatatatatatatatataataaatcataacctacaacctgatataagatgtcatgatcaaaagcctatattttttgttgttgtgatgatctactttttgatgtgcatattacacatacattcttcaatgagaaaatatattataattttgttgtttgtgtgaaacgaggatatcctatctagttcaagtataatgttacatgtaaaaaattgtgaatgtttcaaattgacatctcaatcaagtgtcaaagaattcattcaaacctcaaggcatttaatgataccaccacatggaacaatgccaagcaagctcaacaaaagctcaccataaatagataattctccatcagcaacatggttttatcattttgaacgttgcagataatgacttcaatacttacttcatcattaagcacaaacccatcaagtttcaccttgaacgaacgtagaagaagaaggaagatttgtctgccaaacaacattgtttaaaagtggatggattcattgtgatctattgttctactaaatcttaagccatagcttaaggttctcaatggataaggtctatgacattggaaatgtggctgccaaaaacacaaaattttctgtctatgccaaattgatgaagctataaggaagaatatcatgatttttatttgcttgaggccatctctattctttgctacatatatgcaatggaaacataaaaaaatagctcatatcaaatagtttcgaaaaaggagaccaagattgaccaaagaattctactttgtttcacaaaatatggtgtttaagactgcaaaccatggtaaggcaaaggacaatcttcatgctttgtaatcatcaatattccaaattgaatcataacttaagtttaagattgttttgttacaaataaaaaaaatgaaattaaatcatttatttgatagctgagagtttggaatcacacattaaataaaaaatacttattttctttttaatgaaaattgtttaaattatttataagtatttcaaaacaagtttaatagaatgttgacgaaaattattatttagatttgtgcaagtgcgacattaacagggataaaaattaaaatttaaacatccccctaacattgtgaacatcatgctattttctcctcaattttcgtctacaattcttaaggatctttggagtgaacaaatttaaaacatttaagaaagataaatgatggattgtaatattgaaagaatagagtttttacaaagttgagatctttttattattatttttagttgttgtcttggaatgtaatgaatctaagtatttgcaattacaacacactatacactagtatcctctatctctgataaatgatattttaccatattaataaatattttaagtagtttcatctaattttaaaaagtctatttatttataattagtttttgttaaacttaaaatgggaagaaaaacattttttttttaaataaaagacattgaaaagaaaaaggaagaaaatggtaatgaaatatccaacgtcaagaaagaagctttacacgcatgcgccaatggggaagagcactgaagcagtatcttcaaggttaagctaagctcaatccttcttatttttcatcatcttcttcttcttcgttttcaattctgattcttacccttttcttatcttcctcattctgtagaatacccttcagctgctgactctgatcacgtatctaaaaggccaagatgtctgatgaggtgatttagttttttcttaattttatattcatgatcctagtccaagtcctggagtgttgcatctgtgctcaacttaccgtttctttcttgctgcctcttttttcatataatgaaggcaaatctaccagtatcatttgctggtaatggtcatgctcaaactttcaatgcaccagatgatttgccgaagactgttatgagaacactgaatcaaggatcaaatccaatgagcatggatttccatccgatccaacaaactctgcttcttggtatatataaatttattttgtaatatttcgcccacaacagaataatgtaaatgtagatggtatacttctctatttcggtatgatccctataagttaatgacaaatatgaagaaaattctcctttcagttggcacagatgtgggcgaaatagggttgtgggaagttggatctagggagagacttgtttcaaagaatttcaaagtctgggatctcaatgcatgttcaatgccttcacaggtattttgtgtatactaatatcttgcataacatcttatctcaattagtgaaatctgaggttatcttgatgatttccaggcagctctagttactgagcctgatgtatcggtcaaccgtgttatttggagccccgatggttctttacttggtaagattgtatgttttcttgtaaactttatgttaacaaagtgagcactgtttgctgaataaatgtcgatctggtataggtgttgcctattcaaggcacattgttcaaatatactcctaccatggtggtgatgacatgcgacagcacctggaggtgtgtatgattaagagtattgtatctattgttgtgcactcttcccatcttttagtatgacactgaaatttgtgaatcagattgatgctcatgtcggtggagttaatgatctaggattctgcaatcccaataatcaactttgtgtcataacatgtggtgatgacaagaccattaaagtaagttattttttgtcttatttaggtcatttgaggaatggaagagggcttttttttttttgctgaaaacccttttttttttttctctttttgatgtttaggtctggg

SEQ ID NO: 8095 - DNA, 2255 bp, Cucumis sativus
  Intron number 3 from transcript Cucsa.184700.4 (locus Cucs a.184700) derived from phytozome v7.0 (chr-ID scaffold0127 4; pos 341860 to 344114)
agtgaaaaattgaaaaaggaggaagaaagaaaaaggtatattaactggctcactaattttatgttctttttgtctctcaattatcattgggttttgtctgcactgcagaattatttaatattctacaatggaaaatgttatcacttgttgacctttgtagttcgtgtaagtactttgtgggctttaacattttgaacccttcaactgtgatactagaagaatttcagtcaggctctctaacttttgaccatgaaagattatgacataactaaaaccacatgaggatgactaagtgaattctcgccccaactgtctgtgctatctttgatcaagagtcaaaataagagggatttgaaagcagaatcaggatagtaatctagttatctacacgaagaatcttagaattttttatcaaaatttaaaactttttttttaaaatttaaaacatttcttttcttgattgaaaggacctgggttcatgcttcttttttaatggtttttttaaagtaaaaagataaagaatgatgaattgagctttagtttaatatggctgttccagcatcaagaaatgctggcatatttttgtagttgtgcttgtcagcttatgccatatgctagaattttctgtttacctgtacttgcgcctgcagtggatgtgcttttacttgtgaagattcctgaaggtgaaaatggaacaataggctatagttggattgtaattcaatgcatttggaattgcatctctaaagattatgattttatgtgagcacattctttttaatttcacattataatggacgactataactaattttctataagtattggaactgattgaaaatggctgcagaattgtttaataatgttacagtgctgtgggacaatctccctttcagttttctcattgcagcattatcactatttcttttttcttttgttggataagaaaccatttcattgataaatagcttcatcattatctctattgttaactagaggggtatgtatgtgctatggatgataaaaaaacgatgtctataaacttgtcattattatcgtggacattgcattctcatggttgttcatatggtgactgaaaagatttattgtttgattagtttagaacataaggggaaggtactagatgctttattaatttaatttaggaggcatctttgttttagtcttttagatggagccaagagtattatgtttaaagtaaaacctaacagtgagatgtagtctatgttcttctttcaattgtatatcagtaagggaaatcaattattttattttatttttatatttttggagtctaaagagtaaaaagtttaatgcttcagaatctgctctgtttatttctgctatgtggaccttttatcacatctggcttttgctcttccatctagttctttcttatagtattctccacactcgcactcgctgttctaccgaatctctaaaatgatctaaatttgagcaagggcttttaagatgggacgaacgaatgtaatatgtggcctattcaattggtagcccgaataacagctgctgctattatgcatgcttatgtgaacacctaatatgaaatatttttacagtttgacaatcctgaaggtacttacactttcaggatatgacagtatttatcgactagttcgagcttggcctctaggaacctcattttacttgaaatgcctaccgtattaaccccccctctaactacatggataaaaatatatttttacataagaaaaagaagtaatatactccccaagtccccattcaaagaatgttatagttttaaggatttgagtttttccagtgttcggttttaaaactgcgacaggttacttgacattcttctccacaggattttctgaaggaagatactgctatagacttgttatatttgatgatcaatttgatgcttcgttaatatgctgttcaccagttttgtaactcttttgtatggatcaggattgagttagaggtatgccctaaaaggataagcatgttttagtgctcttatctcgtcatggaggttagtttgttaatttactatatgcttatataaaccggaagaggaaaaaacaacgctctgaggcacgataagtcagttgtcatttaattcattgtttgaattggagaacactttcaggtggtgcattttacatatccggggttagccattttcttaaatttttatttttctctcaggcgacaacaggagacacagggcaaattgcttaaag

SEQ ID NO: 8096 - DNA, 1277 bp, Cucumis sativus
  Intron number 1 from transcript Cucsa.175320.1 (locus Cucs a.175320) derived from phytozome v7.0 (chr-ID scaffold0122 5; pos 46871 to 48147)
cttcgttggaactttttatctcttctctcaaagtgagttctctgaagcttacttacttaatttctgcttttattcatggtttgatgatcggttagtttttcagaaagtaggattgttgtatttctagttcgccattttgaatttcactacaatcgcgatcgagagttttcttgcaatttgtgggttatttgaatctctgtgcatgattttgaagtagtaatccgtatgaagttttccgagtgggaagtgaatgcattgtgctgcataggagatccgatttctattctactgtgattttttttctttaattgagtgaaacgttattttctttaaattattgtcgacttcgagtaatccggtggccgtgggatctattgtgatcatcgttttagtttttgtacttgtgtttgaatatttatgtcgaggatttcgattacaagttatataacttatattcgtgtattccttccttttgagttgctgttaatccttctcgtgcatgtgtagtcaagttgtgattctgctttaaattttggtggaaaccattatcagctatcaaaaatcagaatccatactgtttatacttgttaggagataatcttactttggctcagtgttctgttaaagctcgaggcgcgttaaaacgcaatagccttcagaacttacaggttttatgaacacaatagctagacatttgtagattgaattgtaatacaagtagaaaaataataggacgaataagaagaaaatagagatttcatttgagattgtaagaatgtttatgcatttttttcttaaagattagaaagaaaaaaagagagagggagagtaggaaatcaaactcaaggagctgaggcacacactacaagtactaaggcgtctaggagcctttgcttgagaggcttctttgaagcaaggcacagagctcgagcttaattgcggctacgaggtggaaaatttgactaaatatcaccacaaattgatggataagtcaaggctcccaagggagagatagaacgattgttggaaatttgttaaatatgataaaatcagacagattatattgttaccaattttctgcatttccattgttaggttaaacaacattcaacttactgctttgctttgcagcttttgattttatagctgtatgatatattacaatcaataacattttattttccaattttgttcagccttttcaactagttctgtttgcatccattttggactttgaaacttttttaagtagtttcattctggatttttataggcca

SEQ ID NO: 8097 - DNA, 3097 bp, Cucumis sativus
  Intron number 2 from transcript Cucsa.340360.1 (locus Cucs a.340360) derived from phytozome v7.0 (chr-ID scaffold0335 6; pos 2834232 to 2837328 reverse strand)
gcaaccctataccaactccagaagtaactatcgtaatggaattttgatgtttttatgattggatccgacgatttatattgttaatttttatgaaaaaagatcttactatgaaatggttagatagtttagcatttttaccagatagcatatgcttcattaagtttcattatgtcttatttcaaagcttgtttcaaatgatttcagccaaaaaaatctatttagattgtaaattatcctttaatttaaagtttaaaaggcaaacatttggttaccggattagagcttaataatttaagttttgagtgtgtttgtgtgggtaaagaaacaaaggttttaattctagtaaaaaatgtcctgacacaacagtgaggaggaaacttccaaaactagccaaaggggttttaatgtcaactgtgggtagtgtcaaagaaggtatctcaaaatacggtgatccctttccaacccaatggtgaaaaaacagctgccaccaacagcttccaaaagtcttcccatcatcgatgaaacttaattcaaaatccgcatggcttgaacaaattgcacatcgaggaggaattgcatcaacgaacaattccaactaaagttttctttcttcgttcaagaacccaactaaagtttctaaaattcttgaaagagatttttctgggacctgtgagagtattgatttgagtaatcatttatttggtcgggaaatagtctcttgtcataagagggggtggagtgttcatgtcaggaggttctgctttggtccccaaatgggtgtggaggtttgatacgtagttatcgtaaatactcatggggaggataaacgatgcctgctttatgaacaattagcagaagctcaaatcaacattctttgaaattgttggttgtttgtaggaaagcattttaagagtgtctttctatcaaaattagcaatgggtccaatccgacacaatctgttggctccatttttctctggaactgttaggaaaatgggaacgtttttgtaactaatgattacaaggaaagaagatttgtgtggccggaactgttctccctttcagattactgcacagaggcatggtgtattagtggagattttaatatcacaaggtgggcacatgaatgttttcctttcgaagatacacacaaggcatgagacggttcaatagtttcattgattcaatcagcattctggaaattcctcttcaaaatggtaaatacacttggtctagagaagggagcacaacctctagatcactcctagactacttcttcataaataaagtgggacaaattttttgacaacactagagtcagtagaagggctaatgtatacgtccaaatggttacaaagaatgaagatttgtgtggccagaactgttctccctttcagattactgcacagatgcatggtgtatttgtggagattttaattcactatgtgagcacatgaacgttttacttaatatcacagaggcatgagacagttcaataggttcattgattcaatcaacgttttgaaattcctcagttcaataaatggatctcttgggttatttactttctctgcattctagcaaagtgtttgatataagatcacattttaaaacaccctagcattccgcttctccaaatcatccacaataaagtgcataccccagcaaggcatgaaaacattccttctctctcgagggtgaatggacgaagaactccatgatcatatcactaggatccttgtgatgagcatgtgaaaagattaaacgactgacctgagaactcttaaaacttctcaaaacaaaattaaacaaggttttccagaatgctgcaaattaggttaatgctgcaaatgctatccattataaacatttggtaggaaagaaatcatcgcatttttcagaattctttccaaagctctcttgctcggtttgattcagcttgttaagggcttcttcaaggtgtcatctctccaattcctttgaaggggtctcaagtcaatatatttattgttgtcggactatttttttagagcatcatttggcttcgatgttggcttgtagttttcaaacttttgcttagttatttcatgattccttatatgcagtttttatctttcagtttatagtctctttttgtatccttgaacattagtctcttttcatttttttttgcgaaaagatttgatcatttaaaatcttttcataaaaaaaggaccatcatgggttggccttgtggtaaaaaatagacacaatctcaataattaagaggtcatgggtttgatccatggttgccgcttacctaggaattaatttcctacgagtttcttgcatccaaatgttgtagagtttggcgggttgtcctatgagattagtcgaggtgcgcgtaagtgagcctggacactcatggacataaaaaagaaaaaggagaaaaagaaaagaaaaaaatctagaaaaatttgttgggctccacccaaatcttggttcttgtaaacattttcatcaccaaatggattaatagttttgtgtaattgattttcctctcctatcttggagcattggcctattttcatctttttaataaaaattgtggtatgaatcatcatgggttggtctagtggtaaaaaatgagatatagtctcaataactaactaagaggttataagttcaatccatagtgaccacttaccttagaattaattttctatgagttaccttgacaccctaatgttgtagggttaagcaggttgtcctgtgagattagtcgagatatgcgtaaactagcctggacattcacggatatccaaaaaagaaaaataatgaaaagtgtggtatcctttaaaaaattgtgtacttttaaaaaaaatctgacttgttttgatagatgtggtgacattgtttcctttatacatatgcacacatcatatatttcccactcatgtgatcttgactttctattttgaattcaaatttcttcttctttgtttcctttagttttaaccttttctccccttttcttttcttgttgaactgctgcaagcaggagtagatttagtgaattaaatcatctcttttccttgcagccccaagtgagcagagta

SEQ ID NO: 8098 - DNA, 908 bp, Cucumis sativus
  Intron number 2 from transcript Cucsa.238210.1 (locus Cucs a.238210) derived from phytozome v7.0 (chr-ID scaffold0202 3; pos 855722 to 856629 reverse strand)
gcttctcctttttcctcccaaaactcaggtactctatttgaacactgaagcctatatgtattttcttttataatcattgataaaaaggtttctgacataatgtagaggatgttgagtgacacaaatgaactatagggcttagctctggtgaagaggaactcatatgttgcactgaagatatgagatattttttgtactgtattaatttaagccagttttcaatttcaaggaaaatattcttcgttgctatagctttagaaatttaagaagaacaagaactaatgtggacttgtggttgattgagtcatacgggatgacattctagatggcacctttagtcttgattttatgtgattctcattcggatttatatattattgaagttttcattatttcaatctttagtacaattagagttcccgtggatataatttttggtagataaactaaaagcacttttacccctacctagaatttcaaagctatccacagcgtgcccataataagtagattccatatgatttcagatgctttattcagaaaacattagttgcaatgcgggtttagctttcgcatttacatttgggattttaaatatttattaattttagcttgttctgttttacttggcctgagctacatgacaccacaacatcaattagcttagaaactgtagcaggatgttttatgttttatgtattatttttatttctctttccatttattattatttttttgggataagaagcaatttcatcgatgaatgagatatccaaagagaattatttctctttccatttaggctacaaggagaattagttggtgtgttcccataacattatgaatactaatgaatattcatgtattctccagattccctcttcctaaggcctcattcttcagttcct

SEQ ID NO: 8099 - DNA, 6654 bp, Cucumis sativus
  Intron number 4 from transcript Cucsa.273330.1 (locus Cucs a.273330) derived from phytozome v7.0 (chr-ID scaffold0251 1; pos 409508 to 416161)
cctacacgaaggaggcaaagttacaggttttttttatggtcccaattaaacacatcattgccttgttattgctagactatacttatagtcattgagtaaagggataggactcatttttcattttgttgttactgtttctatttggttcatgaattattgttttgttgcaaccatatgcaactacactagaaagcttttcattgatgaaataaaaagtgacttaacactcaagtagactccaagggaagcatatagttagactcttcattcacactctccccttgaagtatgctaacgggaaaaaaaggacgatcttcaataaaggtgacatccatcgtaacaaagtacttacttgaagatggatggaagcatttataggctccttgatgcagaggatactcaacaaacatgcaagcctgatgtcacgtggttattttcaagctaaccagctgtgtggcacttggcttgtttatgatgcccgtgtagccaagtaagcctttgagaggtttagtgcaccaagcactataggtaaacaaagataagtatgacagcggaagttgattagtgcaacaaaggcacttaggatatgtgaaaatgttggcaagagtggaagcttgagggagcttttgggaatgtatatgccttgattatggatcttgatacttcacaaggtcttaagtttacaagggtttccttgatacttcacaaggtcttacaagatttggctaagtgattacaaatgagagcccttccaagtatttataggccttcccaaccgacctagggccttagaaggtcgacgaaggcacattctagagattacaagatagtttagcaatttacaatggagcctagaacattctagataagattggacctttcatgacacttcctgatcgtcatggtatccttccagcacgttccagcacgttccagggccttttcgggtgtgtctggaccattctagcacgttatggcactgtctagggccttctatagcctttcgaagctgtctgggccgtgcatgggtggtgcagcatgcacatgggcgtgtatggggccttctagaagcttctgagactgtttggacatgaggcgcacgtctgtcgcatgcgtgcattgagctggctgcacgtcgccgcgcacgtgtgccgcctgcgccatgtgtgggttgtgatgggcgactgtttggtgggcatgggtgcctgtgtgtgcgcctgataggctggccaaagatccatgtgcatttgcccgtgcacaagggctatctgggtggcgctggtgcttggcgcttggcgcttatctgatggtgcccatggagtgtgcatctgtacaagcacatgggctgtcatgggcacgtgttgcgacatgcatgcggtgctcgtggactgccttccgtgggcacatgctagtgccatgggaacatgtgggctgtcacatggtcgtgttgggttgtcaaatgggcatggttggctccttcttggcttggctttgggaaccttatggcacgttttggtgtaaaaattggggtcattttgtgggacgtgacactgagccctaagggtaaatttagtttggttaggaccatggctatggacataggtagtgtttcccgaaggggaacaacatggataagacgagtggcaggataggattctttgaggcaaactaacggtgtctagaagtgaaggacatgagaagacatgtggttgatgagatgagcgacaatgagaatgacatcaccccagagataggaaggaagagaagtagacatcataagggaacgagcaacttcggtgacgattttttcgttcggcaagcccatttgttgggggtgtaagcacgggaactttgtagaagataagaacccattaagagagtgattttgaaactcacaaccattatcacctcgtgggattgcaatctttgtattaaattgcttttctatggtgtggtagaagtcctggaatgtggaggtaacttcggatttgttggagatcaggaaaacccaagtgagacgagtatggtcatcaataaaggtcacaaaccatcgtttccccgaggaggtaatgaccttggatggtccccaaacatcactatagacaatagtaaaaggtcgggttggcttatagggttgcgagggatacaagactcggtgttgtttagcgtgtatgcacacatcacaagataaggaagaaacatcaactttagaaaagagatgaggaaattttccggcgttgtctgaaggcagcgtaaccattcgtccatggcagcactgatccgaacattgacggcggcggggatggcggcactaaaactagtggctgtctcctctgtttgattttcatcactagttgtgttgtttaggatttgttcaatgtcctgctctgataccatattgaaagtagagacaaaacacacaaatttatgtggaaacccgagtaccgagacaaaaaccatgatatttttcgataaattttacagtaggtacaatgagggagaataaatagaatacacaagggaataaaaaaggaaaagatttaggaattaggataaatatttccatgatctttccataaataccctaagggccaagcccactaattccaacatatccattatccccctagtttttttataaaaaaaattggcccattcaaaagtgtgaatcccacgtaaataatgtatgttgcttttttccttgattccctctttcttgccctcaccctttaccgttcatgtggaaaacaacttttctttcccccacttcacacgatttaccatttccccaagccaacttgtttagccaccgtagttcagtcttcttccgataagatcaacgactccgaccaccatggctcattgtcatgtgccctatacagtgtttccatcctccttgtcctcctgatattttcttcctacatacaattccacccaagggactccttgccatctttgtattttttttaacaggagacgtctctttattatatcaaaacaaactcaaagtacaagagatatatactaagagtacaaatatatactaagagtacaaataaaagagatctagagatcaggggacacacccaaacatcacaacgaggttcacacccccttagcgttctcatcatctttgatggcaatccgctgcatttctgagcaactttttcttcattagagccttcctcttctgccacacaagcaatctttgctgtcctttattttcaaggttggaattctccaaattttccatcatgttttcaccaaacttgtaatgacgcctcccctgcaactccatctcagatgatgttgtcatttgtcgtttcttcttctgcatgcgtcctcgattttttgatcacttacacaatggatatctctttttctcacgtctcttcttttgcacactcttcccctctccaaacacaggtttgttgagaggtgcttcttcctttgtttcttcttcagaccactatcttgatttttccccctttttaccaccagttgttcttcctgcatgctagttgtctccttcttctctttctcatctcactaacttttgctatttttagattttgaacgttcttaccttttccttcttatgcagttctttattctgtctttgccgaagcatcctcttttctcctttccttctttccttcttgcttggctgcttgattctccttagctttttaggaagcaatctcaagtaagatcgacgtcgtgaagcaacctttcgaacttgactagacagtttctgaacaaggttttccttctttacttggatggttgctagggttctttcttccctttccttcactctgtgagcacaaccttgtttgtaatctttcaatgtttgttgcatcaattccaagatttctaactcttaaatcagcaattcaacccaaaagcttaagcttgcaggtaagttaaatttaatataatatataacactccccctcacttgtggacttgaaatatgaataaggcctaacaagtgaaaatcaatattaaatggggagaaaatcaatatcaatgtttgttaggatctcacctaactaagagactcaagaacaccaagaacactcgaagaacactaaaagatagatttatattgcaatatcaatgaagaaactacaatataacataacttttcgagagggctactctctcccgatatttcccaaaggaaatttcttacaaaatactctctcctttttgtacactctcccactaatttatcactcaacaaatttaatgggtaattactagaataccccttatcccttaccgtaatacccttactactaatcatactaattatcccaatatatttctacctaatgactagagaccacttactgttcataccatactaatatacttatctaggtaccgtacagaaaattttgaagattaatttggagaaaatcttgtagagacttgcgtcattgatggaggtgattggggaaacactcactcgaatgaagtataagatcaaaaagaagaaattgaaaatgttgatttggtagtagtctcaaatgaaaatgaaaaacccaatgaagaaaatggaaaagaggtattgaacatcaaaactctaaatgttgaggcggaaatcaaataatcgtccaaaaacgacccaccaaatgtggcttctaatgagctggttagaccgttttgagatagccaatcggaacactgcaacttggtgtttatgcaaaactttcgaatcttttcatataagagatcaacctttattggcatgcctttatttttcttgatcattagaagccaccatctttatgcctcatgtttgatgtctttttattcttgtttcatagttttatattgtctatcttgtaacaattattttttttttttgaaacggaaacaagcctctttattaaaataaataaaagagattaatgcttaaagtacaagagagatataccaagagcaaaaaggactaaaagaacatatacaacgtaaaccgcaagagagaacataatgaaattacaatgagctggacaagaccttttagaacccgagcaaaacaagaactaaatacaagtcaaaattgcaatgagctgtatcaagcttcttttaattattccacattggatttgatacttttgtatttgtattttgggttgtaatccttgttggacgtgatgagggtgctaagggggtgtcaacctggttgagatgtctagatgcggccattgattcttttgtctctttattttcgctctttgtataaaccttttgtactttgatctttaatattatcaataaagatgtcggcttccttaaaaagaaaaagagagatcgaataccacaacctcaaataaactcaaagcaaatgatgaagaaaaatgtgattcttgaaggcttttttttggaagttaattcttttgtgattgatcctttgaatatggtttaaaatgagcttgaaggaagtatcttttttgagtttatggtcgatggagaggttcatcttttggtggcaatattgatttttttgtctcgaatttatccctttgatcatagtatttttgttaaaatataggaggttggtttagtcattcattgttggcttcctaatttttttctttctaaaactcaaggacaagttttctttttggaggggtagaatggtgtaagaagagtatgggttatttgggtagttagttaatattctaatttaatttcctttttaccccacctgtaataaaactctgtaaataggagtattcccctcttgtatgaaacattcaatacattgttcattctaatgaaagattcacaatcttggttcttggaggatttctccgggagactacttagactacatcatggccacttgcccaggaattaattttctatgactttctttgaaatccaaacattgtcggctcagacagtttgtcccttgagattatttgaggtgcatgtaagttggcccggacactcatgtatatataaaaaaaattatttttgcaagttaggtgtgtttggtgggtatacttgctttgtgtccattgggttggcatagactctatcttctgttgcacagctttggtaggaaattgttaggtactggatatttagtttatgttagttaaggggcataagggtaattagatagatagggagttactcgtagttattgcataagggtggttactacatgttataaataaagggacggtaagtgaatgaggaggtggttattctatagagtgatctagaacttgggtgagagtacctaagagagaggttccaagtgccttttacttgggtttatcttatatttgttttatagctatatttcatcatattcaaatcttattcttgttaggaagtatcctaacaaaaacatcattcctgtcctcaatcgttcaactttgatctctagtttcaacctttggtgttatggtgcttggaattttaaatttagttttccagagatcaagaaattcttagaattttctttaaatttctaaaattgctaacattttcaccttttcttttgcttcacagggcagagaaaaagtcccccaatatcttctatgtaatttacatttataaatcatctcccctatttaattgctgtgtgtttctttttattatttataggctgaactggctgcttta

SEQ ID NO: 8100 - DNA, 1216 bp, Cucumis sativus
  Intron number 1 from transcript Cucsa.129470.1 (locus Cucs a.129470) derived from phytozome v7.0 (chr-ID scaffold0102 8; pos 391385 to 392600 reverse strand)
tgcgggatctgtgttttcgaacttcttttcgttgagtaagtttcttgtgatatataaatatatatgtttatatatatattttctctaatacatgtacacacatctgtatcagttgataattactcagttgtttaagcttagttagtgattatttatttcgagttgagtgtttttcttccttgaaaatttagtagatctgcatttttaagtagtttttgtgtgttttgaggtcgaaactcgttgatgggttccgagaatatgggggaatgaaacggaaaatggataagagtgtgctcggtttgttattctgtaactgttggaagctgggtgaatgcttgcgtttaggttcaagggggtgggagtgatgaattgaattatcaaaattggttgcgttgttgagatatctcgattttaactgggtacagtgtagtttttttgggagtggacatgctaattaaattggggatttagattgatgtgttttgaaatttgggaattatagaaggcagactcttaacgattccgattcttttatagcatgtatgtaaaccaggaacaaagttttcaagttttacgatttggggctttgaaaggtcagctgggaaattaaagtcatgactatgtgaatgacctggtcatccactgggttcaagtgttgggcttaagccatattccaccaagcttaaacagagctaactaggttttttataaaaaaataaaaaacagttgactgtggcttagaacaaatgctgccacagctatctggtataggttttttgttttttgatgatagagcttagaatagatatccaaacctcccatcgtgctatggtctggtcatatccatcttttctgcaattgtatatacgaacaactgtgcttgcttgttactaaggatgctaattttattttatgactttatctaaattgtattttaatcatcttaactcatttgatcaatttaaagtcaaccattctccgctgccctgcttgtttatctttgttagtatgcagcttatactttctgcataacgtgctacttggatacttatcttttaactttccttttactcctcgttaagatcattgtatggtttttaatattagctgtttagaagttagtaaccgaacgacatgatggtattaacattgtggagatgggtttcctttaggaaatattatgtgctgattctgtattctttaaagtaaaagaaat

SEQ ID NO: 8101 - DNA, 4301 bp, Cucumis sativus
  Intron number 1 from transcript Cucsa.097190.1 (locus Cucs a.097190) derived from phytozome v7.0 (chr-ID scaffold0091 9; pos 2523255 to 2527555 reverse strand)
gattctctataactttttacttcaggtactctctctctctctctctctcttcctcttcttcttttttccttgctttcttcaaggtcgaaaaacagacgagtttatataatcttagatacgtttaatgacagtgtttgagtgtcttttgttttctgttttccagattcagcgatttttaatgcctttttctgcgattttgaaatgggttaatgggttttttattttatatacataaattcaacaaagttactttgatttaaacaaaacgaaacaaaaagaaaagcgtttactttgaagaatctaatatatattctagtaatgccaactttttccagaaacaggttttttaatggagagagaaaataaaaaaagaagttgggtgcagtcccaaatataaagctcattgattagatatttaaagatggttgtgggtcaagaagacgatatgaatgaaaggggctgtagagagacataacacgtagtcaagtttacaattgattcaatggcttaaaaggattaaaatgccattttaatttccattttgtaattttgttcaacttttgctcttatttcattggtaagttttaatattttcgattcagtttagtttaatatcaatttatttatggaactttttataaatctaataaaatgagaaaatatttggtcaaattttttgtttttcaccctttgacacttgttatttatcaaagtttattaaataataataaaaagcaaaaatatcaaatttgaataattatatcactttaaagtttatcactttaattcataatttatataagcttacgatttaaattgatataattatgaatttagagttattaatttgaggtttaaatggatataaaacttaaaatggagatacataaattgaaaatttctcaataataataatattcgcaagtaaataaaatacctaaaataatggtaaaaaatagtaaatttgataaaatatttacctaacaaaactttcaatttccatcgataatgaatattaatagtcattgacatgtttctatcgttaacattgatagacaggtataagtcagtgacattttaaacataattaatcacattcattcaaattaaaactaaacatcatcaaaattagttcacaaatacgttactaacaacttttgttgggaagtatgatttaattcattctgtcttttctaagtttttggaaattggtccatgtggtgtcccttcatcctatagttgatttccatcctcaaattcaatctctatctttatatcttatcaaattatctaattcatgttactaatttttatttatttttctttctttaaagcaatattagtttacaattactcttacataaaatgtttacaatgcaattattgagctcatcaacccttctcctccattatttgtgaattgctagctattattgctagttttgtcttcaagaaatggtattatcaaacaagaaagaaaatctttctaaacaaatttccctttcttgttttaactttagctagtagggattagagttggctcttcttttaaggtgacagattttcaatttctaaatcttttgtgctttttagctgtctctttggataatacaatacatctttgttatttaacaatatttggaaacgaagagccaatctctttgttatctttaaaggtattataatataatatcttttaagttttgaatcttatgtcagatcgattccttcaatctgctctgaatgttcctgtcacaaggaatcagtgttttaaaatggtgttttgttctttgtttttatttttaatttaatcaaaaatgaaaaaaaaggtcttgaaaaattatgttagtaagctatggagctatatatgtatggtgttgaatcagcagttgatgaacttgaaactttaaagataaggtgaatgtttttctaatagagttggtttgttaaactcgttgaaccaaataaagagtcggaaacaaaatacactatgaatttttaaagaatttgaaaccttgtgatcgctcatactgaacctatgagggttctttttggaaggacatggctggtttaaatatgaacagaaatttattaattttcaagataagtattaaagtgataaacaagaatctagcatgcatggaacatgatctttagggtgtcaggcaagtgtttaaaaagcaaagcagaaaattgaagttatgaaatagaatctttacgaatatagtaagaaaaagtattaatagaattatgtccgtacgagaattttatgaacatttatgctatgatgtattttaattggttttgtgtctataatatcataaaaaagttaattgaacaaccaaaagtattgaatcaatattctatagtagtatgatccaagctttctaacaaccacaatatctatgcctcttatcagcattttgaatgtgtcattaaatgactgtttattattttgtgtgctccagtgctctaccatgtttatggcaagtaatgaacgaggttgcaaattattggaaattttcttacttgaaacttgaaatttttttgtatatttaaagtttggtaggcttacagatggccaatggccaaaagttggtacttgggtgcttttcaaccattaatggctcacaaggatcaaaccagtcatattcattgtcaaacacaattatgatggatgggctccaaccttttttcttttcttttcttttcttttttttttcttctctctctcccttaaattcccatttcaatggacttcaaggagtgtgcgtggccatgttttatccacatttttgctcttttcttcatctgggttttgattataactccttcatttctttcactggatagacttcaggtcttggctcgaaaatcccatttttatttgtagctctaggtgagttttaacaatgcatttacccttttcttaatctgggttttgcttcaaaactctggtttgttaaactattccttctgatggaaatgtgtttattgttcaaatgggtttcccttggagcctctcttttttttagtaccaaaatggagctgctgcttttcacatgttataacgacaaattttacttttgtccatttgggtttaaagacggggggtttctttctataaatacttttgctacctttctttttcatcccttttttgtccttgtttttcttttactataagccaaatggacatgtctatttcttttatcttttcttttattttgttttttgtcctttttatatggccttgctgaagcttcccttggttgtatcgcattttttctgtgtttttatcgccttccttttctccctttacatcttccattaaaaaaacgagttgcttcagacttcagagtacgtagttgtcatatactctactttattatttaaaacttctttacacatcgttggaggagcaaggaactactgactgagttgagagccttcttgactaatgtgtagtttagtattttatgggtatatttagtgcattttctaaaggaactactgtttcctctttcgagatatcggacatcaaactttaaatatggtgtattttaagaatattaatcaagtgatctctgttttggggggaggatatttcccgttggattccctctgttgtttctgatgagggctgtattagtgacttgtgttctaatgaagtttgtttttttaaaaaaaggatattaatatacactaaccttatttatttatttatttctgtaaggttttactgataaaaaatgggtgaaagtttgagttatacaggacaagtactatgctaatttaagtatgttcattttttggacaaaagattgtatctttttctgttaccttcctttcaaactggttctttgggttctcctgctattaaatattgcttcgtttgtttgttaataacaaacttaatctttcttcattgttatgagattttgtcagttttaaataaaaagggtatcttttgttaacgttatctctgataccaagtgttgttctccagggaacttacctttccatctattttttctacttatattctcatcacatggctacttcagtttggtttcttcttatttcttccatttgattggatgtcaagttttcttttcaaagcacttttgttttggtgcagttttattttggttctgtaatcatttttttttctgttcattgcttcagaagtctttgtataatgttgaagaacaagggttggcattatgaactgacttttgcttttgttttcttttcacttttcagggaacgcagaggaataactggaaggtgttcaacta

SEQ ID NO: 8102 - DNA, 977 bp, Cucumis sativus
  Intron number 1 from transcript Cucsa.359880.1 (locus Cucs a.359880) derived from phytozome v7.0 (chr-ID scaffold0358 8; pos 676938 to 677914)
tgctgctggagaccatcctgttccttctgctcgtggtaactttcttttcctaaattcatttcactttttggatcggtgttttgagcttgattttatgccttactgcttgtctgaagttgatcgtctgtctatgttctgatcagtggatgatgggttttaatgcatggcgtctgcttgttctctttctgttttcaacattcagctggtttatggtagatccgttatcgccttcttgattttggtagatgtttaggggagtacggtattttctctggaaattcactttctgatcattaggtatcgaactgcagaagtgatttttttttttttttaggaataaactgagaaatattctactgattttaaatgaaagaaaaggggaaaagagggatggagagctagatctagccaatagccatggatttagattttttatttgattatagtcaagcttttccgcctcaaatttttagatttttctcatttgtaccctaaatattgacgaaagaaattaccgtataattgaacttgttctatgatgtttattgcttttaattttataaatgaaaattctttcgtcaatatttttcgatcggctaacgtaattgctagataaatcgtggcttagtggttggtcattcctaaaatgcctcgaacctaatttttggtctctcgctttattctttctttttctttttggtggtccttctaattaatcatcttattatagctaataattggtatttgaaaaaaagtgaatcatcagttgaactttttcgaacattttctacatactctgtcttttgtagtttctgaatcccttaaaccctgtttattttcttgacagggatggattaatttttgttactatgttttttctgtcttcctgatctgtgtactctttattcttcattgctttaataaggtatatgtactttgcagcttcaaagtctgtagaattctctggacaagctgaa

SEQ ID NO: 8103 - DNA, 1261 bp, Cucumis sativus
  Intron number 3 from transcript Cucsa.250500.9 (locus Cucs a.250500) derived from phytozome v7.0 (chr-ID scaffold0221 9; pos 629191 to 630451)
aagccaacgaagagggatcaccctactcaggccaggtgatgacctttttagttctctttcttccctgcttccctcctgtttcttttatccttccattgtttaaggtgggggatgggacggtgtgattaatgagagtttacctcaatgtcccaatggagattaaacattcaaaaggaaatgtacctatcacaatgaatcttgaataccgtaaagaaagtagcttttgccatttgggaataggttgatgcattttgttatttccgtctcagttatgtgtggggttgagttagccattccattcattaccagcatactgaaggagggtgcagcaaaaaacccctgatttgaatttttaatgaaattgtcacgttattctgccctattttatccaccattttgaaatgtttaatttattgaagatgaaatttagatcacatccaatatcatctggatttaaaaataaaatgaatgcagcagattggtaggtgaacgtgaatagttgtgattagtgataagtggtggttgttaggtggtctacgctattctatatttcccagatcctgttgacgatccttctcactccaaggacattagtcatcgttaaactagcatggttgtttctttggtacctcattaagctgtctttctgtgctttttatattttctggacctttacaatcatataagtactcatttttacgagactgctgtgtctggttgtaatagatcatgttactcattatcgatagaggcggtggagaaaccccaacggaaaataaatactttagctgacttttagctcttttcatacggtagctatctgaatatgtgttccagagtcaagccagtttttagtagggggtatactcaacatgttttatgactcaccatttcaggctaagggagaaatcctgtggtgtgcattttcttcttcttttttttcttctttcttttttccctcttctatttccacttcttgggtgtctatttctaagagtatttacagctgtttattatctcgtattcgtagtagtggaagtatcttttgtaatcttgtggtttttagtttgtacaagctaaataggctctccttcttttgtgagtttctatctttttattattagtctttttctgtccatttgtattcatccgtttgtcttagtagaagcttggttttacattaacaaaatgtctctcaattttattggtgtgtttactttttatctgatgtacattgttttatctgttaaaaactttcagg

SEQ ID NO: 8104 - DNA, 2329 bp, Cucumis sativus
  Intron number 11 from transcript Cucsa.048150.2 (locus Cuc sa.048150) derived from phytozome v7.0 (chr-ID scaffold005 42; pos 2958159 to 2960487)
cgtgttggttttcgactgagatcaaccttggtaattttgaccttatgtcttatttcttatgtttgattatcagttaatcaccagtgtgaaaattgaaatgttgccatgatgatctctttttatcttttataataatgcaagtttgactttttgagtgagaggtattttagctgattgaactttttttttttctcggaaccattattatgttctttctttaacaaaataatagtttggtatttaaaattgatcctcaaacgtttagtatttgaagcaatataatctcttttctccatgtctttgaaagtgatttgattgatctcttgagaaaatttttataagctttctttggaaagccagtaccgaaaaacgaggccttagtttggtaaaatgggagcattctcctcccttctagttaaatggctatggagataacaaattgaaaagttagccctttggagaaggttcattgatgcaaaatatggccaccttggctgaggaattgaatcctgtcctccaatgccaaaggtcaatgaaaggatattatcaagcatcacatatttttttttgagagggtctcttactaaagtgggcaatggagcttgtgttttcttttggaatgatttttggctgaaaaacagccctcttgctagatgttgccctctcttttttaccatatccttaaccaaactcttcatggtgaaggattttcccgggtttgagtgcctcgtatggtaacattatttggaaagctcgatagaaaaggtgagtgttccatagaaaaactcagaatattttgcagacttcagcaaaagatgcccttcgcctctttgggcctcaactaacgtgttttatgccaaaaggagatggttggaaaactagctgcatcttttgctgaatggcaactaaacaccatctatttctttataccttacgagggcctttttcgggttacttggatgaaaaggaaccaaatagtttttcacggaaaggagctttttaaaccagcctaaagaatgaaatgagactaaagctcagagtgcaatagtgaaaaacatgaagcaacggagaacataacacaagaaacaatgaactttctccctaatgttcttggtcttagtatgttttcggtactgttacttgtaataagctctatgttggccttggattagtagttgtgggaacccaatgctgcaaatcctccaccactgcgctcatggagtgttcatgagaattgaaatagtataggcagccgctctaatgaagctagacttattaacgagggatgacactgacataatacaatcaggattcgccacccatccaagcaacacaagaattcactaggacagcatgagcaccaccaccgctaataccgtatgttacaggttgttgtccttggattagtgatttttggtgttctattttggatatgatgaggacgctaagggggtgttaacctagttgaaatgtccgggtgcacctactgatccttaggattttttaagctcttgtataatcctcttgtattttgagctttgtctcattttacttattaacaaaaagacttgttttcttttcaaaaaaaaaaaagaacccaaccttaaaacaccttcaacaaatcctagtacggtcaactgaaaacagataacaaaacaaaatgaacaacgataattggccaaaaatagacgccggggtcgagaaaagaaaatttcgggcaaaaaaaggctcttcaaaattccgggaaagtagctgacttttgaacaactttttgatgctataatctgttttggttatagcttggtataaatgttccctcttccattactacagaagcaaattaaaattttgttttctccctccttttgtgttcaacaccaggttgaacacaaaaggatgagaaattgaaccatagacttttgagatgacaatggtgcctttgtccacttagctaggattggatccacctttaaataagttctatgttaaaattcaatgtaatgcctcagagaattactgagggtgttcttagttttgaagatcattttttgtttgcttttaagcgctattcagaatcatgaccacacgtgcaatatttttattatcataattattaatgtgatatatgtgtattttgtggctgttggtcttttcatttaactgctataatgataagttagtctaccatattggtttcatgtgcttagattcttcatttagttcctatccaagggcacaaagctgtgtctaagaaaggttatcctgatacggatatgctttatattcatttttaggttgctgctgtttttcgcaaatctctgagattaac

SEQ ID NO: 8105 - DNA, 1543 bp, Prunus persica
  Intron number 3 from transcript ppa002118m (locus ppa00211 8m.g) derived from phytozome v7.0 (chr-ID scaffold_1; pos 31860503 to 31862045 reverse strand)
cggtgtttgttgaattgtttgcaaattcctctttggtatattatattctacagccaaaatactgtctgcaacatcttgcttgctttaagttgaagtttacctaatttggttgataagacattttttcttgtatttttttggtgattccatgttatgatgtcgtatgcttttatattttgaatgagtaggaattgaggtgaacttcttttgttgtcgatcgagtcaatgtgacaagtaattacaatgatttgtgtcttgaacccatccgatcatcttctgcatgcctttaccacctagtgaaaaccacttaatcaaataaatttgtatatgcttaatatgcagtgtgtttatcaacttataagtcctgaataaatttgttgattatgcagcttcttatatcatcatgatgcaggatggtttaggaaatgtatcatatatagggctatgtagtcggctttaggaggtggatttatttattttattatatgggaaaggcgtcttggccttatcgtcgccctttagatttttctttagtgtgattcatcttgaccaggtgggagctttgtgttgattagacttaatgctttgtaacagataatgtcagcaaattacttacacatagagttttaattgataaaaaagataaatacaaaactacaaagatgataaccaaaccgccactcctccatcacacccctccgccaccccaacagccttcaccttcccctacccaggagcaccgttgtggtggctccaaattcttgggatgcgaaggaaaatggtgaaagattggagcaaagtggaagcaaaccataattttgtggctgcttgggaggtggatttgtttattttatttttatgggaaaggtgtctcggccctccttgggacttaccatggccctttagatttctctgtagtgtaattaatcttgaccaggtgggagctttgtgttgattgaacttaatgcttggcaacagataatttcagcatattcgcgttcttttgagggctggaagttgggggtaaattctgcggtattttgctttaagttgtgaagaaaaggggcaaatgaattttctttttttgaaaaggggcaatgaagagctgagaaatttggggtattcttctgctttgaacattagtgcatgagcagtctgcagagaagataaatagaactttatttttttgagtacagacgagtttcatataaatttagaatgtgttgtataaaatatagtatatcagtcatgttgtaatagtataatagatgacaagcttcaattaaaagaacaaaataaacccctctatagaaaaaaaacatagatcttaatcttatatagcattgtttttagaaaattatatattcaaaagaaacagaagataccatgttttcttgttttccactaaaatttcatttgttcatacaattacttcactttcctcacaactacccccccttttttcttctgtatttgcaaatgtctctctcctattaatgatttataatgcttcattgtcttgattgtattgactttgtaggcg

SEQ ID NO: 8106 - DNA, 707 bp, Prunus persica
  Intron number 7 from transcript ppa000230m (locus ppa00023 0m.g) derived from phytozome v7.0 (chr-ID scaffold_1; pos 42819786 to 42820492 reverse strand)
gaactttcgattcggctgaggtaatcacatgctccttttatattttataattattctctttcttgaatagaattagtagatgttgaggtcgatagttatgaaaaaaatatgtacagaaacagaggacaagaaatctactgcactacagaaatcctaacaaaagctagaaaacgaaaaagcagaatacaaatccagtataacagaaaaatcactaggaagcaagctcttgaataaataaagatagcaaagaaaaaactgcccctaaactctgaagataccgaagcccaaattcgagccctctccgacaagtattcattctcctccctgtagaaccatcaaacacccttctattccgttccctccaaaataaccgtgaaaacagcgattaaggacatgtccccaggaccactccctcttgtgcctttgacataataaagtttgttgtatgaatcatgaaacttgacctttaatatcctttagttcccttaaatcgtgttggaaaacatgtctaccatgtgttatttaattatttttcttttattcatgtactttattaccctttattattctttgacatttaagggaatgttggtctcagtcattcaaatatattttatatatttatttatgttctcacaatgagacaagttttaaccaaaaattgcttacgccactttcaattaattacatgatttttgtatcatagg

SEQ ID NO: 8107 - DNA, 2614 bp, Prunus persica
  Intron number 4 from transcript ppa012329m (locus ppa01232 9m.g) derived from phytozome v7.0 (chr-ID scaffold_1; pos 45990385 to 45992998)
tggaaacccaagtgaagagcaaggtcagcatcaaggtaacttctttctttcacttttgcatttgtggtttttcatgaagtgaggtcttgggatttgtgtagattgatgggtttattgtgctgccctagagctttcagactgtaaatgtgggtgcttatggaagccgagtggataatggttatgtatttgagtgaatttgtctttagagcagttagtttgatgtagtagtgaattgatttttccgtgtattatgtattgtcatctgtttccttgttcatatttacaaagtgcttctttggctggtttattagtattgtgtagacgttgtaactagattttttattgccctacatgtgctcgtatttgaatcggagtacacagtagcattgagggcatggccttttctcttttctttttggtttttgagctttttggtttcttcgacaatgtaagggtgtcgcgtactaatgagtggatttttgctatgtttatgggcatgtgtaatgaatcaagtgggcatatttttagcatgcttatgggcatcaattgttgagcacttttgggatatcccttattgtttaactcatcttgaatggctgggagttgcggattagttgtaatggttctcagataatattctgtattctttgtcggacattgatgaacaagaggacatcttgttggtattttcgtgtgcttttttctcatccttcatgtttcataaacaaagttagtttcaaagccgaaatttaatatatgacttgctccttcaaatcttaaagggacatggccaatccccaatcagaagatttttcaaaactggagttgaataaaactatttagaagctcctttactcaatggaattttaatattcttgcaatccataaataaattcataacgaagatcatcaaccaagcgctctgtttcctagatgcaaggcctaaaccttatgatgtaaattcatatttgaattttgaactgcacgatgtcttcagaattctttaagataacagaaacatgcaaagcaataaatttagggacattcatgattatttgggactgttctttcggtggtccttaaactgcatctcgagtctctatttaagtcaaggggtgcttttttctttgtttgtacttacaacaaaacaagtccaccataatattttttctccatataataaatatgtgactaaatgaatatcatgtaagtgaaaaaacaaaaacaaaataacacctctttcctttgttcgtattttgcttccattgtttcttttatttgaattacttccattagcttcaaaaaaacgtctttttatcttatgttatgcaaactgactgtgcttgttggcatacaccttaacatgaaatgcgatacgtaactgtgggcccagggcaaatgcttacgtgtgcctagatagagttatgtaacataaatgacgtcttggtgctctaggcatatagtatagtcaaagttgtatgcatgcatacttttaaatctagcattgaatgatgattccatttacgtaatgcgctaccaaactttcatttcttactgtcagataattaatattctaatagatctagtttatctaataagtgtacgacacgaaggtgtgtccctgtgtcaattaggttccttttttggaagtattgggtcatcagtaactggtcccgcttctggctacgaaaccttgaagtcagtggtatgaaagggctaatctgtgttctagaaaacgaggttcatattttccttcaagtaattgtgccaatggttactgatccgactattagcctatgaaagctttacattgacagtataaaatcaatttctgaacggaagtttgttagcgtgaaagctattgaattcctacccttagggagcctgtcagcatatatagggcttggctcttaaagagatgatagcgagaatcgtacaatctccttgcctgctaatgtgtcatatttatttaaagatattaacttgtcagctatcttctgttgaaaattctgtcaaattatgtcttggtagttttccagtagtagaatctgatctggttgcaagtcctttatctagtcttttctttttttagatctgactctatatcaggacgtggcatgacatatgcacaaatctggtgaacagatttgatatgccaaagttattagtggatagaaaattttgaaggggcttactttgaggaagtatgatatatgcacaaaaagatttgagcaggggttctaggtttatcctttttttttcccttcctgtcagtgttgttactgtcttttttgtttgcagtttagtatctcatacaacaaaattttctagataaagaaaaaaatgtaccccaaccaaaaattgcagtctgctgtcaactagttctcatctgcacgacataattccttcctgatgtaactgtgatgaatctctactcagatgctttgttgcctgtggacttctgttcttgtagtatctcatctttctatcacgatgcacaaataaataccggttccagacagagttaagacggatgtgaaatctcaactttttctgacaaaatttcattgtctccttttacagggacatctgcacacctacagattctgcgaca

SEQ ID NO: 8108 - DNA, 794 bp, Prunus persica
  Intron number 4 from transcript ppa011431m (locus ppa01143 1m.g) derived from phytozome v7.0 (chr-ID scaffold_7; pos 17435113 to 17435906)
agcaaaagacaggtttgttttaacaagatacaacattccttgttgaattttgagtttgtttgacataactctaagttctttatggtccacacgggcactagccgttagtttttgatggctggaggggttacttcacacaacctcaaagttgaggagacattgaatgattttaaaatgtaggaagaaaattagaactcgattcagggtttagggtattcttcctatttcccaaagacattgtgatgaatcatattttcaaaggcagtagattgatctttggcctgtccttatgcatcttccatccgccaacttcaggccttctatttggatcaccatggaacaaagaaatatgcgaggttacttatgtaattggatcttgtctgagacttggttcatttgatgttatagtggatgaaataatatcacagaattaaagggatcaacagtttagtatgatatcagttaacgactgccttaacgaagatgtttccatgaaattcaagtatagctctctgtgcagtattagccagtggtatgaacttggtgaaaatccaacataattgcacactgttgttatgtcttgcaaatcggaaagttttatgtttggaacaatttatgtgtttgcccttgcttttaagaagcctgtgttgcttatgctgaattttgtgaaaggctggcagcaaattaggaacattgacttgtttttccatcctttctcctcacctggaactacgtaaacttgatttgttgataattgttgcaggaagacatagaagataagatagaagtagctg

SEQ ID NO: 8109 - DNA, 773 bp, Prunus persica
  Intron number 1 from transcript ppa005257m (locus ppa00525 7m.g) derived from phytozome v7.0 (chr-ID scaffold_4; pos 12932796 to 12933568 reverse strand)
acgaggactttcaggtactgttaaaatcgattcttccattctgtttttgaccttttccctcattgttctgttttgagaatcaaatgtgaaaattttgatgtggtgagaattgtatatgaatgaattggacattggtgcatgttgatttggtttttcgtagttggaattgttgtcaatatcaaaatttgtgaggaaaatgaatgaaaagctatttgagcagagtggccacaaggtcctttaaattgaatcaagctgggaaagtattatataccagaaaacttgtcaatacccgtttcaaagctgcattttgttaccgaaaaaatgttgcatgcaattagtttatgttgtattttgtcatagagctcagcgaagctttagggaattcgggaattcgtaggatttgttgtttgtttcattcaaataaaatttgtgattttagttgcggtgttgtgtctttagttacaatttttggttaccattcaattttgagatattgtaggatgcatacgccaaacatagtttttggaaatttgcactaaaaagtatccaaaatgaggaagaagatttctttatttttttaaaaagattattcggtttttcacttacaaagaatatgtttggtgtgttgctgacaatagaaccccttttacttcttggttattggctgaatctgagtttcctgaacctgaaagaggagagaaatttaattttcttttggtggtatacaactgagtaactgattaataaatatatgatattgcagaaagaattga

SEQ ID NO: 8110 - DNA, 3615 bp, Prunus persica
  Intron number 9 from transcript ppa009736m (locus ppa00973 6m.g) derived from phytozome v7.0 (chr-ID scaffold_1; pos 13704220 to 13707834)
gttacattccacagttacattaaaggagtttttctgtatagacattatttttgtcaaattccaatatcagctgtataaaaaaaaaaaaaattattaaaaaaggttaatatgtcaactagataacttgttaacacgaattttcttctgttagaaatgaattggttttcagttttcagtgcaattgaaactgagtttgtagttttggttaccaaagcaaatacactaccaatttacactagtaacaggaaaaactcgtgactaaataatgtttctattttcttttgtttcttaatgagactaaatgatggaagcatctgtggaagcttaaagttccacaaaaaatgcaacatttcctctggtgtctagcccactgggttggattgaaactgcttgctttcgttgtatgggtcagattgaaactgcgattcatgctcttcacgactgcacggtaagttcttctgtttcgcgcttactagttgggctccacttcttgctactttatcctatcatgatgctgcaatctggttgttggctgtatgggataccctccctaggtcacaacactctttgtttaccattactctttggttcttatggaatgcccaaaatgcagctttgtttggttctcctatcttgcccccagaactaatagttttgacttgctcccctcctacttgacccgctttgttccctgtatagctaacgaagtggcggatcgtcttgtgcgcttcagtcttggtcaagaggacttaactttttagttttctcacccacctctttggctacatgattgtctaattgaggactctcctgattatactgatgtttgactctcttgtagtctcagcgtgtgtggtactctttcttattctggggttttgttccattggattaacgagaccactcaatacatactttatctctgtaatgttctgattatctaatgaaatccaacatcttctcagaaaatgagactaatgatgtgtttcctattatttcattatagaaagaggaaaaaagcctggaaggcgagagtttttctgctggcatgaaggccgtccaaggaaccggcaacagccagtagccagtcacagttggtgtaagctattatatagaccgaaatggaaaggaacgacaatataaaagaatcaaaataaagggaaacgagaacggggatggatcaaagtgtagttaaatgcttgaggcaaaccaatttcgatccaaaataattgatcaaaagttcttttgttaatataaaagccaaatggactccaacatgcctcaactttttagtaaggtaaatttatcttcgtgaataagtggaaccaactttttactaaaataagcaagaaatttgttaacactagccctcatcaagatggaccattttaagtatgatagctctagtgatgattcaatttgttactcatgtgctacccctgaaagtgaacatggtcatgagacatatagccaacaaattgatggttataccccatctatgtatgtttcaagctctacccatcatcaagatcatgagcatgctgcatgaatctagagacatcatctccccgaagatctgaatcctatttcgactgaaagttgtgtttgaagatggcaagagagctagtggtgacttcattttcaagtagcatataaataattcaatcatgttagctgcttttaacctcctcaacaagaaaaatccaatccgcctaagctttgcatgcagaaaggataaattagagctcaacctcaacgcttgagtatagcttggggagcagtgggaacacgcaaaccgaatattcaaattaaagaactcataccagaatgtttgagaagatatacttcattgacaaaagcagattataaaaggttttgattacaagaagttcgagcagacaacaaaatgttacaaaaacactcattacaaaattttgagcaagtgaaagcttctgaactacatttccaagctaaggcaaagtgggcactactgtagaaaaaaaccactcaagaaggaagctgctcaatctttttcttctttcatgtccatccaactcaggtccagaccaggatggtgttcctgtatcactgccctgcaatcatcatacccactggcaaactgttcgaacatcaagttgcggaaatctttagactgcttgaaggcctctatagtagcagcagcctccttagatgttaccacagcagtaaacttagagacggtggatttctcctcctctagggcggccttggttacttgaagttcttctgaaagtgctttcctcgactcctcaacttgagccagaagggagtctgcttgaaccctctcctcgaccgctcgttttttctcctgctcagcctttattttctccaattccgttcgagccttttcttcacgaccctgaattgtctcaaattcaaaaagcttttccaactgaccaacacgttctcggagagtatttcacacagtaatgagcctattcatctcatcaaacacttcgtccaaacgattttttgccaagtgctgacagtaaaccgcctgaaaagaaacacattagtgaaggaagattgtatgcgggcgaaggagtctgttgtagctgcttacattaaaggttaaggagacagatttttgccagagctgatttagttttagttggtttacttcttcagcatcctctggagagatggatctcttacaggatccgaagagggggactagatacttaggctcatcacccttttcctgggagaccctcatataatcggaggtcccctcagttttagtaggctttgtgtgtgaaggggagctcttttggcacttatggtcctcagttttgatatgctttgagtacagaggggagcccttttggcactcaggatcttttccctttgtaggtgcttcctctgcttcctgagctggtgattcaaccttaaaaggttccggggcaggctccagatgggcaattgttattgcgggagtaggtgtagttgaggcagtggttggaccaggtgaagacgagctcagaccacagttaaacctcctgaaagcaaatgattttgttcgtttcttcagtgggttggtctgagctcgggccatctttctagtataaactccttgattaccaaccggagcagacatttctcaacgaatgaaaaagatcagtaacagaaaaaatggtcattgatgtcaaagacttgcttcaaagacaagatgtgagaacccacagttgaaaatcttgggagaacttgatttccctgtagctgttgtgttggctgctttgaacgtgcaaggcgatgcttctgctgagctaaacagcaaaaagtggcaggtaagggttagaaaacaataagggaaccacatccataacctaaaattaaaaaagggtctcaaatttgtaggtttgcaggtttgctaaaggaaagacatcctactgaccagaagcaaatcacacttacaaaccatcaatttttggatgtagccgcatcaggtacagaacttgaaactaaaaaacaaaattctttactgatactgtccatccataccacttaaagaccaattaaagcgcagtggattggatcaactatcctgatggaagggctcagaaattagaaaaaaaa

SEQ ID NO: 8111 - DNA, 1796 bp, Prunus persica
  Intron number 2 from transcript ppa010187m (locus ppa01018 7m.g) derived from phytozome v7.0 (chr-ID scaffold_1; pos 11594493 to 11596288)
aaacccagaattgggaagaaagcagtgagtcaaaggtaccagcttttttttacttttatgcatggattttatattttcgttaggatttttatttttatttttatgcgtactatgttgttgggaattttctttgtaagtagtgaaagttagccttataaagctgttcttgaattctttttttagggtttcaggaaccctaggatttgattttaagtatagatggtgaattaactctgtttatacgttggtaggtacggtatatgtacgtatagtacacaagtcgtgtgtttttgtgtgaagtaaatcggaatcaattggtttctggggtttatgttgctatgcaatttgactcagtgagttgatgagcagaggtgtgaccgtgtgagacttttgagttgactcttgtctttttacttgaaggaaattatgcaaggttatcataaaggtctaacctttgtttggttttgtttgttttttcttttggggtgtcggtgtattgcgtagtcttttgggtatgaacagttacatgcggttttcagactctggccttttcagtgaaaggctaatagtccatgccaagtgcaattcatgcttgtccaatttatagaggtaagttgttgagcagtgcactggtctaattggtgagttgtgtatgtatctgtttccaaataacagtttctgcattttcttatcaatactgaatttgaaacattttgtcttggttgtgcaatgtttagaataatgggaatttcctatggaaatcggtaattacgataagattgattgctaattgtaacaaaattgactggtttaggatataagagtactggaatatgattatgctagacctccttgtgggggaaattttgttaagggtctctaatgtttgatttcaggtggaagagatttatgtttttatggtgtgtttactaatcatgaattggaattctcatcaggaattgaattccgcctatggagaattccttcgtttacttcacatcaaggaattgaaaagtaagcggggcccacacaaaattaggaattgaattcctgattttggaggaattcaattgcagaatgggatgtggtattctaattcctggagaattcacccattaggaattcatctttttaacccattatatcctcgcacaattttcaaaattccaaatatgccatctacttaacccaaaaatgaggacattttagtaattaatacctctcctaccccaattccacatggtttagtaaacaacttcaataggaatttggaatctaacttctttcaatccatatggtttagtaaacaacttcattaggaatctggaatctaattctcttcaatccaactcctactcaattcaattcatcctcaattcaattcctcataatccaattacggattagtaaacatgccattattgtttttgaagatttagtttgaccgtatagtattaattgatggggcttaagttctatgggttttacatattagatattcataatttatagtcttatttttagtgacacagctggtcctaaaccccttgaaaggaggagggttgtgttaaaagtttgacatccagcacttctattttgtcagctcacgagcatgaatctggaactcaaaatcctggagttgatattcagcagagcagtctgctttttattgggtttcaaaaattgattcttggaattttatactttctagaatttcttaacagtagtgttcatattgattgtttattttgtcctctgcagtgaaagggagcgtagctgcgtagagaacttcttac

SEQ ID NO: 8112 - DNA, 2277 bp, Prunus persica
  Intron number 2 from transcript ppa017961m (locus ppa01796 1m.g) derived from phytozome v7.0 (chr-ID scaffold_9; pos 655232 to 657508 reverse strand)
attttctacgtggaacataacaggaacttacagaggtttgtcactttatatttttgtacgatcttattgcggccattccttgctcaaaagttgttgattactaactgaatcataagatattcttgttactctggtcgtagaattttgtattatgaagctcattgctggggtaattgggtggaagtcgtagaatttaggggattgtgtagctttaaccatgctattatgaatatacatgattcctgaaggggaatttttatggacttcgataaactatttgataacttaaaacttggttgattcaaatggcttcaaactcacttgagagatagatagaagcatgcatggataaaatgatattaattgatgtcaacacgttaacaaaccttgccctagctggctattactttcttttggcatttgtttagttaggttctgcccgcccaagttgtagccttactgatgaggacatctttgtcaaacccattagggtttacaaaagaaagagatggaagaggaaatcatttaatttggtctttaaatctggcaattttgtattcccgcgattagtttctaacttgttctctaagttttccagattttagtaggatttttagtttttccagatttcagtaggatttctaagtttcctattttatttggattaggatttcttacgtagaataagtttaattttccttttcactctagggttagattattataaatacaccttctatgtaattcattatgggagttgagttgttgagatataaagaaaagtttattttccagagattggggactacttggtgtgaagccaaacccttggagggattccagacctatccttgttcgttctattttctgtttttcattgttttgcttctgctactacctaaattctcaattcacccatatcctacatcacttactgtgctggtcagaaaaatttaagggtttctaatactcaataactaagatcttattggttatatgtttgaaggtacagatttaatgcctttgtctattctttaaccctcaatgcaattgttagcatctaataggtatacgattttgtagataatgcttcccattggtgctttcttaataaagattttaaaataacaacgtttggaaaaacttcacaattacttatgttatcggttttagttttcttaaaaggttgtatataccaatcaaaatcatggatgttttgataaagttttacatagaaggttgtgagaaattttatattttcgatactttggattgcagtaagtttatacattaaccccttagttgtgttcaagtacaagtaattgttgttccacatcctaacaatttgaggttttgagaacaatgataagccaacaaactttccattatatcagagcagaagatcttgagttatgatatttgcaactgcaacctcccaaattacattgaattccatgtgtcccagtcgtggaggaggctcccacatttgagggggactgttaagagtttaaaatgattgttccacatactaacagcttaagctttttgggaacagtgataaacaaacaaaacttaattaattgaagatgcaagaagatataatattttcttagacttacttgatttcacccccagtcgcagagaaaacatatttgaatgagtccttaaaattgcctgtcacatgaagcatagagatatgtacttgtcacatgcattgggatgaacacttaatttttcaattcgttatacttgcctgataggtgcttgcatcttatggttcactttacgtgaagaaatggaattatgattaaactttctgaattttttgccatgctacaagtagcgcaatgtcatcaactgacttaaattgttgaatacactataatgctacgtttggatgagagatttaaacgaatggatttgagttttaataagtttacattgtttaggaaatatcattcaaaatactatcaaatgtctttgaaataaattcgaaatgattggattcaatataaaattttaaataattaactattactacagtgaatcttttctgcttgtattctttctctttcctcccacataggtgcacactttttctgcaatgttaacattatattcaagcactttaactttatacattaatggagcctaaattcaaaatttcaatttaaaatccattcattggccaggtgtttctgtcttgacctgattagatgtgttctttacatgtgagttgcagggacttggaagtttcctgattctgcaaatagctct

SEQ ID NO: 8113 - DNA, 2429 bp, Prunus persica
  Intron number 1 from transcript ppa026991m (locus ppa02699 1m.g) derived from phytozome v7.0 (chr-ID scaffold_8; pos 6886679 to 6889107)
attgtgcaacacgcttttgcttttccactgtaagtactatttcaaggaaatatcgataatcttaaattgccatgactcttgtttgttataacaccattgattattgatgctacatgttgaaatcagcttaaaaacttgaatgattttgaaattgtgatttttccacttgtcacggctaggtttctggtcccctctgctcttttacttaatgttaggttgtcatagctcagtttttgggtcccctcttcttttccagtgggttgaaagctcactttacatacaaacatgaatgattgtgttgttggttggtttttttactcaatgctctttgattgaaaatgtcatgttacgtccattgagattatgtaggtattggcaaatttagtgctataccagttctcatgcaagtcttatgtagccaataaatctatgatctgtctcattctgaaggtcctaattttagctcatcacctcattggtataccacgtgcgaagagtttccttcactgttttattgctttgaaattgtgttatttgtttcgggaagcaaggttgagtttagtgataacatcttcgtgtggatctttatttactgacaaacattatcattttgttggaaggaaaagaccaaagatttgtggaattttagtgtgtgttttagttttctgggttataagggcaaagggggaatggtggagatcgtggccacgtagtcctaacctctccatccctggctgcctgtgctgagccattcttccattttaatttaatttcactcctcttgcactctagactctagcgtccagacttctagtaatgattttcttgtctttcttttcctttcctttttttaaaatatttattttatggctttctgtgaatattaaaaagaaaaagaaaaagcaccaaaaagagctgaaatcattagagttgtgttttgtttggggaagagtgaaggaagtgattgatctttgagtttcaacattgcttattagattaaaaaggttttgtgtgtcagattttattattttaatttatcgcctaatttaaaagggtgctgattttcccactccacttttgtccacttaaactccattttgttttttttattactttttaatataacaaaaaagggagtgtaagtggacaaaagaggagtgggaaaatcagttccctttaaaaaatacaagatagaagagagggagggaggacaggccattatgtgccaaaaagtgtgagatgatgacttaaatgtgtcccaattcagtacatgaattttaattcatccctcagtttattttttgtgtcagatgagtatcaaatctaactttatgcgtaataattcacagatcttataggcagtttattgggctttttcctcattacctgtttcttcttttctatcaaaagagaaacgggtcttaaacttatataatcttcaaccattacgaagagaaatacaactaaattaagaacttgttagtcttgtcaagacacaagaaccaaatttaggttcatttgtcaaatttaaagcttttgcagtttttttcgtgccagtcttatgtagtcaattaatctatgatatgtcttgttctaaaggtccaagtttgagcttatccccttattagtataccacgtgcaaagaggcagctgatcgtcctttcgttcactgctttattgctttcaaattgtggtacttgtttcgggatgtgggcttgagtttttttagtatggtttgtagtgttctgggttataagggcaaaggtgggaaggaagtggacttcgtgttgttagcaactgtatataaaggcttacattgcctctgcttttgtatcaaagaattatttatatgaatctaagaattgttcgagcctctggttctcttagtcctttctccaaactgaaatcctagctttgacttctttaaagcccttctacctgattccatggtttaaatcaccttttatttttctcccaagaaacagctttcattttttaacccatttataaaggaagtgttttgtaattccaagaatttaaaaagaaatacaaaattgttactaaatatcaccaagaaacaaaaaaatgaattgggtaactaaaagcattttgcttataaagaaataataaaacaactctgagaaataagcccaaaagatttcatggcattcatataataaattgcagatgtcagtgtcatgtgaaaaaaattatggcagaacaaattgcagatgtatattgtttgctgatggatatgaattcacattgtaactttttctgcgctaatctcgccattattatttgttgtattccagacttcaaatttttttgcttttagtctccaaacatttgtatcacttctgattttagggtttccattctgcttttgaaatttgacagaatattctgataattcttcttgcagcctg

SEQ ID NO: 8114 - DNA, 1270 bp, Prunus persica
  Intron number 3 from transcript ppa017640m (locus ppa01764 0m.g) derived from phytozome v7.0 (chr-ID scaffold_6; pos 20171238 to 20172507)
acagtgaaggatcttgtgaaaaacctgagacagtcattgctcaagtttgtgtgaccagcaaatcggaagttttgaagttcgctttgtgctttagatttcgatctctaagctggaagatatatatatatatatataggaataaattaattttattgacagttttcttatgcttgtctttttctttttctggctttcatgaccttttggaaggaaccaaagcctctctgtgaagcatgaaatattagccattgccatggctttgtttttgttgccagcgcggttttattttgcaggagggttttttttttgtgatttttgcgtggttgacccgttgaccacgttcagtttaccctcctgttatatatgaaaacctagctgtggttttttcttttttctttttttttcttaggggttttgtgtaaacttcctttgtattttgtgacttaatgattgattgttgtctctttggtggatattcttcattccatggcccatatctcactttgatattctattgacaagttttctttgtcgaccaaaaaaaaaacaaacaaacaaaaagaaaattaagacaaaaacaatcggattttagttttagttttcatcttacagtgaggctggccacaacaaagtatcgaactcatcacaaatatatatatcgtcatcgtcatgaatgtgagccaaaacttgaaacctcctccaacttagttgaggtaaatatcactagacgaatgactagttagtcgaattaaaatatatttaggttttcaataaccctaatattattctaaatgaatcactacaaaaagtcattgtaaaaccaccccaaccaaaaacaacaaaactgtctttgttagacaaagacggaaggaaccgcctaaaagtcagaagtagatagagcttgcaaaaaattattgactgtcaatttagaaatgtaacttcaaattgtagggaaatttgtagagttttcagcaaaggaattcataattaccattgaagatgtatgttgtctctctcccgttttatagggtcgcacagggaccatttaaataatatgatacgatcaattattgtttaggtaggtgacaaccttagtcccaccagatattatgtgatctgcccagtttgtcttcttctggatacattctcgctgtctttaggttcaaacctcttcgattcattttttaagaataagatttcattcataaacctctttgatttattaaatgcaaagatcttcaagtatttcagaaatttaattgctaattag

SEQ ID NO: 8115 - DNA, 891 bp, Prunus persica
  Intron number 5 from transcript ppa009817m (locus ppa00981 7m.g) derived from phytozome v7.0 (chr-ID scaffold_1; pos 6012959 to 6013849 reverse strand)
ttagcttcagaataccagatcacaaatctggcaaggtcagtgaaactcagcgtacaggaaatttatttatttattttttaaaaggaataaagtagaacaaaaaatcatggtcattcaatatggagctgtatgatatgtggtttcctctgtgtgcacacattcatgttgagtcttcagaaagtcattatgtttccggtaccattattatgtttattttgttttgatttccacagttgttaatcttatcatggtccctgtagcccaaactcgctttgattgtctcaattgattcttggattttgatccagcaattataacatcataatttgctaaattactagtttatgatacaaactgatttcatttgagaaaacagcaccactcttcaatctgtctgcaaaaccgaaggttggtcctgtattacagttcttaaggtggggcccagattcaagtaattgccactgatgtgagacagaattgtgacagcagcctctcccccaaaagacaaaacaagaattacttattaagtcctgtataattacagatcatgtatacctagctcacacatttagctcatttcttgatgctggctataaataaactaatttctcttgtacagttagctttaaagagacgtgtttggttttgaagttgtatattttcacagattatgtatcctagctcgcaaatctagctcattctcgatcctggttatgaataaactaatttctctcataagtttagcttagagggacgtgtttgtaggtgcaattctaaattgaagctcctaatagtataatgtgaaaatcaatgccaaattcaggcttgctggtaaaattcttgactctttcttcatacaattgcagctggacgtgcagtaccttcatcctc

SEQ ID NO: 8116 - DNA, 2010 bp, Prunus persica
  Intron number 1 from transcript ppa012866m (locus ppa01286 6m.g) derived from phytozome v7.0 (chr-ID scaffold_2; pos 15530244 to 15532253)
tcagagagtgtcgtcgtatcatttcagagagcgaggtctgcaactcctaatttctttgttttaattacttatgatctctctctattggtttttgttgttaggttttagggtttatggtattttgttaattaatttgttgaaaaagggttcgtatttgtttagggagatttttttggggttgtacaatgtccgtaatgtcctacatggaaaaaagaaacactaatttggaggagtatatgatctcataagcacccttcccttgcaaaccggttttgctagggcaacccctatgagccagggtgtgttgatatgttggaatttgaccatgtgggtttgtgtttgttttgggaaattttgagggtgccgggtttattttatttatttaatggaatttagttgtgtgaatttgtgtttgttctgggaaattttgatgggttggagtggaatttgggtttgtgggatttcctatgtttgctttctcagaatgtgaggagggaaaagatgtggagtttcggtgtaagcttaaggagacttttagggttggagggttttggggttttcatgtctatttcctcagagaactgaggttgaagagaataagatgggttgagtttgtaacctggcctttcatttttcttgtgtaatagacatgcatgcatttcattttatgactgttatagtcgtggaattgagggcttaggattttctatttcgttgttgaggagttcaaggagattgagaaaaaataagttatttatgtgtttagttcttgtaagtaatagatcagtagttgtttatagatgtaatttagtctatggtttcagtattaatttttctttcaagtttcctggtttcctgcgtggaggttgagagaaaagtggaaaacttgagattagggaaacagtaaggacaattgcgactgttcagttataactgactgtcgagctcccgaaccatgacatgcacggatgtttatgattggacagttatcaccaggcttaactttcttcttgagattatgaatgtcttttctgtattgttatgagataagatatgattttgctcctctcaccatgttttttattttgtctggataaggaagagagttatgttcaaaaggtggcatgggttacatcccatttatactataagtgtacataaaaatctaaaatagggtagcagaaagtcttattctcctctactttttggaccaaacaattttaactggtgaaacctgaactgtgttgaagaattctcattgcttcaaaagcaaagcttttatctttagccaaaggcaccaaaacatagattagtcacccttctatgcaattcttttaattgaaaattttctctgtagttcttcagagttcagagtccgtttgtttacaaatagtgtggttgctgacacaaaggaggcaaatattagagaaaataaacttcataagtttcctgttttcaggtgatactatggaaaacaattgtattaagttaataactgcgagcttctggtttcctgatgttgtttatgactgttgtgatttgattttattgaattaacatttctgtagcttgggtttctctggaatcttgcaagcaatctgaattgtcttcttgtgttttagttaaagttaacaccatttggattttgggaatcaagatcaagcaaatcatctctaaatggtggaagttctttttctttccaattaagcaataagaattgaaagagttgggtggcactgtggcattagctatgtcttatgaaatgatggaaaacaaatgcccattaattgtatctttactgaacagtggaagtgcttaccaaaaagaaattgcaccgtgaaaatcgtttctcagactctggttaaactaattgtaggattgttacccttcatgttgacttttcgtgcaaattgattgatatattcttcccagaatttggttagtggagtgtcgtcgtcctggtttcctaaattggttacatttttgcctatctttagatcttgaaggaag

SEQ ID NO: 8117 - DNA, 684 bp, Prunus persica
  Intron number 8 from transcript ppa001506m (locus ppa00150 6m.g) derived from phytozome v7.0 (chr-ID scaffold_7; pos 13507113 to 13507796 reverse strand)
caccatctgagaaagaattggattcttttgacaaggttggcttattcccttttatgttatgttcattatgagtgcactaagttaatgcttctttagttaaattttaagccagtattgttccatatatatttttgggttaaccatgcattaatggtcacaagggctctatacttcctgtttatgtgttgtagatattaggggacaatataagggatacttctggggcttgaacccagacaagctcttggatgtgcgtggatttaccaccatgctgtactgatagggacatctagatttttagtactttgaagtaatacacagcgccattgatctatatgtatatttgtgcatttgcatgttattttttttgtgttgatttattgatattatcaattagacttatgtagttccagtgtcaaataaatttgcacgatggtaaaattattatagatggtagttctgagccttgtcattgcagtggcctactttaactgctaagctacatgaacaagtatctgatttcatttgtggtcttactggtgaaaactataaaaaggttcttttgtggctcagtattcaagcttattcttttgatttggaacttgttgaatgcttctgatcatatagtggaaatggcctttggtgtcaggccttggagagtgttgaagaagcggtgataagact

SEQ ID NO: 8118 - DNA, 2080 bp, Prunus persica
  Intron number 1 from transcript ppa021837m (locus ppa02183 7m.g) derived from phytozome v7.0 (chr-ID scaffold_4; pos 2860014 to 2862093)
ctacgcttcgtggtctcgtgccctgcactgaaaaggtaaagtataattttcatgtagtttcaatcatactggttgattatacttgagattgttggattgttgttatagcttattaagttttaactggttattagatactagtcattggaaaacattactagtaggaaattggtcttaccttaaatttgaaattctttatcgaaaagttattcgacatctttttgctgactgtaaagtagtaacttaccatatgaaacttagattctttgaatttctaggcccttaatcagaccataagtgaaaatagaattgtacagatcaatttaagattaacttcgaacggctatttggcctacttgaccaaatatttcaaatatgaaacttttggcttaaatatgataagttttttcttcctattttgtggcaacaaggggttgatcagaatctgacaaccgggcagagctgagagtgttttgcttttaacagtcattatattctgtgccaaaaagcaaacatgtttaaacaaatataatggggtgctatgagaattctgttgaagagttattgaattgaatacatagattctgaactctaatgaagcttttctctatcaggaatcttgttctaatatatttttatggatcctgtattcaattttgctccaagaagcttaaggtgatcaatatgaaataccccttctagtgatatgctgtcattatctgagttatgaaatcatgaaagagaagatcattcgtgctttagtgcacatcattcaaattaacaaaggttttcattacattatttgtgcctttggagagtcaactctggtatggaagttacaaaagtcaactctagatatgttaaataatttgaaaagtaaacttcttccatacttagagagcttcaaaacatctggaaaatgaatctactcaactcatggatatgttaaattatttgaaaagctaaacatctaaaatactcagagcttcaaaaccatctgtaaaatgaatctgctgtaaatgtctaggtgcactttggatttgcattttttcaattaaattaagaaatcaagcattaggggtgggtgggatggggtggggtggggtggggtggattttcaacctgttaggtacagcacactacgcactatgttggaaggaaacgtagaaatggttttttgttggcagagaaactctgactttagtttataaatctactaagtcaagtgcacctagaacattttataagtctgtggttgtttaacactaagtatatatatgggatgctttgctgtcaatagcttcagtctttagctgaccattctatgtgttttgggaagtactgatgattatgattggatgatggggtacagcgccagctgtgtagtagatgccaacataaggtctacatcaggactataatttatggcttagatgtgtcttgctcaaccgttcaattaagatattatatcatatttggggcggtaagcaagaaaatatgtatggggaaagaagaaccactaaattttttatgttcaagcttcatagagtatcttttttaataaaaataatttttttaatcacacatttctttccttaatgtgtcatctaccccgctttccaagtcgaagcaagttggatgactagctctgtatttcctggactaagtctatcctctgataacttatgagcaaggtttttctcatgctactatttattaaatattaagtctacctaggtgagcttggaagtatgtggaaacttgtattgaaattgttaggtagcaggggaggccctgggaacaggcgggcaaggcggccgccggggcctccaggagggcccccaatttgtataatgactaagttaactgggtttatgctattgacaaagaagacatcatgctgatgttagtaaccttaccagccaatagattggccttgacttgttgtgaatgacccttaatatgtatattatatatgcatcatgtatttgtgtgtgcatctatatgcaagcatattggagaagctatggtgttggcaactgatttaagtctttaaccttgacctaattgctatttatag

SEQ ID NO: 8119 - DNA, 1556 bp, Prunus persica
  Intron number 3 from transcript ppa000553m (locus ppa00055 3m.g) derived from phytozome v7.0 (chr-ID scaffold_2; pos 7381001 to 7382556 reverse strand)
caatcaaattcatagtaaatattcaattagaaaaggtactttctctgccactgatgttcctattagaaataaattataatgttttagtagttttataaaattggactgcaatgcatcttttcctttagacatcttcatatcaagtcctaatggttgaagtgcaatgaataaggggataaaactttggtgcatatgatgtggtagctatatccattttgcgctgtatttgctgaacagtctgtgggagttataaactcttcagatgtgcctcaataaattgttatggcatttcacatatatgtgtaaattgtgtaaatagccgaattcattagtctcatatcgtgagtttattcaagaatacatgcgcattacttcagattctcaccaagtgaacaaaaggggcatgaaaagaaagaattttttttagacatgcacctgttttgacatgttcagccacactactttctttttttgaagaacttagaacgaagaaactttatttccaaagatgaggcatggggggctgacctgagtcatcattgtatcattgagatgttgaataaaatagcaattaatgtagtgtttggatcaaacctggatccttgcctacctgttcttccatgactctagttaggaaattaagggcagttacctatatataaaaggtgcaaaacgtaaaggtatgctcagttaacatgtgaagagtagtgttcttgcattttctgaccagatatgagggtgaaataagccaaaaaaagaaaaaaagaatcagaaatgctattagatgatgttctaacatttcttttactcctggttggggccaatgcctcactgagatgatattgttgtttctattttctagtaaatataatggctttttaaggaatgaggactggatccctaatgtctagtaaatatgaaacatacatgttttggagaaaaaaagaaaggaaataaataatgttagagttgtttgatatggcagaatgggaccaagatgtgttgttatgatgttgctttgatttgtttctttcaagatgtgtgtttgtgtatgtgatctttgttaagattatgcatacattttatgtgcgtttgatatgatattccaccatactctttattgattaaatgcctttttgacacttgtattgccacatatccaatcttgtataagtcctagctggacaaggaccaagaactttacgaagaagaaaatgacttgcatttttttgtcatggaacatcggagggttgccaaatttctataatctgaccctcttttaactatttcattacgtagaatattaaatgattacagcatcatagctgttctcccagtgttacaggtttgttaagtgatataaaaaatatccttaattttcttgtaacaagatggaatatttcatattgttgaatgagaatcagtttttcatcctgtgggccttagccactgttttgtcgttacctttctgattgcgtgtgtacaaaaatttcatatgtagttatttgtatttacttctttgtgttgcgttattgcagaaacacagcaccagttta

SEQ ID NO: 8120 - DNA, 1151 bp, Prunus persica
  Intron number 3 from transcript ppa021583m (locus ppa02158 3m.g) derived from phytozome v7.0 (chr-ID scaffold_1; pos 19990703 to 19991853 reverse strand)
ttacgtcttttacgaattgctccacgtggctttgagtaagtaaccctatacttcatagcttatactcttaacctgtttgattgtatttaatttatgatgttcattcaatattgtttaacatattctcctgctcttttgactccttgcattgatgcatctttatgcacttgaataaagttgtaataataaaatggttcaaaatgatatacttctaatcatgcttcttatttataaacccaatttcattaaattttgattgcagctctaaataaccttacaccttgatttgctgttattgattatgaagaattgttacattgtgtttctagaaaatgtcttgttggtgctatatttgtagaataagagaatctgggtgctgtgttcatgaggagtttcttttcttccaaggcctattcttggaaactaattgatgatcctccacataaggtccaggttctaccttgggttattgctcacgagagggtgaatgcctgtgacatggtgcagaggaaaccttattggtacctctcttctgtttggtgtgcaatgtggaacaattgtttgaatcatttaatgctccattgtccaattgtacatgctttatggacaaggctatttaggagaccaggttgagtagtcaacatggcatactgtgcggcattactgtttgagaatcctaagtttttcagagtgaggaaaacgggcttggtgcttggtagatgtagtgtactggaaattttttgggttgttatgatgccaaaaagaaaaagaaaaaaagaggattctgtagttgcgaaaagggaggatgtggatttttttattattggacattgttcgtttatgggcatccttgtgggctttaggttctttagatttaaaggactggtcctttcaggctatttattctaactggggatgctgttaattaattttgttctcattggtttctgtattgttgaatctttacttgggtgaactccagggtgcacctttcccttgtgttctacgtttgcgtttcttgttaaaacaataaaaattgaagtgtgaaactttgtaggcataattttcatttattttgattgtcttattttttatttattatttggcttagtagagtttggactctgatatatgtttattgttttctcagt

SEQ ID NO: 8121 - DNA, 1162 bp, Prunus persica
  Intron number 5 from transcript ppa003305m (locus ppa00330 5m.g) derived from phytozome v7.0 (chr-ID scaffold_4; pos 14955323 to 14956484)
ggtcagaaagtggtgaggggaaatcctaatccaaggtatagtttatcatcaggcagacggttttcaataataattctgagtcatttcatctgtttcaacatgtagctttagtgcttgtttgataacttagtgaatgctcataaaattgctgggcgttcttctctgaccattaatggaatttgataactttctgatactcatacaaaagttgggcttttttctctgacggttagtggattattctgaaaaatattgagctaatgataacatttattcaaacagttaaatcccaatctctctgcaatggaacacggtattgtaaggatggattttggtagttcacactcccaccctctggccgtttcacactcaaggaataaatacggatattcttaaatccagtataagaacttagtctgacagttgatagctatgatttgaaaaattgatgtctttcgaatttgaactgttagccttccattctcgttcctttttttttttctctttctttaagtgactgtttgcatcaaaattaaattttagtgtaggtaattgtgcaattcttttttgctactgttgcaattcttctcatttagtttaactggaacttttccaccatctcccttagccactttcccattttcatgtaagaaaatagagggctgtgcagaccctgcttattcataaaggactcctgagaagtggcaccttcagcacacatggttggggtatttggaatattgctaatttcgcctgatgttttaccccagtaattgcattaaacgtcaaacttaaaggaacaaaagaataaattatagatgtattctagatctctctgtaattgaaccaacctataaattatttaccttagaatgtaacctcattattttggattgtgttgggttagagataaacctgcatcatgctcgtgtagtgtgtttggttatcatatatgtaaatgtaccctgataactttgtaattacaatgttgcttctgaataactaggaagtggttctattacgtgtatctcccatatgtgcgctttcattgtgtggctaatatttgtctctagtctttttttaattgctacttttttccaactggtttatggggtttctcatcgttctcacatgctatgcaggagctattacaagtgcacca

SEQ ID NO: 8122 - DNA, 1215 bp, Prunus persica
  Intron number 2 from transcript ppa001888m (locus ppa00188 8m.g) derived from phytozome v7.0 (chr-ID scaffold_6; pos 11635087 to 11636301 reverse strand)
caggtaaaattttcttttcattcccctctcagattttgttattgcaataaattcagaaataagttcatctgctaaagcatgcaaaagaatagactcaaaacactaatgtaactattatattgaaatcttatctggtttacaaattcacttaatatcagtacttcatgtctagctagaattttcatgtttcgtactcttaggtaccctttcttatcttaaacagaaaaataaggtatatacttctgtcacagttcttcaagttcttatgatttgcgaatacttagcagttatgattataaattagttggttgaattaggtctcatattttggagagcacgcacttctagaaacagtagtcacaaagtggaaaaaatctacaaaaatgaattacaatatttcaatattggacttgaggaatgcatgaggaaaaaatgaatttgtttcccactacagtaaaaacgagattgataactggctcagaacacttggtctgtctttaactcagttaccatagggtaatttagaatttgcatctgaaagagaaagattgtcggccatagtaaataaatctgcatctgaaaaccccttatctattcttcttattttgtgataatgaaaatgcaataatgaaagattgtttgcaattagaaaggctttaaaatgcaatatctattcttcttattttccgataatgaaaatgcttggtgccttaataccatcaatcacgcgtcttgtggattgtcctgtacatgtgaaacatgtctatcgctgctgtaaataccaataaattcctttactttttaacctcaatgagagataaactgcctctgattaagccccacggtgatgaataatctacaagtcaaacgccatactatatctcttagttctataaaggtgtgttcggtcaaagatcaaaaggcaatattaatagatgtttctattatgtcgttgaaaaaagggcagataaatagttcttatcattacgggaatatgttatataacttataattaataactatagagttcacttggtatgagactactgtatcttactttagttaaaactaccagtagtttccttgaacacaactggtgggaatttatgggatactctacttatgtttcaattttctaaagtattcaacttgttatctacctgtacatctgatctgcccaaatatcttaccaagtcatgataattggtttcagta

SEQ ID NO: 8123 - DNA, 864 bp, Prunus persica
  Intron number 1 from transcript ppa002116m (locus ppa00211 6m.g) derived from phytozome v7.0 (chr-ID scaffold_5; pos 14430534 to 14431397)
catccaccactggtatatttacatttcttatttcgtggtattgattctttaactaattgcttaacatacccatgatatttgaaaatttggaatttctagtgatcagtgtgattgatattcgcttatgtaagtggttttctgtttgattttttttttctttaatgtttgcaaagctgttgatatgtccttttcgtttctaaatttggtgagactcgtatttgtggtatcctttttattaatttgtcttgtgtgctgcttggagctaagaatgctggaaataaaaccaaaagagaaaaagtgaaatttatatgaaaatacagggaatcaatgctaaagagaaagatagagtaagacaaccgaatctaaaatggagaacaatctaatttctttttaaagttttagtagattaatacgaagtagcctaaatttgaatactctttacagaaaataaatcaataaagcaggaacttgtttcaagatcgttaatttcttgaatgctggatatctttatttaaattgcagaccataatcaattgggaaaagaaggaaaataattcaaaccacaagaatatctggatgtgatagaaaatgtctgattttgatgagctcctttgtttttctataatctctaagcacagccttaacttttatttactaaaataaaattttcctacacacttttcacacacagatataacttcatagaatttctaatgtaaacctgaggactgtagcatcttattgcaataattttcctcttcaaagaataaatcgtatgctgcctggttttttgaagttcttttttatactgacagtttctgtttcacttggttggtcaactaatgtggtgtaggcatcccgatc

SEQ ID NO: 8124 - DNA, 2574 bp, Prunus persica
  Intron number 12 from transcript ppa001665m (locus ppa0016 65m.g) derived from phytozome v7.0 (chr-ID scaffold_5; pos 4214032 to 4216605 reverse strand)
aaccgaagtcattttcacatcgttattttgcaggggtaactatctcaccatcgtatttccctttttgaaaaaaatcttttataagacgtgacattcttttctagaagctgttagttaattgctgttaatcttggcaaaagtagtttttacgctgatgcattctttaaattttcatactatcactttattttttggcggaatgagaaacttctatccatgaaaagaaagatgttcagggaaagatagacaagaatcagtctaagcattcctagctagagcatgacatttaaatttatttctcacccattgagattaattaaattaaatggagtaccattgaaattcttagaccaaaggaagggccaagcaatgacactaaatgaaagtccatttcttgtagaatagactaggattattattcttgtatatggttatctcagtaatttagttcctgagggtttctaataggattttaggtcaataaattaggtctttgtatttctgtagaggtagacttgattcatgtagtaccagaaggggttttagaactttgggtagaataagggagaaaaatgagattagaattttcagaaagtagaggaagaaggagctagaaagatgagatgagagagacattagtttatggactggggaaagagatactcagggattcaagaaggataaactttattcatcaaccaagtctggctctagagaactacaaaacccttaatttatatagacctaaaaccctatgagaaaccctcggtaacgtaattaattaaatcaacctaacttcaaaaaccctaaattaaaacaataattgtagcctattctgcataaccatttcccaaaccctgagttaggtagcccatcatttaattattctgcataaccatttcccaaagcctgaattaggtagcccatcattttcctttcctcaacatcaatgcagaccaagacaaacgcttaatcaaggacgaaaatatctgccaatatacctacggattggattttcagagtgtcgaccccctttcttccccccatatcaccgatatttcgttgatttccctgatatttgttgacagttctgacatttcccgatatcagcattaaaacctagaaattttttgtgatttttgaaggtaagaaggaagaagatgcaaattcaaaccaaaagaatctctgatcattattgtttaaaacctctaatgaagtcaaatatgaaccaaattaaaccttaattgaatacccatctactaacccagccattttatcaatctaaatatccaagcaacctggtgatgattctaatgcaaataaaaccaatcgttatacaccaataccgaaaatgatttcatttttatatgttaatcaccaagaacttccatctctaagctgatgtctctccttgagtcgcaaaactcttctccccttccaactcataaatttctttatctaggcactgtttgtcgaaaacataaaaattctttcgttccagtctcggcttcctttttaactctaatttaataaacctgaaccttcccgtctctcaattgacactattaccttgcttgcatttatccctttatgccctttatgcagccacataggcctgaatggtaaaggacccaacctaaaactgttggaatcccaaacggcaggtagatactaccccaaccaaggctgtctgttcaacacttaactcctcatgattttggtctagttgttggtaagagttggattccaaaattgtgggtcaaagagcacaggctatctgcctaacacttgggtaactcccctcctgtaattgtgaccaggttgttggaagagtgaaaagaaaattagtaaaattgaataggagtagaaaaatattatagaactggtttgagaatattttgtcatattatctttagttattgtttaccaagaaacaaaattgtcgtgtattatatagtttgtagctgtataccagattattcgatgcacgtttatatgtcaatcgtttaacataaatgtataacccttttcttttatacggtcacatgtgcccgatgtggattaagtataaaactaaggaatgtcatgtagtaactaatcacaagggaactaagggaattgagaatcaagtcttcatgtactgctagcattacatctggaatgtttggataactccttgtaggtttactaaattatggctttcacatttttagattctttattttcacaggctctctcaaagaatatacatttcatggcaattgggtgttcttttgcatgttctgtctagcattctatggcagaacaatgctgtacagttttttcccctttcctttgctacttaaccacttatgtttataacctgacattcctgaattactatcttctctcccctttatggtgttttctggagagttgaggtcaaacttatgattaatatgattatgatctccactaaggagtatattggttgttgcacaacctttataaggggctcctgcactgttgtgtttttcaagtaacggcactgatccttttttgtttttatattttcaggctggtgtctcgcctctc

SEQ ID NO: 8125 - DNA, 1390 bp, Prunus persica
  Intron number 1 from transcript ppa011578m (locus ppa01157 8m.g) derived from phytozome v7.0 (chr-ID scaffold_8; pos 12637467 to 12638856 reverse strand)
actggcacacagggtggggggcaagagaccactgcgtaagtaagacacccttggtttttgttttttagtacattgtttcaagagttgtgctttattttcttcatgttggttttggtgaattttgatttgttggtatgctgatatgagtattgtgcactttttggtttgtcagtagcgtaagatgaattggaagttgatatgtcagaattatttctttttgttatgtgtaattagcaagagcattggagtttgtgtctgagcattacttgtattatatgtagatatcatatagtggttggtagctttccaattttagatgtagttccaatttgatctcagagaacagagaagtgaaagtatcacatgaagtgcggtttcctgagtagtaattggtcttttgaattgctttgaaatgagtgagagttggtagctttccaatttgatttcagagaacagagaagtgaaagtatcacattaagtgtgctttcctgagtagggtaattggtcttttgaattgctttgaaatgagtgagagaagggggttggatgtcaaggttctcatatagttcatccatgggagaaaggatgtgaaatgaaggaacttttaaccccttttcgagacatctcctttgggtataaattataaggtgcttgaataagaaacttgtttatttaattaaattaccaaatattacaaaactcgttttgtatttcatgaggttatctgaaaactgttggagatattacaaaatgtgcccaagacttacatcccgaatgaggaactctttgcaaacttcatcattgtcggaccagacgtaaatcagccacgaatgttccgtttttgtcaactttaaaccatccagtatattttatttcctagttagtaaagattgacatcgatgcattagatcatagtgcctgttagaagcaccagctacagcttaattggtattaaatttttgccatattgtaggtctgtgattgagtctgatctttatcaggagcttatggaaaggagagggtacctccacaaatatatcccataggtcccggctagtttaaagtctctgttgattatatgcattattggcttgtcaaattatgttacacttgaaatttgaggaagtaaataaataatggattctgaatttctaaatcgtgttaacttttcttttgtgttttcctatttagtttgtctatgtaaaactcaaaaatatatattcacaatagataaatctgtatgcttggtttgttttcagctcctctctatgtcgtgtagctgttaccacattgattaatatctttatgtgatcaatctcatccacctataaatatgctaatattatatgtatttcctgcagttggacagcaattactcagttagcacacc

SEQ ID NO: 8126 - DNA, 1160 bp, Prunus persica
  Intron number 9 from transcript ppa001815m (locus ppa00181 5m.g) derived from phytozome v7.0 (chr-ID scaffold_7; pos 13296175 to 13297334 reverse strand)
tattactcccattactgcagttagggcagagcaatgtgagatgttctttctcttatttgcttcattttcattattatctacttcatgagaaacaataatactttttgttggtagatatttccttttggaaaatttggaattgagtaagtgcacattaaatttggacagtgtggtttatcttattaggagcaatccaatatggttggttgattttcataatgtatgattggcatggggctgtgttttggtttggtttttactagatcaattgatcttcaactgactatttctaggttttggcaaccacttgtaacaaatcgaaacctgaaatcacatttactgattactgactgattattaccaaaaacctgaatttttatgttttatatgtaaatatgtattagcactatataatataatatctgatattatatatgaggttttcattggtgccttaatttttaagtagtacattatatgataactcatataatagaaacctccactttgaaactcctagctaactggatctggtggaaaagcacaaattttaaaaaaggaattttatttatgacgtctagctgtgtggtgcatcagtctttttaagattgaatctgttgatcattatacaatcatatataactattttctttttaagaatttgatgttattgattggattaattttgatcagctgttgaagtacagtaagttccacaccttgctcacaactgccaatgggttggatcaaagatctgatcccattctggtttttgccagattaatgtttggttaccttacctaaagatgatcatttaaatttgtatccaattttaaagattttatgtgtagtccaattacatttagaattacgtagattaatcccattcagatctgggtttgataaaaaagaatatagttatatatgattgtataatgatcaacagataataaaaaacagaaaattagaaaccacttaacatatgaaaaatagtaaaaacatgaagaaaaaaaatgatcgagccagtgctaactcaatcatgttagttgcattagttgttgatcgaattcatgatgatatacttttcctatatgctgtattgattccacgttatttaatctccagggctcaaatctatctgcagtcacgtctttctatac

SEQ ID NO: 8127 - DNA, 1169 bp, Prunus persica
  Intron number 1 from transcript ppa006602m (locus ppa00660 2m.g) derived from phytozome v7.0 (chr-ID scaffold_1; pos 24973508 to 24974676 reverse strand)
aggtcggttttgttctttttcaatttctctgattcactttttacgcttctgtttggatactcagattaaaaaagaaaggtaaaaaaaagggagagaggtagagtgctgctcagctgagctcgattagttgtttagcttctgatatttgcatttgaattttttttttctgcttttttttttcctgtttgaattggtttgattgccacagctttaagaaatccgagatatcaatttttttattacaatttattttgtctcgctatttacgaatttgctagatccttgtactgtttcgtttgcggttttggtcgtggagttttatatttaatttttaaggtaaaagatgtttgatcggaaaggcttgatgagtacattgcatatgtttgattatgtgagctaacttagtgatcgggtttatgcttttggtcgttgtgttctttatctttgaaattaagcaagcccagctgcttgtctgtcttaattataatagtgggggaggaagtgggtctttgttatgtagtttgggtgttaattcaaagggaacacgtggtctactttaccatggagggttttgaatgggtgtttgatttgtgactttgttttagctactgattgtcaaatggtagcacatggttgcttctttctcggcagagttcttgtagagggcaaagaggaacgagcacatgatttcttgcttgttgtttctctatattgcgtttgaagaatgtctattcaaaaaggtctgagtataagtatgcagtttctgctgttaaatggtcaatgtattctgtgggttcgatttgaagcacagggaaaagtgcgatgttgttattgagagagatatagagaaaacatcttacgggagcaccttaaccttttgatagtataatcaataatgttaggttagcagctttgggttgtgagttgtaagtgctatgcccatctacttttacgattttgtcaaccctgatatatgtgttgttttgatagaaacaaatgttcaggttattctcgtagttgtataatcttgtattactgagtcgtagagtcttgcttaaattgttgtgttccttcatgagggtcatcatttcttttaaggggaattctcaactgaaaacctgttaaataatgcagatcagctatcgctttgtacttgcagttcatttttc

SEQ ID NO: 8128 - DNA, 884 bp, Prunus persica
  Intron number 3 from transcript ppa007299m (locus ppa00729 9m.g) derived from phytozome v7.0 (chr-ID scaffold_2; pos 12349691 to 12350574 reverse strand)
gctgtcaaggtagattaagaattttaagaattctgtgatttttggactgagtatttgcttcaattgtttattactgctcatgtgtggatcttataaacctattttctttattgggttgttttgtttctgggtattttttttttctttccttttgtgttattgacaactctgtagtctggaagatggaagtagtaaagtatatgggcatcttattgtcatttgtagttgagctgacccagctgtatcattttccccattcggagtttggtgcttctcagaagataatttggaatgaatcacagtaaataacagtctgttgttactagtttaggcttctaaagtaattggtactttgtcatggtttaagagaagtagataatggatacattttcctattgtaaattgataatgaaaagcactaagaaagtaacccacacatgctgtctttccctctttcagcatttggactaaacttgtagctcctcctagttatgccatagtacatgatatcgtgcattatgaattgctcatcactacacatcgacagtgggaatttatatgtacattttgcaattatttaacttgtgcgttttaccaaaataataataataataataataataataataataacaaaaggctgaaagtggcccaattatgttaagtagtcaatatgtttgtgcgtgtctttgggtctatgtgttttgctgtggaaggattggcaatgagcagagtgcatgctagatcagttgtctgactttttagtgaattgttttaatgtaacttgtaagcttttttcgcccttgctgcttgttgtgatttgaatatttcaaatgtatttttctgtaggcaatttctggttccacatctagtgctgagacgag

SEQ ID NO: 8129 - DNA, 3669 bp, Prunus persica
  Intron number 4 from transcript ppa015680m (locus ppa01568 0m.g) derived from phytozome v7.0 (chr-ID scaffold_4; pos 15987144 to 15990812 reverse strand)
aaagttagccctttataccaaatcataatgaaccaccacaccaagatccaccacttggacattcttcttcatccttaccctttcaggctagaagaaacgaactagaatagatttggaagagaatgttatctcaaatgagaccacccagcaagctataggaagaattagccttagcattgattcaattgccaccgacttctggggagtccgtaacctattggcaaaaaggaaaaaagagagagagcagcaaaatttatgtgggatgccattaaggagacctcaaatttggatgaacgtgcctgttacaaagcgctttctttgttgaatactaacacaaaaaaggatgcattttttaaaatatcccctgagaagcactcaaattggatatcctacaacttggaatgagtggttttttttatagagtttttgggaatgactggttcgtttagaatgattggtttttgggatttttttttttgttgataatgcaaaaggatttttggactatttgttttgtttatcaaacattgttgtttatggagggaatattgtgggaatagtgttgtgtagagatttctaaaaactctacaaccaaactttgagagtataaatcacctagcatgccatatctaatatgaaatcaaaggaagagcagaaacattaaataaactagggattcatgcaagtcttatttagtcccaatctttataagtctatgcaagtgtgcaccaaagactctctaaatctgatttgagaaaaagataagatgttcatacccttagagcgaatcttgaaaccaagaatggtgttcaagtagagggagtggtccccttgttgttggctctccctttgatgttgattctccaccttgtagctcttcaaataggtacaaagatatgcacttccccacagctcttcaccaaggattgaatgagatgagagaatgagtagacaacaagtgaagagtggtactagcagcctcacttgatgtgaccggttcaaggggttagggagagagagcttgatgttttctctcttccaatttcactaacttgaaaaaccccccttacgatggtaggataccatagctacacacttatagaatcaaaaatgccacaagagtaacaaaaataccatcatgccccagtgtagccgcacccccccttgtatgtcatcttttgtgctatcttggtccgacacattaatcctataatgtgtcacatatgtgcctaagtctatatggtcaaattccttttgaatttctgagtcatatgagacctttaattaaagtttcataactttaattgaataattaaattaatctaatcaatttaattactctagtgacttaactaatttaatcattcacttgtctaacgagtgttggtccctgtaatccttagttgacctgtcaagtgtcgagtcaaccgtttgacctttgacctttgacttttgacttcaacttttgactttcacattgacattgaccaagtcacaaaatcattcattctcttcttaatttcccaatcaattccttttcgatgtgcgatcttataggttctaattagcgagacagtgggtatgaaagattcactccgaatcaagtgtgaattgtatccctccatacaatacaattctccctattggcgaagactaattataattagtccttacagggcttccacaagccatgagtgacaactagcagtatgtcatggctacccaagctaaaaagaattcatttagataacctagttattttttgaatacaatgcaattcgatccttacctagttattttttgaatacaatgcaatttgatccttctctaattcaatactctatgtcatattctcggaatatggtaaacttgtgtcaaaatccctaatatgacatccctagattatatgattcaatttgatgaaattgcaaacgttcctgtttccatttccatatgatactttggccaaagattcaagaatcatatctttcaagtattctctcttcttaccaagagcagagattctttgttgtacattcacatgtctctgcgcacatgctgagaatcctgaggaacacctttaagtcacgttattttgatatgaccgtatagttctctcaaagagaaacaacatatacacaactataatgtctcaggtctaaagattaatttgcattatcacaacttagaattctttgtttgacacttgtgagtaagacttccatacaagaattctagagttgatcgcgttcagtggactccatcttctatagagcacctacatatctgtctcagtgtctctacacgaatgacttgagactagtcatcctcccaattgagcagacgtaatgtataccagtctttgcaggtcaccattatccaattggggatcttatgaccaggaacattttaggatacgatattcatatgtatgggaaggtctcgtgcttctaacttctttagaccacttttcatttatatcttaatccatggacttgttactttgtgtacgttatgtatctaaagcaacgttcttacccctttgattattatatattatttttttaaaattatccaatttttatattgacttctagaacatatatctaacagtttatgtttaaatactctattggttattaaataattgattattaatacatcaatttgttttgcttttcggaatccttagtttcttggaatttgattttatttctggattatcttgtaaaatatttattgcttaacatgttttagctccaatgcatatgtgtgacttgcaatttgtatattgtagctccaatgcatattcttcctctagtgcatatatgactttattataaattgtgtttgtaatttgtttatcattttatttaggctgtatcaatatatataatggaagtagcagaaattaagaggcaagaaattaaggaggacgaagaaatttatgaaacagtctggaatttattaatggcaattcaagtaatagctcatgcgttgaatgagattatcatgcatagtgaaaatattgaacgtccattaacccggcgaccaagtactatgaaaggatataattatatacatcattgaatgatgatccaaaggatttccgacaaaggtataaaatgtatcctgatgtgtttcaaaagttgtacagtattattagaggaaaaaacactcttacaagatacaagattcatttgtgtagaagaaaggcttgcaacattttagcttattgtgggtcaaaataatagatattgtctagtacgtgatacatttgaccgatcccacttcactgttagtaaaaattttaacaaagttttaaaggccttgaacacaatagtaccggagatgctagccaaacctggatccgcagtaccaactaaaataaggaaaagtacaaggttttacccatactttaggttatatgttgtttggtgcaacttgttttattcaaattgtttatgtttaataatatcttttaaactttgggtttatttcaggattgtatcagagctattgatggcacacatattccagcaatggtaacggaacgcgacataagcaactatcataatcatcatgatacgatatcacaaaatgtattagcatcttgtaactttgatttggaaatcatatatgtccttactgggtgggagggctgagctc

SEQ ID NO: 8130 - DNA, 1687 bp, Prunus persica
  Intron number 1 from transcript ppa015556m (locus ppa01555 6m.g) derived from phytozome v7.0 (chr-ID scaffold_2; pos 16692088 to 16693774 reverse strand)
acccatgtcttgactctaaagtccgagttccaagtttcaccagagtcacaaaatcgagtgtttgaatatttttaaaaacaacattttgaaatttatctacgtgtgcctttcagtacaagtcaaattttttgggaccagttattagaaagacacaatatggtactagattttccattacgaaatgaataaagttttgaaataaagaaatataaatagaagctatgatttaaattcgatgcaattacgagataattaaagtagtattttttatttcaacgtcgaaacaaatttcaagttcgagtgacttttttctttttcttcatcttcaattaataaataaataataacttgcagcaaaggcatgtaataattgtaaaatttgaaattcaaatatactcctttttgggcccaaatttagttccacgaatgccatgcaatccccactaatgaagacagcagcaataccatcaatcaaatgatcaaatccacaaccttttaatcagtcccccaacgctcctcttcaatcagtacatgctccgttacgccacgtcagccgggacaacacgaaacgacgacgtctagaaaccagaccctaccatttgcttttgctcttcccaatataacgctccgttccttccttctctcgcacgcgaaactcgcgctctcagccaaaaattcaagcgttacactcagacgaacgcttcacacttgttagggcttcgcatttgcattttcttggagccattctcaaatcttatctgaccgactggaaagttccacagcggtaaggtccgttttcttccttgtgctctgtttgtttccccagaaaactggctgggaaaatgcatgacttgtcaacactccactctctcaaattcagtgcattgacttaatttgtattttcgtttctttttttgaagcaaaagttgtaattggattctatgtatttctatttttggtagtttctcgggaaacaaacaaaacatggatggaaaattgtcactcgttcttactatttgtctttgtgcttgcttatctgtcagttgtgttgacgtgtcatttgagtttctgggcttattacatgtcattttatgcttatctgtttatgcgcgctgttttgaattttcataaattttcaattaaaagttatgatgtaattgtaattagacgtgaaatgaagatgttattttttggtgtgtcaatgaagattggttgctgaagaaaaatgtattggttacacaatgtgccaaacttaattttatcaaacgatttactcataatttctataatttcaagtgtctgtaagaccaaagaagattggaaaccaactacattggatactcacgaagaaaaccgtcatttgaactaatcatgtaggtttttgaatttagagatccgtcattgaaccgattaaatgggattggattggattggattctgaacacccttgtcaaatgttaatgtgtttttggtcatttgaaagctgcaaaaagcacactcaataggtcctgtaattttattttgtatttgttttccggatttttcttctttttataactgaaagattgattagaaacctgttagtttggctgtgaattctcataattttttgccatttacagtgaggttgctgcttcaccatgttcaatcagcgtagcagtaatcagtttgtgcatttggaaacaaa

SEQ ID NO: 8131 - DNA, 1913 bp, Prunus persica
  Intron number 1 from transcript ppa024587m (locus ppa02458 7m.g) derived from phytozome v7.0 (chr-ID scaffold_4; pos 18387786 to 18389698 reverse strand)
agagaagtatgtatgaccagatggtgctgcatattttccaatgaaatcattttcagcagtatgtgcatcagcttcaccactaaacacatcatcaacactgttttgcttgttaggcaataggcactcctcaatagcaattgtaattgtatatttcttcttgttcatcaatgacagatatataacaggcacatctaagtcggtctctagtataaatggaggatgatccgacacgaggtaagtcatctcaaaagccccaacctcaagctcattaaatcttgaacatatatcataatagaaaaccattagagtacagtcactttgaagtggaatcgaaacagtcttatccttaaacacatgtctttcaaatacgacaggttccattttgatgcaacaaagaaagtacaagaatatcaatgtaaacattttgtttaaaaagaaaaacagcatcatgtaacaataaataaaaaaaattcaaaaaaacgtttgtaggaaggcaagtgtagacaacctgaaacaaaagaacttgtaatattatcgaatggatgaaccgcacaacagcaaaagagaatgcaagtgtggaaaacctgagacaaaagaacaataccaattgatgatgaacacatgggggttacaactagtttacctaccaaactaacaaacatgttttgcccatcaagaatttatttctttcttaatatgcataagcgtacatttagggggtgtattcaattaagattttaaaagagtttaaaagtttggatgtattcaattcagattttaaaagtgtttgtaaaagtttgggtgtattcaattcagatttcaattgatattaaaaaaaaatacatcgaaatctaggtatattcaattcttactttttaaaagtcaaacaaaatttaggtgtattcaaaaagtaatttattttgaaggaattaataagttgcccgatttcgttagaaattaaagtggtaagtataaatacaaaaggccctgacaaatcttatgtcaaccttaaaaactttgaacgtgctctacgctttccagtcctcgaacgtgtgtgcttgtcaagtgacggtaaaaaatctcctctttttcacgttttcatatatgtatggtccttcatcgtgtgtttgaatatttgttgttgctgtacatcaccatatatcgataaacagtagcatatatatatatatatatcatagggtattctgctgaattgccccctgaacttgtacgtaatgctcaatttaccccctggcctttttttttagcaaattaaaggctcgaattaaattgtattatcaatgttcccccccaccgtcaaaattcgaacatttcatccattagtccgtctatttgacccacgttgacgcttaattgagggttattttcgtcattaggcgtggattgaattagcaacctctcctctctcacacacttcgcacttctctttcacattggtagggtagggttagaaagggaccgaaatttgggcgggaaaaaggacgaaatcgaaggttggaatcgagggaatctgaaagctttttcataaaggttcttttggctctgttgattcgacgcagcatgagtctggatgtgttgcctttgcaggtgcggaacagagggcctcctcccaagtacagtaagtaatcgattttcccaatttgaaattgtttaagcttgtgtggtccttggtgtcggttgtttgcacattttgtggtgttgtctgatatgctgttttgaatatgaaacacttgtggtcccgaagcatttgtgttgttttgtctgcataattatcggtggacgaatggtagttgggcagtaaagaaaagttggtgtgataaaatagtggttttatatataattttctgttttttttaggtgatccagatttgttctccctagaaattcaccat

SEQ ID NO: 8132 - DNA, 1932 bp, Prunus persica
  Intron number 11 from transcript ppa000815m (locus ppa0008 15m.g) derived from phytozome v7.0 (chr-ID scaffold_8; pos 21083216 to 21085147)
gatcctcctaagttgtttagagttttggggagaaagtgccttcagtatttccaacatatttcgtagagagagagttttttgcttgtgttaatagcttctaaatgatgaataatttccttttccaactatctatgtttgctcactgatatgaatagaatgggataaccctcaaatatgcttttccatggaaaaccggggtagtagttcagttgtataagttagcaggtgaaagcttcttgaaattatttcctcctcatcctttttctttattttttcattaaaaaaatataattagttactattaagtctgaattcttgatcctgcacagctatgggttttgtttactcttttctactgatggtctgttaagccatcatatataggaaatctgtggattactacgtcatcataatatttaggcctcaaatgacttccatggcaaattgaatcttaaatggtatttcatttctgtattgtagattttataaaatcaatctgtcataatgtctcccagggttgcaaaaaaaacagaaaacccaatcttatagcagttgatgtggctcttaaaatcccttagatgcttggacttggtctggttattattcatattttgcattttggttgggaatgtgacagtacaggcatcagtattatatggtagattatacgtgctgcatagagcaaaagattggaggatgtcatttcttccatgtgacaattgctgggtgtttgaaagatggtgcctgagtgggtgttgcatgcctgatcaaaatgggattattcagtttggttttctaagcatattaatggctttgtttgtttgtttgtttttttatacagaaataaatcacacctaattaccaatccttacttccccttctattcaatcaccattgtgggttgcgatacttccgagggctgttttacaacacacatcattaaaaaaatgtgctccaaagatttatttgatttggtcactcgttatttgattttgttgttcatgtggtgtttcattgccctggattgctttcatcttgtgacttacaaatttaaattcagttttatttcttagaagaaaaaaaactttaaatagtctggttttagtaagatttggacactctttgaggtccacatgggtttttacctcaacggagtcaaatcctagattattactatggtgggttgaatgtgaatgatttccaatctaaatgtttgctctaatttaattgggaaattcttccaagcaggcttaagtgaatggaaatatcctcggtgttgaatttataagcatgaaataatgaatgagggtttgttgctaatggctagtctgaacttgaacccgctcaagtctcttaactgattactctccgatacccgtctccgtcaaacttggtataggacttcactatgcaaaggtcgtattgaaactctggtaacaggcctcatgttctgtatctctcgaggacttcttattctgaggggttgactatataatttggtaaacgtagtaactggatgacatgacacccggatataaaaaccaatgaactacccctaattattttcattaaggcatggacagatgacattttgatgcagaagcagacagtttctggataatgatgaactcaaccattaattttcattatgtaaaataacatgacttgttattttcagtacctagcctctttcttggcaaggtagcttgaaaacttgactactagataccccacccatgtctggagcacaaacatgacttgttgtataatgaagtacgtttttttgtttctttttttcctgatttactttggtacttctttggttggttggctggctgacgacttttctaagtgttaagtaacattttctgcggatgttgaccttttttttattaagtttcctgtcctttcctttctgcagaaataaaactg

SEQ ID NO: 8133 - DNA, 913 bp, Prunus persica
  Intron number 5 from transcript ppa002228m (locus ppa00222 8m.g) derived from phytozome v7.0 (chr-ID scaffold_7; pos 16656262 to 16657174)
aagaggtatgggagtgatttataatctcaaacatctgtgcagaatgaggattatttaatgaactttgcttattagtatgattcttttcattctgatctgacggcattgaagtattagttcctccctcctgctatgaatttggatttcttaggagaaaatattactacttagtagcattatgtcagataagaaattggtattctgatcacttagttgagtatgacatcaccaagctttatttctaagtgcagttcataagtaagaagttttgttttcctatgagacaggttttatacctttcggttgaatcctttgactatttctaacaattaactcgttttttgggtgatattataatgaaccatatgaaggatatgttagagatttttcatggtttattcttttggttatgaaaatggataaatttattgttggtgaggttcgtctttgaagactaaacattctgtacttgccggcctagatacattctatggagcccaagtattttgacgattgctcgtttattttgctgtcgtagatgaaaattgtctgaatgtctggaaacactagacgttttgttctccctggcattccaaacatggcaatatcactaccattttagcgatttttcaaacattcgcaacagtggttgctttgttgaattgttatttcacattttacgggatctttgattatattgctttattatcttaacttattccgtggaattaatgctccggattttgtttcttgatttctgccataaaaaaaaagtacttggtgttgtgtgtttgagtttctacaaaggactgtgtgcattacggtggttattttattagattagttgggataatgtcttcctcctctgcctctttcagagttgggttccacttcagtatcattcctcagaaag

SEQ ID NO: 8134 - DNA, 874 bp, Prunus persica
  Intron number 16 from transcript ppa027152m (locus ppa0271 52m.g) derived from phytozome v7.0 (chr-ID scaffold_3; pos 4228635 to 4229508 reverse strand)
aaaggttttttttccccgctgctatctcacgacttgctgacagctttcattaagatttcatgttatttgcttatcagatatatttttaaaatgcataattttggtttagtgtgagatcaactttacattctttttcaaccagatgctagtttcaaaatgttgatgctgtaagtaattgtaaactttttgattttcttccacccatccccatgaaacatgttgagaatacaataaaattctactgtaatagttctttattgactaagcatagttcaaatataacctttaacaatttacaatatttgactttagttttccaattccatagatcaaatttcgagctctttctacaacctggcttttctaggaaaaaggtagaattcatttgaactagactggattctgaaacgatttattcaattctttgtttttatagcgtttaccagagatatgaagccactttggatgatctttaatgtttatgggccttgcccattttttattttgatttgtagattgttgtcaaatgccatgttggatttagactcacaagcttgtagttaaaaaacctttctgttcttaatatgtattcctctaaagattttttattttttttaaatattggttttgttgagagtatttgtcccacatttgagaatggaagccttgcataagtgctttaaaagatcttggggcctctccacccattgccaattggttttgggttggatgctcacattctaaaaggtttctataatcgtttatggtttaattagcaacactgacctcttgacttgtacgtgtatatgtactttgtttaattttggatttattaacaggtttgcacaaccaaatcgtcaatctcaaatatcgc

SEQ ID NO: 8135 - DNA, 503 bp, Prunus persica
  Intron number 2 from transcript ppa016626m (locus ppa01662 6m.g) derived from phytozome v7.0 (chr-ID scaffold_6; pos 26417224 to 26417726 reverse strand)
tcttttaccagtgtgtttcgctcttcatccatccagtaagttagtttgcacttcttgttatcacttttcatgtttttattttttatttttaattcctatgaattctgtcttaaagccagttgagacttgattagtttttgggatttattttattattttactcatgcaaatttgggaagatgaataacataaacttacttgcaatttaatgtaagagtgaaaggtggttgatgtaataatagtaggatttattttcctagaatctggaggatactcgacacttcttttcgattctcggtacctttagctgtaagttatttactcaatatttgtttaaaataaattttccatcttctttctgtagatttcttgttatgggtttgttgaggatttagagaatgaagaagattctagaatcttagattgtgaactaatgctgctactttgtccgcaaaattgcagcaggttgtcatgaacctcatataccacatttaagtctcttt

SEQ ID NO: 8136 - DNA, 262 bp, Prunus persica
  Intron number 2 from transcript ppa006410m (locus ppa00641 0m.g) derived from phytozome v7.0 (chr-ID scaffold_6; pos 742989 to 743250 reverse strand)
aaaagttgaagccgtttggatcagtcttgaatcaggtagtctttactagaattagtttagcatctggaggccaagtataaggctataagccgctgaacacttttataatagcagattcactatttgtagtcctgtctctatatatatgtgtactagttcaatttctgtagaatcagaaagtgtgagctaaaaaaactggctttacccatgtttgaccaaatcatgctaacaattgttctttaaaccctccaaggtcaggcca

SEQ ID NO: 8137 - DNA, 2318 bp, Prunus persica
  Intron number 3 from transcript ppa012557m (locus ppa01255 7m.g) derived from phytozome v7.0 (chr-ID scaffold_2; pos 12941738 to 12944055 reverse strand)
tcaaggctttgcttcaggtactctaatcattgatgaacgttgacccattttgttcctactgcttcataggtttttgagtggctgctgaatttaaacagcttaaacattgaggatgagttaaaatctaggaagtacctaaaagtacatcagttttctgttataaggattttttattggttacaaaacaaactgatgaaatgaaatttgttagtatcaaaccatttacacataagataatttcctttgaaaatatcaatggtatacgtcccatttggtaggaaatttcatataaattgtgaagtcaaagtaatggattcttgacttaattttcaggtgcggcctttcttgcatcctccataagcttcaatcacattatcttatgtttcttgagttttaggtgttactgcaacagtcaagtcgtagaaccaagttttcgcttactaagatttgtgatccagttttagttttggattagggaaagctagttatctgcacatatgcttgcaattttttcaatttaatagagcacaactgctagttattattactctcacaggattttatatttcaactttaaacttactaaagtcagttagacccataaaactcttatttatcaagatgaactgaaacacctttaagttgctgtttgcgacctttatgcttcctgtttaacattaatttttcatggtctgaaagaaacaaccctttgtctttctttatttggtctggtttagcatgatttgacgtagtaccagtttgtttgagggttgggttgcaataaaagaggttctatagatatgaccgatgagttctgctttaaatttatttgtctgttgattacctaatttaaaattactcattttgactgaaagaattcatcatcctgagtcagctatacttgttacaataggtttattggttgaggcattaatggaagtcctagcctggctagttctctgcagatacatgctttttctcttaaattgattctactgtcttcttgtatgtacaattgccttagagaaaggcgattggtgtttgtgatgtagatgttaggttggaagctataaattttgtgagctgggtatcatcctctgtctccttgactgactaaaagggaatcaagttcttgagttccctaatttgggaaatttcattagaaaaataggtggggtttggacgttgatgagaaatgggttgtttaactgtttgatatttggcatttgaatgacaagttgattgcataatctggatagataactgtgatggcctgcaagttttaatagaaatccatcatatcatcctagtcttatgtgaaattatgcatcaatgtgattgaaattattgatagcctttttaaaattggactgtcaggaacagtatcttgaagaaattactttctatgtttaataaccttttgtttctgcagtttgttatgcaacggaaaattgtcgtcattttttgctagtaagaattcatgttgagagtttgtctaaggtgtctctgttcaggaaacctaaagaaaacataacagagattctgagcctgttattcttttgtagacaatgttgaatccaatgaattttgtagtgagtttagttatgcattgcatagaagtacatagaagactacaattaactattgtcaacagtaaaaggtcgtgtgttgggaaaagaggccagtagctgttcttttttcttttccagcttacttccacgtgaaagactacaacatggttatctcaaatttaatgagaagaaaaaggaaattcaatacatctccttgctgagatcttgttaagtgcagttttgatattgttacagcagctccatgtcccaaagtcagtgtcaaactgataactaacatcttagaggaaaaaagaggggggggggggggggtgatgtgagggggaattccttggctgagccgtttctttgggctcgacattttgcatctgttgtaaagtcctttattgactttgatacttagtgtcttgggtgttctaggggtgcttggttgtagatgtaggctctgcgttaacaaatactttactctcaatacacggttggatcttgttgaatatttaggagatttgtttaattggcatttgaatgccgagctgattccataatcttggtaaccatgaccatggataaatcataacatctgtctatcttttttttttcttgaggattctctttcagtaacttgcagagctttaaaacgttatcctattaagctatagttcatactgagtagaaccacatagaagattgttcactcagtgtatttgcaggaaaacgatatcaatctcg

SEQ ID NO: 8138 - DNA, 2305 bp, Prunus persica
  Intron number 3 from transcript ppa007231m (locus ppa00723 1m.g) derived from phytozome v7.0 (chr-ID scaffold_5; pos 4178556 to 4180860)
aggtactttgatatttttataacaaatatgttggtatggacattggaacatggatgtggttctatatgtacttactgcaatattacagaaccagaaatgtgtttgatgaggactcaggataatagatgcaaaaaacctacaaacttgtgtttaattatgatattaccttcctcttctcaattttacaaatacaattttttttttgtaccatatagaaacgctgttgtttgtccatataaaaatgggacatgctgtaagaaaatgtcattcattttgaatttattactgtggagtaatgaaaacccaaatttacaaccttttcccctctacattgagtactttgtagtcaaatttagcgaccttccctctagattgagtactttgcattcaaagttataagaaattttctgtggggtcccttaatgtataatgagttaaatattctatttttctagtaagtaaattttattcaaggtggtatcaaggcacatggaaacaatgttccagatgtttgcactaccataagtactggttttgaaaggttagaaattgtccacgaatagggatcccacagttaccactgccagctttctctcttaagcttttatatgtgacattttttggtaattatggtggatatgcatgtttcacaagacacacaaaatatggaacaatttactcaaacccaaatctggcaaattgtccctgaaactgactgacatggttggttcatattgagctctagctcggtgattccagctacatgtgtggcattattttgcgagaagcacaagtctgtttgtatcttacaatttctttttgttaataaagtcttgtttcctatcaaaataatattaagtgctatgtgggttttaagtaatcagttctaaatgtctggcccagaagcaataaaattccttaattatagaagtatcttgggagcagaaatttatatcagaagcatggtgcacaaagttttctcaccttgaaaatacttcttatttctctgttgtttcctcttaagtatgctatgttttcatcatttgaagtttgtagtgctatcccacccctacattagcttgcactggatttcctcattttgcagaaattgaggattacagatataacactttcaatttcagtcagcatctatataatctgatttgtgttttgtgaaaatattcttttgttttgtttctgcaaatgattttcttggagaacattagtatggctgctgtttattgtctcgatactatgattttgttttgtttagtcttaccatatagattatattactccacaatggaatttccatgccgtttagcataatttattatgctatttggattctcaaataacattttattcaattatgtagcattaaagacctgacagtctgctacagcacttaagtttgatctgttttttacatatgagatgagattccttatatggaccaatattattccaggaatctcaattttattggtttttttaatggtatgataattgaactggaagagcatccataataaataagtttcaattttgcatgcagtcagtaaatttaactttttacatgaactcaattgaattaggaaacttgaggccatgaaatcatgaggtaaggaaacattgtagagttttctgttgatgactaacaaggctgatgaaacaaatgcatatggaataaccatccaagcaattgaaaaagtagaaacaaatgaatagatgtggcatgcggcaaagcaatctcacaatttgaaggttaagcatatgcaaccgaatctcagcaccttcaaaccttcttctatacatccaaaatatgttcttttaatataataagtagttctaatttgtaaaattggagctactgtaaatttaaatagtcttcgttattgagcgatgacattcttattgaagtttgcttaagcaattctctctctctctctctctctctctctctctctctctctctctctcttacacacactcacgtgcacatcggtccccctctcctttctcacatgcacaatcactcactcactttcatgcccgctccacttacacattgactgaggcattggtaatgtgttctactctttcaagtgttgatctttgtccaacgaatgcacaaatttgtttgagcactcaatgttacatagtcatgtgattcatttctggtgttatttgacaaacttatttaaacctggatgatctttttcatgtttagttatttatttctattgtcgatatcttttgtgcttcagggtcgatttgagattatttcgctctcaggttccta

SEQ ID NO: 8139 - DNA, 662 bp, Prunus persica
  Intron number 5 from transcript ppa012730m (locus ppa01273 0m.g) derived from phytozome v7.0 (chr-ID scaffold_1; pos 37027509 to 37028170 reverse strand)
tccagagcctgatagcccactgaactgtgattcaggtaagttggcatgcatattatggatttgggcattgacattgaacatctaagtgctagaagctcaaatatgattaagctaagaaatattctcaaaaccacaagctatccttattctgaggatgctcaagcccttaaaagtctagccaatctttttctgctaagcagcccacttgagtggagcgatacattccaaatcacagcagtccagcattaatttttacctctatcaagcaacccaacaacagtttctttttgccatccccagtggtttgtgagctgtctttagtagccacttctcaggccagtgaccggattaccccaaagacagttttgcccttattgatggatttgtttcataggagatgaaattcatgtggaatcccgattctatgtattctatgaaaatttctgtgacaaaagcatcttttcaaaacaaaccacataggtctcattctttcctttcacaaatttggattaaacttggtgctacttttgagttaatatcccaatttcggtcagttttcttctctgttctttttagttgaggtactgcaactgttattcctcatggattggttttgcttgtgcgcaggcaatcttctgcggtctggcgatctcagggggtac

SEQ ID NO: 8140 - DNA, 1018 bp, Prunus persica
  Intron number 1 from transcript ppa002136m (locus ppa00213 6m.g) derived from phytozome v7.0 (chr-ID scaffold_3; pos 3484766 to 3485783 reverse strand)
aagacgaaggaagcacaactccgcttcctgagaaggttttatttttattattgtttacattactttttatatttgtaacgaaaggatttggtctttaccgaatcctatcgaagatgaatgccgtttggtggtcatcctgcataatttgggtgcatttatagtatattgcgggaagtgggattgtgggggcattggggtttgatactgtggttgagtgaacatgtttgtttttgtttgatttagctttgaggtttcgtaagcagtgtgtatacttggatcagaatcctctctccattttatgaaatggagaggtctggttggtagatcatggccatttatttagtatggttctgggaacaagtgttttggtagataggctatgtggtgttctatatgttgacattattgatcataatgtttgacgacttatccctaatttgtactgcattttggtgttttgcctgattgctcgcttcctttaaatgggcaagaattgaaacctgaactttacctcctgtaaccccttttggaaactttggttgactctgagaaggtgtctgggcacctttttctagatcacgttagcacaattaaggagtgaaaacaaattaagttactggttgaagttggagtgcagttatggaggtattttgtgaactagaagtgtactgcatgatctatttcttagaatcacataatgtattgatggatactgtataagcagcatagtgtttctgtgtattgactcacattttttatgatcaccatgctgtagtccttgtgtcctgttagttataggtatatcccattatatattcttgaataataataattgttttaattattactaataataacgagcagtagttataactaaaactctgagaattgcaccactatgcttagtctaacaagtgctgcctctagagacaacgtccatagttgtttttttttttttgaatcgcttgacataaattgttgtctttatgctaattcctaggtttgttgctgcaggttc

SEQ ID NO: 8141 - DNA, 585 bp, Prunus persica
  Intron number 2 from transcript ppa023237m (locus ppa02323 7m.g) derived from phytozome v7.0 (chr-ID scaffold_5; pos 5179297 to 5179881)
aagttttgtaagtgaaacatatactcaattgtgattcttgcactcatagtgtttgtgattttagattgcaaatttttaaattctcaaacttcttgtaagatatggatagatttaacagcaaagaattcgaattaataaattttgattcacttcatttcactatcttaccatccacacatctaagctttttcccctcaattagccttaagttttgaatcttctatttgtagctgaaggttttgcttttcaaagaatacatggcctattagttgttttatatgttgttcattacttcattatcaataatttaaatataaaaatgtttggtacttgcaagaacaaatttgtgtggagctccacaaaaactctattatgaagtcaattttaatgtgagctaaaattggtgtgcactataaacaaaacttgaattgtaaaataattgatgctttgcataaaagcaaagtctgatagtatttatcatcatgaaatttccctttttcttatcaagtggagatgaaattgttcattaacattaacaattgtattgaaggtttttagttgaaaaagggcatttgcgtctcttgg

SEQ ID NO: 8142 - DNA, 729 bp, Prunus persica
  Intron number 2 from transcript ppa007878m (locus ppa00787 8m.g) derived from phytozome v7.0 (chr-ID scaffold_2; pos 23516604 to 23517332)
caaggcgctcattagctccttgggtttcacttttggtaagtttttaatgactgtttccttctttttctttggtttgaatggtactctcatttataatattgttgcctcatttttgttgtttttctctctgtggaccgtgtgtgttgtttcattcaatgctgaatttatttggattgcctcattttctaaatatctagttttggaaacttcattacgtttttgtggggtgttttagaggcgtgtgaagattgacgagctttaaaggttctgtgtgcaaacaaaggaaactgattaagttgttgcgattgaataacgaacttacgtaacaaaattggagcttttgaaacaattgttgtaactacatgttcttttttcttttaaggtatgatggggttattcttggtgttccaacatgttatagctttcgatttgtagttccacttcaatgagcattgaaatataatttgaccagtttaatatgcagcaaggagatggaacatggatccttttgcaatttggttaaacatgttccattggtaaagcccagtactaaatgttgtcttgttttgaggagaaatgaggagaatgcacgattattttatttatatgtgatatattatagcaatcctgttcatctttacttgtttcattggaagttgctgagattagattgttatacatatttgttgtgcagccacaactttgacaagctggcatcttttagtcacc

SEQ ID NO: 8143 - DNA, 1778 bp, Prunus persica
  Intron number 2 from transcript ppa013502m (locus ppa01350 2m.g) derived from phytozome v7.0 (chr-ID scaffold_1; pos 10062234 to 10064011 reverse strand)
acccacttggcattgcatcgtcggtcgtaattttggtaacccgttcaatttctctctgcccttttctgggtattcttttgcttttttcttattggggtgttttgttcagatttaacatttcagaattttgggtgataatgaacaaatctaatgcatggttttgtgcttttagttgctattgtttttctagtttgatgaggatgggttgtgctgtttgaaatgaaatagatctaaaacattgtagctctctcagattaagaaattctcggtagaatggctgaaaaactttgataatatatattcctttttttgttgatatggaagggtgcttaaactcaagagtggaaaacctgatgaccaatgtttattcttcaatggatcctgattttggagggatctttgttattattctttcttcaacctttagaaaattagatattcagctccggttgaatggttgaaagggttttgtaagtaatagaaaattggggattcagtcttgtatataatctctatgcaatccaaatcatgtttatcaatgattgaaattaagttgtcggtttggcttgctcattggttgtgtacttgatgttctaggttgagcctaatatgctatagctagatcaatgtcttattgatgccttaggaggaggcacataactaaatgtgcttggggtttggcttctgtactttgtgcgacaacatgcatccctaaatgcttatctggttatttggaggacagagattgtaggtggttatccggaaaaaggtttaggagagatgtttgagtagttcacttaacacagcttgggttgggaaaaatttattcatagcccatccatcaaaaaaggttgtgcttgtaatgtattaccaggcaagaggcaacccatcgaggcgttgatttgcttacagtgaatgtccgtgtatgccatattgttttgctctacttctgcatatggcatgatatttgatttcatgtacattctatgtgttttcctctgtttacatttgcacatgcaatggtttaagattggtgtagaattcaatatcaggcctcggttttaacaaagtgtccgtatttcctgtttagtaagagtattagtttgtaccaattctattgagaggaaacagtttctgggattcccatggagaaccagagtgtcattttgtttagtttctattcaaccaacttgtcagcttcacatagttgtaataaaagcgcgaggcaccacctaggttgaatagttcgtcattgccatgtgaatctcctattttcttccacaagtaccctttgggttaattatgaatctcacaagcattgacattgctgcttcagagttcagagtgttcacacttacatttggttgttgggtctaaagtagctgcgaccttttcttttcaacgtattcctgacatatgtatggaatagcctatgtagcaggcaaaggcttgtgtataatgccttcgatgatctttgatatggcatccagcgcctgttgaaacaaggactaccaagggcaattgctgctaatttttcttgctccactcagaatgcaatatatagaaattgtctttaatttgggattttcggaatcccttttgttttccttgcttaatctgaatccagagattaaatcatttaacatagagttgtttttatcttgcttccttagtggtaatctttagattgttctttgtataccaaattacaaaaaatttgtaacatagaataagaatcattcacaattatgatttcgtgtttctttgtgcaggttcat

SEQ ID NO: 8144 - DNA, 530 bp, Prunus persica
  Intron number 1 from transcript ppa024738m (locus ppa02473 8m.g) derived from phytozome v7.0 (chr-ID scaffold_3; pos 16613208 to 16613737)
tctaacccttccacttactctacttttgcttctctgtaagtgttttagtttatctttgtccttctcttcattttgtctcttggccttgcttttttttttttcttgtgatttcattgaagttatcagctgggttttggtttaattgcttaatgttgcattattacttatataaatttttgaaagtttcatacttcctgttattgcttctctgtcagcattggtatttggtacttgccattttgaaaattttactgcttctatctaccaagcaattggcattcccttttcatttttgtttgtgttctttcatttacattctgaacatttttagttgggtcattgtgtataagctgtatgttgggaatgaagtttatggtgttgatgggtacattttcatatcatggtttcttgtagatttggattcagaatttggcatgaaaatatcatttacttgaaggattgctcaagtacaaggctgtcttgtttacttagtatggttttggttctgtttaccccatgtgcaggtgtat

SEQ ID NO: 8145 - DNA, 1187 bp, Prunus persica
  Intron number 1 from transcript ppa015113m (locus ppa01511 3m.g) derived from phytozome v7.0 (chr-ID scaffold_1; pos 24373226 to 24374412)
catcctctcttcaccgtctacgccgctaccaaagcgtaagcatacattattataggggtaaataattaattaattggttaattgggttttgtatgtgtaaataatcaattaattggattggtttttttattaaagggtgaaatatttctttcgtcacacaaaatttcaacttagtcacttagaaaaaaaataattagtgtataactcaacatttacaatttatagacgtatcattatttttctttaaataagtcccgtccgatggaaatgtttggttataaagtgaatattggcttcttcccttttttcttggtaaccaatttgtgaaaaatttaataaccaaaaagatattttattatattttaatgtcactctcctagtttacttaacgaaaaaaataacgcatgtttataataagagcatatctctaaggaaaatgttaaatatcaaacattgtaaatttgaatttgatgacttatatgttaagagagttttacattccaccgacatgtcaaattaaaatattactatattacatagtttttttttttagtgtgatacacagtatttattggtttattactttctaggcacattaattgaaaataataataaaataataaaataacatcacaaagtcagagagccaaaaataatagcatgagagataaatgttattccacctagaatttaacattttggttagagcaagtcttatctattttttctacatgctaaaagtgttatgttgaatttaacatcttctttggaaatgcttttaagagcatccacaataggctccctaaaccacttctttaaacaaattttgaaaaggatttgaaaaaatacaactccaatatgctccctatccacctcataaaataaggagatctctaggagctcctaaatctgaagagagagaaaggactcttagtggctccctataatttaatgttgctttatttaatgagtatttcaaacctttaatttatgtttattattttttaatagagatggatcaattaaaaaagagttataacatttatgactccctaaattaaagagtataattggaatttaaattttatagagagctcctaaaataatttttatatatttttaaaaaaaatatgattgtagatattctaagtaaattaaatttcatatttatttaaccctatgcagtt

SEQ ID NO: 8146 - DNA, 4387 bp, Prunus persica
  Intron number 1 from transcript ppa006091m (locus ppa00609 1m.g) derived from phytozome v7.0 (chr-ID scaffold_7; pos 3164607 to 3168993 reverse strand)
tggtgagtatcaaatgtattttttttgggtagttttttatggtttagttttgaatttttgcttttccttttgttcataattcgattggttctgggttttgtttggaattttttggagatcgaatattttctttcttggaatttttaaatatgaagcttgtttctgatagtagtgattgttggaagttattacttacaaaaatagaggaatttaagcattttgttacataaatgtagcaagtgctaatttaaactcagctcagctctagaacctcatcctatctttgcaagtccaactttcatcgatttggagatctccataagagaaaaattctgaagcttttgcaaactgtaccagggggtggaacacctgattcggaatgatagaaccataccatatattgttttattttctttagcggtcttgttcatcccctatactataagatccaaagactggaccctctattttccttcatgtcaaaacctccaaaggaacagcagtactagtaggctcattattacactggtttatccagcctacaccattgagactttttatttattctactggaccacttcctgaaagtatcaactgttgagaaggagaattcaaagacttccaaactttgcatcttgaagtaggttaggacttagaagtaatgtgctcacatacacttcgaaataattgaattggtattgcaacttacaaatcatatgaatttagtctttgaaccccgtgttcgctatagtatatgcagggtgagatggatttggggacaatgagctgaaaaggtgaatttgtgattgtattttttagtatgtagtagttggatgggtggaatgcgtgtctaggtaaaataatgcatgtggagcacacttcatatctgacgttttgagtttctttgtttttttgttttgtttctgttttctctgtgtgtgtgtgtgtgtgtatggaccagagcaagttttttttgtatcttttaatgatgctgttcatacttatttggtaggtagaagttgaagaagatatattaaaaattgaaatcagtagaaggattgtgaatgatttaagacttgggcaaaatgtgctgcacttcagcctttaaataatacaagtgtccataacctccacttaaatagcttcacaaaataatcttgttgaaaacaaatccaacacaaccaattcctaattaatacaaccaactgccagctcaccacatataggtacaatcacctagtgctacacagtacatctcctctgacacattggagtgaggcttcaatttcttttcctctttaggtaacaaagagggcagggtacttaattggttcttatttaatgatttataagagtagtgggggaggttggtaaaagagttttgaataggcggtggcgggcatggtgctttaagtgatataagtgaaatgtaaaatagttgagcaattttttcataaattgaaggaataggaggattgattgactgtttctcaattttcttcgctgccattgttccgttgcaaatgaaagagtcaaaaagggtttagggagtgagagaggggcttgatcttctaaacaatgaaattggagaggagataagttgtgtaatcaatcgagaacctaatatcaaaatacaaaattttaatgtaattaacaaatctggtgtatgcaatggggaagattgagggtagctggcttgtattattcaattaaggtgaagtcacacgtcaggccttgatagtttttgggctaatgaggttcacctatgttacatgcttcactaaaggaagaaggtaaggattatggaatgactgaaagggaaattctatttcatccaatattcttattgtcattagaaatacaaataaattttcactaatttttcatttattggattcaggattttacatttaatttaaaggttttctagctactatgatatttaaaataaagaatcaaaacgtcactaccagcagttcataatcatattgataaaaatattagtggaagtgtctattttgattgacatattggtaaaatttagggtaacaatggaaattaatttgacaacatgaaggttttgtataaacttttagagggaagatattttgcttgaaacttaaggcaatgctaaacaaatcaataatgcataaattaaatagtaaatttcatataatactacatccatgataatatattatatatatatatatatacaaagtttctcctatgtggatgtccggacgttattaccgtgcgaacgccatgtattttctactacccctccttgctttcctccctgtttacaatggtgtctgcacggtaataacgtctagacacatatatgttctccaaacttgaatcaatgtgcaaaaacttattagtttcattatgcattctattgtgtacaattgctattttttatttacgcctcacaaaccttgacaatttatttgcaaattaagtcaagattagagtacacggctagcattcctactaccaaatttgcttattaagggtggctcttttgaaaggctatcactaagccatagctagaatagtatccagaacagaaactattgagaatatcttaaaagttcacacaatgtgcttaaatccatcgatatctcagtgacatatatcaagatgtgggtgatctcagtccaccacttattgatatcagtggcatcaaaacatggaatttcgatgggagctccgtatatcgatgaatattttacacattgattgtaacgattaattttgtttataccaattaattttgtacaagtttaattttgtttaataagtatctataattctatacgataatcataaggtagaacttcaagtttggtgaaattttaaaaataatcctttgtttaagaaaaccattgaaggaaaatcacattaaagaggataaaatagtacagaatcaaaaatttaaaatatttctgttttagaaaaaaacggctgaagtatctcaccctttattatctctcacatctcaccctctctctttgtattataactttcaccacactacaacaacttccattatattgcacatgcattacatgcttgctgcctttagtatggatattatacttatgtcatatttgataagtccaccaattagctaacttaggtaattatgttctgtttgaagtccacaacacagattgttttcactttacatgccatatatttgttgtagatagattttttttcgtcgaaaatttgttgtagatagattagttattaagtttacatatttaattggtgattttcttaaaaaaatgaaaagatgaaattttatttcataagagattctgtacattaaagtagacaagtattacacaaggaatagaagaggaaagaacattaattcgacaaattacatctaagaaaccaaaaataatgaagacactacaactttgcaatctagaatgatatcagatagagatgtattctgaaaaacaggcgaaacggatgcccaaattgctgcccaatacttgaccttctcccacacctcatccatttccatctccttaacactcccccgaattcttgcataaaatacaccaatgtggtaatgaagatgatgctgacctacgtctttggagtaatcacaggtgttaaccttcccttgtaccaccaactaagccaaaaccttaaccttgggaggaaccttagatttccaaatcagactttaagggagaaaaggtggactaccaggtatgattctcaatcgatttaagtaggatttacaagaaaattgccctgaaggctttaaggaccatcttcttgcatcttctttgtatggaaataatctcacctcctccagcagcctcaacaagtttgttatctcctccatcaataatgcacctattaaataccatatttaataggtgcattattgaatggtttcatgtttcctgaaagttttacttcaaaatttccatattctcatgatttatatagatatttccaccaatattccgttgattttgactatcattatttccagtgtcatagacaattttttaaccttgcatgcatcataggttttctagttccacattgtggcctaacatggaattttctggcctctatatatttaagtattgtaatattttaaacatctgaatgcatatttgcaatattccttcactctactgtgcacttttggagaatgcgtgtaacatctgcattgtcatttatttgttcatcatcactgttatctaaaacatgcaagacttccagaaatgatctacaggatttttcataagattccttaaactcgtttcttgtatatgttttttccccttcaaaaagcttatttgcttatgtttcatttaggggctacaaacgttttttcagacgcact

SEQ ID NO: 8147 - DNA, 1055 bp, Prunus persica
  Intron number 4 from transcript ppa003177m (locus ppa00317 7m.g) derived from phytozome v7.0 (chr-ID scaffold_5; pos 8782009 to 8783063)
aagaagcagaagttgcctcatagcaagcagttccggttagtgttttactcatcctaattcctactttaactactgtaactgcattattttattttatttttttccaaactagatacatattaaattatagatttattctctgatgttaaatagatgtggtggtgtggtgctatatatgtatatatataatttaatttaatttgatttagaaattaagaatgaaaagcatatattcacgagggttggggccagactgtcctggaaatcggtcatcacgcttcttgtcttggacttggatgattgaaccttcttagttatcaccttcacccagcaatatgaaaatgcctgcctgtctgtcttgctccatcagtcacggacatacttgcttatgtattccactgcatctgcctctgcatctttggccacatacgtactctattatttctaaatcacccactttttcaaatcttttcctctaaatatatatatatatatatatatatatatatatatacacacacacacttgtctaacaaactggcacaaaagaacaaaccctgaaactacaaaaacaaaaatcatcatgtgactcgcaaggtttcccttgtgcctctcacatgaccatgtttctaaaatggtgtgttattattgggaaatgttgcctctctttctttattttttgtttttcctaaagttcctatgtatgtatgaacctagaaaaatgtttgttttcattttgaacctatgaacacgtggttgctagttgaatgacaatatgaaagttctcacttcataaagtttaactggatgatgtctgctactcaatatatcacatgacataaaagtttccactttataaagtttaactggacggtgcttgccactcaacctgtcacatgacatgaaagttcccaacgaaagttcttctcaaactaataagagaaactatgctgagacaaaaacatgatcactacgtcatccatggaaacgaaattaatttgttggtttcttcttgtgcagtttcttggataaggcagcaatcaaggaacccaaaa

SEQ ID NO: 8148 - DNA, 1198 bp, Prunus persica
  Intron number 1 from transcript ppa001988m (locus ppa00198 8m.g) derived from phytozome v7.0 (chr-ID scaffold_2; pos 19892001 to 19893198 reverse strand)
cttagaggtaactgaaatgctgtagtttactctgtgctttacttttcaagatttgtgacatgaataacaactacactgtttaggcaagtctttggcttacattctttgcattaggtcgaagccccaaatccccataaccttgcataattagttttatacaatcctccatttaacttaagtttgtgcccctctagtgatctgatttcctatagtgtgagtttcgttttccaattgctttgtcaatctttgctaacatgattagaacctacttaccataacactttacagtgagaacagaacatttatccctaatactaataggatgtgaagcttgatgtggtgcagacttaattttgaagaaagatatgtggtttgtatgatcacttgaagtgctgcttagtactatatatatatatatatatatatatttcaagattgctttggtaaatttcattttggatgctgccatcacaggcttctttatatggtggaactttatagttagggttttcttatctattgtccactaagttgatggatcatgccgctgttgtattttatttattgtgcatgatctgttgatgtagctgttgcctttactttcttaattctttgtattttgtaattttttttattttttataaccaaaattcgagtgcatggaaatgaagagtcaagagagcattgtaactcagtgagacagattagcatttctccaagcccccatttgttacttgttgcctattggttattaaattcagtagatatggaaatagtcattaagagctacgttttggttgtccagaaccataaaatggcttcgacgacatgtatagtaaaaagttttagtttcaagatatatatcatgcttgtgtcaccttcttggctgtaaactctaagtattttattgtccttggtaggtcatatctgccttggtggttgctttaatatgatgtcgtatacactagcaaatgcactggctattaatgtttgggcttcttttatatccatcttggtctcttggattcatgttagatgttatcatctgatgtgatcattctttttgttggattgtaatgtttttttccctacatattatttgcttctttataaaaagtaattccattatcaggtattaacaaaaatgatatcatgtttatcaggtatttcctgcaccagttgatagagaaaaagttaa

SEQ ID NO: 8149 - DNA, 4043 bp, Prunus persica
  Intron number 2 from transcript ppa013534m (locus ppa01353 4m.g) derived from phytozome v7.0 (chr-ID scaffold_6; pos 7623100 to 7627142)
ctgttgattgaaggttggggcgttagtccaatccggtaagtctcttctttgaaatgtgatccctagcatattgatatttggtgatggtttcggatgaagcaaattttcgcgtatcatgtgctttgatatgatttatcttactgatttttgccctcttatgctactggatacatcttttagagaatatcatctattcttgaggatatttataggttaggtttaaagaattctgtttttgtgggttgtgtgtgtgtgcacgcgctcgcctattctgaaatcatttgggtcttccttccgttctgaaattttgttaaatgttttccctcatggttttaggaatgttgaaactttggtatttagtcttctagaattcatattgaatgcattgtaggtatgagcttaccatgtgtatgttttgccgttatctattagttatgaaaatttctcttgcaaatgactctttagttatcaaaatgtttgggtaggaagaccaatactggatgcagtcctattaaaggtgtgctttgatccttttctatcttacttgctttgatccttttctatcttacttgtgttttgatattctgcagaattcagtttgttagttccattgcgttttacactaaaaagatgattttataggagagaggtgataatttagagcaacagcaatagctctgaatggttggccttgctttcttaatgttggcaaatctactattttataaattatgaagggagactgtcatcaaaagtacaatgtggagactgcatatagaaattctttgtggattttcatgtagtgtattacttgttgatattttttggtatggtattgatgcttgtgggttttgtttgagcaatgtgtgtgtttgtgtgtttttcatggtcccggtagaagtgtagaatttttctgttattttgtctgcatccttctagtgcaatctactccttgtttgttctatgacaagacaaccattgacaacctaatgtatagtttagtttcttatataaagaaaagaactgctttattggagtgaatccacaaattatccgttcttaactgcataagagattcctaattgaaatgaagccttcagttaacaatgcacatgtgaggcaatgcctactgggctgggaatgaatgaatttttgtttgtaaacaacatgaagaaagaaatgattttacctggacgaataggaagccagtgagagatttgttttaaaactttttatctgaccaagggcaaaacgttcttatggtcaactgtaacatttattattttttacatgtttatgtaacatttatatttggccacaaactaatggagtttaatcacttccaaaatagattcttcgttctttaagaaggccacatcagactcttcatccccggaatctgattccaattaatttcatcttaatctgcatggttttcttatttttcattgactgtacacttgtacttcttgtattttcgtaatctgcacattctgcagaaggcatgtgctggtgatttcttgaatagacctttttgcataatgagactgcagttttgcccttcctccctatttcagtagctgtgccagtgatgagctattcactggctgcaccctttgaaggcttttagagggtgagaaatggtgttaacattcaagaattgatttggtttaagtctgataaggagggactttactgggaaagcgcttgacaaatttattttttcctcgtctttctcatttggctgaggaacttttaaaatgcagttgattcagttttcttttcatctggttggtattttcttggatgggatgtgatattgaccttggggttctatcttcagtttggatttgttgttaggtctttgaatttggtctttcatagattaagatttatggccaatgcaattgaatttggtgtatattgcaaaaatttgaaattgtagctgccattacaaatgcggatgtgcgtaccaaggtcgacagccaatatatattttttccaatctttcagagattaacatagttgggttaaatacctttttggcccctgtgttgtagacgaaattgtattttggtcactttgtttgactccattacttaatggtgtcatttctatccaattaccgataaaaataaattcttaaaccgtttaaaaattaatagtaatattagttaattaaaaaattataaatttcaacttaaaatataaaattatcttaaagttgaaagatctacgctgtcccacccttccgatctaaccccaccccagccccacctcctccctgaccttacactaccccatccctcctcccctatcctccaccaccggcctccctgctcctctctctatctccttgtttgatcaaatctcactcaccagttatcatgagtcatgacacaggggagatcacttcacaaatcagcactctccaacacctaaaggttccacaaaaaatgaatttatctcattattagaaaattaattatctgtatcgttaatgagttgattctctgactaaagcgtgaagtctcctacagatcatattgaggccacagagcattaatggggcgagacccttgttggcatagagcctcacccatggcttcccattcccacaccattgcagcaggctcactggatccagttgcaaatctcaacaaaacctgtgaaaattgtcttccccgaggccgttctggttctagcagtggtccaccactgctatgtttccacagaacaaacaacattggggatggggtggggggcggctaggatgaggtcgtaagggtgagggaaggggaggcatggtggaatgtggaaggctaacagaccaaaattgattttgctttatttattatttatatgatctattattaattttattatctattattaatgtgattggagagatatctatagtttatgctactcaaatgagacatatatgttccttattttatttgtttacttttgacattgtctacttctaaattcaagaatagaagaactttattattggaatagcttattagttttgtcctagtactttgatgcgttaggctaaagttaaccaacgcagcttaactttacaagaagaagtcgactttagctaagatttgctaaaagagcgtagatgaaaattgatcacatgctatactataattgagaagtaaaaaaactgtatttgatgttttaagcctaaatcagtgcatcaacttagtgtatgctacgtgtgttgattggtaagctgcataaatcagtagaaataggagctggggtagaacattaccctaaaagctttgcaagctccgaaagtgtatgttgtccacttggttaattttcattaaatgtaaacatgcaagtgaggcttcctagtgacttctctataatgttatgggtgggtttctctgagatttattttcagcttctcattcatttgccatcttatgtttaggactggaaataagttctacatcaccatggtagtgacacagagaaaacctgtttcttctattataacatataagatatcccttggagtttataaattaattatatcttgtatggaagaatagaactgaaagaatttgactgtgcatggtataggatttctttgtaattatgtctgattagatttctttagtatcagaagaatagtagttcattaacactcaatggcccaaaaatgagatgtgtacgaaaagggaatcaaaggaaaagacgtcgaattatcatggaaaagttaaggaccattaagcgaactcattatataaggtcatgattttgaaaatactcagtcccctaagttgtaattggttgtatcattcatctaaaacagagtatatgggattggttacttggctctcatagccatcctgttgtttttccttgacttttaacatattgcagtggatgattgaatttgctgggttgccttggtgtggaattctacttctatgtgtgttgacgcactgctagtgtatctgtgattctcatggaagataaaccactgtctttcaggtccttatagtcttccttagttg

SEQ ID NO: 8150 - DNA, 1636 bp, Prunus persica
  Intron number 2 from transcript ppa013873m (locus ppa01382 7m.g) derived from phytozome v7.0 (chr-ID scaffold_5; pos 8247190 to 8248825)
catcacatcgaggagttgccgtgcgctctcacagggtactctctgccgcacctctcccggcctctaataaaaaaaatttgctttcttttctaactgtgagtcacttttgctacttccaccattgtaataatttgtagttctttcaatcccatatcttcatttttgcgtttgctcacttgggttctcttcagaatttgattttgcctcattgttgctgttgagttttgcattgaatgatttctgtgtgtccacctggttatgatttgttgtctccctctcgaaatgtatgtttttgtgtgggcttgaacttgtagactgccttgcacaatttaatagatggtttgagtcttagcatagaagttttacttctgagtaactcaaactaggttgttgtgtctttgaaaatatgagcattcttagagacatttctctatgtaagattggctcattgggtattttttttagagcttgttggatgtgtcctgggaaggcaatgaggctgtcgttttgagaataagacaatttggggcaatgaaaatcagggtcgaaatgcttttcatagggaatgttatctgactggaatatttggttcctgcaggcacataacattatgcttgaaagaaataaactggacctggtagttaaggcctgctgcgtcattatcaagtacgaaactatgagttttccctcaaaaccataaaaatgtttaactatgtgggtttagagacttatatttcgcctacggcttgatttgtcacttttgatgattgtaccagcagttgccacattgtggcctctgcgttatgcgcatcgacgctcaattttgatccctttagttgtatcaatgataaggtaggaatgtctaccaattaatataggatggtattatgatgaaaagtttctattaggctgtggcactcataatttatcatattctagccgtatcgccactgctactccatcttctttatattgtctatatattttgggtttgaagtgagcatgttgagacattctacagcaaatccattttcttgaaaattataactaatgggttaagtttaatgctaattcagcaagatgatatgatgatctaaaggggagagcaaaataaaattttgagtgcaaacattttgccttaagtttgttgaacttatatagcataccatgtctaaataaataagaacacgttgataacatagctgctccttttcccagatggaattgatggtacgtgacacatgtatgctgtatatggaggtgggcgctgctatttatgctcattgtgtctgacttaaaacattgaggaaaactagatatatgtacatgctgatcagttattattggattatgttcctagccatttgtattctgaaagcaagctttagtggatgctggaaagtttcgcttacttttctctagaacatcataaattgtccacaggatcgcatttcttgagctgttttagtggagtcttttttgattgggtcttttgattaatgaaattggactggcacgatttctgcattattctcttgagttatagatggcttcactttatgtgttcctaatttgagtctttgtattctttgatgatccagagcttggtctgtcagttccaaggtgattcgtagca

SEQ ID NO: 8151 - DNA, 962 bp, Prunus persica
  Intron number 2 from transcript ppa001763m (locus ppa00142 2m.g) derived from phytozome v7.0 (chr-ID scaffold_12; pos 622115 to 623076)
agaaaaggtcatcatcactgcttagggtattccaggtactagtgacattgtgcttcagatatcatgttgtatattggcaatacatctatgtcaagttatttaatgtatatatgatgggattcttaatgcctcgggaaaattttggttgacttgtttctttgttagatagggaatatttataagattatttcaatcagaattactaatttgtgtttgtaattgttctgatttatttttgtagataaatttatttgatgattgttgtataattgaaatttatcaccattcttttcaataatgagtaattcagcccccgtcctcctctctctctattgatgatatatactgcctattgaatgaattgccattgttgaatttcagtatgcaatttgtttttatgccttttgccagtagtgagattgttgcaatgcagttctggtggactggcagtgatctttgtttttttttttttttgttttttgtttttttgtgaatctatggatctcaatttttaaatccacggaattatatttgaatgaactgtccgtacacttcctgatattcagtggtctacatgtatagcaccgagttttagcttttgaaaggaaatttttttttcatacatattattaaattttttggtatacaactccttatctcccttttttttttaccctggtcgagtgcacctaaatttgacaataagatctggaaccagtaaatatagtaagaaaggtagcacatgttccattaaaatttcactttcactcggtgctatgctcagtactcttctgggaagttgaaccactctgaaacttgtggatgaattttttctttttctggaagaaatctcattgcaaatgcgatttgcatatttaagttctaataatttggttatctgaacgcattaatgaccctttctaacaggggcatcaatcgaagagagctctgctggacccaaa

SEQ ID NO: 8152 - DNA, 1291 bp, Prunus persica
  Intron number 7 from transcript ppa001173m (locus ppa00117 3m.g) derived from phytozome v7.0 (chr-ID scaffold_5; pos 5301969 to 5303259 reverse strand)
cgaaatcacagaaggaatttcttttgcgtcagcaggttggcactctcacatcagcttttgatttgttgaggaagtgaaaagttataattatgttttttaatgataaaattattatttgttttcatccagttcatgttttgttatcctacaataaatgtggtaaacaagtattgtgctcatcagtttaatttttattattatttatattaatttgatttttctggaatttttttcttcttgaattgccatggcaaattttttcagtggaacaaataataagaaatccagttataattttactgaaataaaccataatttgcaaattttatctttactcaaagtaatagtaactattaaacggtttttatttagattagtaattacagaattaaggtaagggtacaaccttatctgatgcaacacacaaaatcttgtctgttaaaattttgtggtgagggtggggtgatttgttcttattttctgaagcaatagaaaatatcttatctgttaatttttcttaatgtatttaagttaaatgaaggatatttttgacaaaataaaggaatggagagtacaaagctttctagattgctgtattcttgcaaggttttatacaagttctacatgtaataatttatttattgattgacatgtaataatttatttgttggttaggttaattagggtccgtttgggactgcttctgtagaagcacttatgctcatacgtgcttttgttagaagcacgttgaatttttattaaatgcttctccagaaaacgctctagaagcaattttaatttttttgccataccatttcagaagcgcttttagccatttcggaagcagtcccagacatgccataagtttaatatttaggattaacataatttgttgtagtgctggaggactcagatatcaaatatatataagaaaaaaaaacctatatacatttttcatgtgcataactagggaaaggttgtgaaggatgcaacaggcggctttagtagatgaaatttactaataacttttatttataggcatgtttttgtcttaggtgtgcaattattttgtttgtactcatttctgattatatgttggattttagttgatttggattttcatgaaacttataaatactattcaggacttcaggtggattcacgtgttgatggtttggaaatatcttaacaaacttctaaatttgacacagatatactgttatttcctattctttagctgcataaatccttattgttgtttcctttcctgctttatgaaacacacttgcag

SEQ ID NO: 8153 - DNA, 1074 bp, Prunus persica
  Intron number 1 from transcript ppa026670m (locus ppa02667 0m.g) derived from phytozome v7.0 (chr-ID scaffold_2; pos 21180225 to 21181298)
attctgagctcaggcacgatactttcgacgcagtgagaaaaatccattttttccctcctccttttttgctttatttcgcttcatgtctgcctcaaaagcaaatttagtgtgattttggtactagggttcacaaagatttaatttttgctcttgcttgtttccatgggaacttaattttattgaaatttatgagattcagttaaattaaaaataaaaacaaaaacttttgcttggtagattggtacagcagggtttctgctaaatcctaaatgtggctcagtttattgatttgctgctgttatgccccttatttgacactgaagagctgtttttgccagtgtaattattgttctttgtctttctgcacccatgcatgctggaaaatgcatttgagatgcaaccaaaacaaatgcatccccacatggaagataggggcgttgatcatagaaaaaatggttttgaagtgctgctttgggtttcctaatcaagattgtatgaccatgattaggacagattgcatcttgataaaaggcccacggtttcatatgtattccttcaaatggtctgctcatgattggatgttattgtctctaggactttccatctccaattagagggatcatgattttttagaagcctatgtgtgctgtacgtatgtttggagttggctttaaaagggcagagactgtttttttgtcaattgatgtcatgccctttatgcatttgattcgatatatctgtcgtgcacgtatatattggttagtgccttcctttgattgtccaagtgatattttgtgttctatgctttggcaccttgtgtggctattagttgatggtgtctttctggattgaaccatgtgcatgttataatgttcatagaactggtggaaattccccttttttatgacatggggcaatggtcttgggaaaggagtttagtgtacttaaatgacaattgagattgaaattaaaaataccttagaattaaaatgaaaaattacaattctgttgaattaatgaacttgtagatgtgcatcaggctacaccttttctggctggtcttgcagtagctgc

SEQ ID NO: 8154 - DNA, 2246 bp, Prunus persica
  Intron number 4 from transcript ppa004125m (locus ppa00412 5m.g) derived from phytozome v7.0 (chr-ID scaffold_8; pos 5345841 to 5348086 reverse strand)
attgctgtccgccttccaattattgaatcacaaaggttaatctctaaactggtgattttcttgtaccatgcttctgtttgttccaataatctggcatgcaatttttagttttgatttgtcagaatcctaagctaaaatgatgtaatatctcaaattctctctgtaactgcaacgttttcagtactgataaatatttcatagacggaaaaaaactaagatgatctgcggttcatgggttataatgcatgcagcaattcctgctatcttttttaatggctacatatggaaaattttgtaaaccttcatgcatatcctggtatggtgaaagaacgactgtttgttctttgttaaaacaaagaatattattttttcttcatgtatgcattacttcgcggactcttatttttaaaaaagcaattgattcgttgtaattcttctaaacttgtgaggtgaaaactctggggtgttctaggatggatttcatggatttagtagcatgcatgtatttctgaaatcatgaacagattatgatttaggaaagaaaaaaaatgaaatgcattgctgaaatgtgattgaaaacaaatatctcaggttgatatgaactgttgaaaatattaattattctgataatccttagtccatgtgtactccttgttccttttccttgtggggagagggtggaatggaaggagtagaccattgtttatataataaagaataactctctcttaatcaaaatgaaaggttaccagtattctttccatgaccaactaaacttctgttagttgttgtttgcaactttgcaatagattgatgtgactggtttttcttcacagaaacaccagaaacacttcaatcttctcgggacactcctctttagaccaagacaaaagtgcacattcacaaacacacacatagttttgagacaatgacatccatggatgcagagaaaaaatgattaagagaaaataacagataagaaaaagagactagaaatataagaagtgattggcatatatacattcttacatacaaggacgtgagacttagaatacaagtcagaacattttagttaaagcaagacttcattctttttttaatcagacattctgtggcttgatctgcaaagcttgaaatttccggtgtaaaacttaacattttagtaattggctaagcttgtacaccagtctcttttttccaatggtggagaaataagactactgcagtttatattaaaatagatatgagatgcttcagctgttaaagtagggactgaaacatttaggaatcaatcatttagttgacttgtttggagccctgtgaaatagatattcatgaaagagaaaggcccacttttgcaattcaatagaatacgtgctttctagtttcactactgcactttctctcttttaggatgttcctgctttctagtttcagacatagttaatttggttactgaaatgtttcgggagagaaaacaaaggaaaaaagaaaggttgagaacttgtgattggtgtatcttcttctggaacattagcacttcagctaagttggacagttgtattaggtttgtacttcgcttccaaattcttgcaattaaaaaatctaataccactttctattgatacttaaaactaagcagagcttgtcataggaaaattgcaattgagtcacaaaacccattaaatgctagtggggagcatggtctctgttctccacccagttgttgagtcaggcggttctggaatagggagtacagtagtatcagtttgaggaattttttatgggtttcactttactctatccttgatggatcatgcttttacaaaccgttgtgggtgtgacaacggagatggcatgccacgtatttgtattgccattatcctcatgtatcatggggaaatttcattaactcacatggcactgccgcataagccaccaagttactttatgtggtagtttgtgaaatgctttgtacctcctgcatcacttagcttatcatctttgttagtttattatctttgttagtcatgtggttgattttctcatctttccactcaacctttgtttttgtagaattaaatgtcgtcatatttctaagtctgctatttgatttacttagttggcatttaagtttcttgaaattttgacacaaaaagttagtatgctaagtttttgtagttacgtatatgttaaaattcacccagtccttaaaaacttaaaaactaaattttttgatacaggga

SEQ ID NO: 8155 - DNA, 747 bp, Prunus persica
  Intron number 1 from transcript ppa019683m (locus ppa01968 3m.g) derived from phytozome v7.0 (chr-ID scaffold_1; pos 12246488 to 12247234)
ttcacttagaccccttgacgtttggcattattacggtcagacaccccagatttgatttattccacttacacccctatttttaatagatgttaactcacactaaaaataaaagaccaagcctgtcatttgaatagtaaaaacttaaatataagattaaaactaaagaaaaaaataaaattaaagccaagtcatcccaaagccaccaacccaccaacccagcagccagagccaccaacacgtctctcttccacggccatcaaggcacaccttgagctatttaggcccaaccaaccttaaattccctcaatgaatctagacgaacaaaaacgaagaataccccaatgccagctaccaatccaatcaagaacctcattagaagaaaaaaaaacaaaaaacaaaaaacaaaaaaaagcaaacaaactccaaaaatcgtaaaaccctagctaccaatcaattctataaaataaaataaaataagtgaaactttttgcccaaaacatacaacccaagctacaaatccaattcagtctccttttatcagataaaattccaagagttttaggtgtttgttaaaacaagtaatataggggtctaaatgaaatgctccatataattatagtcaaatttcgattaaactacctaattgtttacttcttcttttttgtcattagtaaatttagatatacatatcctaagtcatgtgtatcaacaggttttgggaggcatacttcgttctaaaaatagtac

SEQ ID NO: 8156 - DNA, 2381 bp, Prunus persica
  Intron number 3 from transcript ppa022090m (locus ppa02209 0m.g) derived from phytozome v7.0 (chr-ID scaffold_8; pos 9196870 to 9199250)
atattgcttaccacacaactggagattttcgcaaggtacacaagggcaaaacaattcattttcataagaatgagctataatatattatatatatatttcgtctaaggagctgctcggagtaatttgggctagttctaatataggccctacaattttttattttctagacatcaattcattaattttcaaatttatgtttaaaacctaaattcaaactaaaataccccgtaagatatcaaaggtcatagtactcctatatgtttacattgtttgccaccacttcaaataaatcaacatgacgtttttcagcatgtcattaagtctctcattttttattcatacttcctcatttatagcatatcaatgtctcccgtttttttttcaggcatccctaaaatttcaaccaataaaaaaaatccttaaattttcaaccaataaaacattcgtcaaattttgtcccaataaaatattataagtaaattattatcaatacaatataatgtacctacaaatttacctatcttgtatatatccaatacacagtcctgatcttttggactacaagggtccaagagatttgtggtcactcaccattggatgtaaattcaacggttcactcactcttgtattccttttaaaaaacttttttgaaccattggattaatatctaacggtgggtgaccacaatctcttggactcctgtgatccaagagatcgggattgatccaatacatgtaggtatattattttcacagtatacctattaatgtgctggctttaacctacaatatgtacatatccaatataatataataggtaaattattatcaatgcaatagaatgtaatgtacctacaaattcacctatatatcttgtatatatgcaataagggtaggtaaattattttcacaatatacctataaatgtgttggcttcaattaatatgccgataatatacccataataggtaaatgacaaattatattattgcataataggaaattattagataaattttatccaaaatgcgtttataaaagttgggtatattatttgaataataagtaaattcatactaggtacattatttttagtaaaagaagtaataggtatgttattttttcaacataaaattatatatacgctattatctatatatataaagcaaaaggcagagaatggtgaaacattcaaaataccagaaaatgcccttggttaatgcaaacattaagaattgaaattattaattaaatgaggataatatggtaaattcataatttttcatattaaaaaaattaaaattaaaagaaaattcaaataatgaatcctatttttatggaacacaactatccattatcttttttaattctaaaataaatttaaattttttaaaaaaaaagcctctcgcaggcgcagaagagcgtgcagagaggctagtatttataaaacaataatataatggataattaatcacgtatacttcataaataaataaataaatatttttttatcaaataaaccggctaggtatgttaaatataaatttattgttaaatttaaaaaagttaccaaattaattcttacatccatttggagatctttccaaattcaacatgtgtcattagttacaatccaattaaaaattgtttctatatttattcctacattaatatacaaaatgcaataatgacttagttgggggtattttatgaatagaaaaaaatacaataaattcaattttgcactagattaggtaacttgccaagttggatcctagtcattgggttttatttagaaaaaaacaggattttattcaaaccaaaaataaagagatgggttgtagttgaggaaaaatgactttgaaagggttaagctaaatttactataatttttctatgatagagtgggctagctataatttccactaactaagtgaacttcctaaactttaacactaaattaatttttgaaaaacattcgcactaacctagagcccgccttagtctaaggtggctccatcattgggtatacatatacatgtgtgtgcatacatataaaacctacgtaacactggattttgtcaaataatctgacatcgtaagatgattatgtgctatattgcaaacatggactagaaactcagaaaagaatcaatctaattaacagatagtgtagaacttgatctaattttattatacttggcaacttttttctaggtttgttaaatttaaagttacaattgatttataccacacaaaaaaaattaaataaaatgtctaattaatattctattctagattttttattctagatgtactgttaatttttttgtccttgcgtggcaagctattggtacctctggtgagtacttacaggtacga

SEQ ID NO: 8157 - DNA, 587 bp, Prunus persica
  Intron number 3 from transcript ppa008021m (locus ppa00802 1m.g) derived from phytozome v7.0 (chr-ID scaffold_7; pos 22522858 to 22523444 reverse strand)
ttgttggaagtgctggaagtaaagaaaaggtataaagttggcatctttttccccaatttgcttgccctatctttgctggtatctggaagagtagaacatatcatattatttcttagttatatatgcttgacattgttggagtattttgtagttttctttttgaaaattcttcgttattgacttttgtttgaaattttggaagtaaggaaaatgtatgccttcagttcactttttcatttcaacttaggtgccattttctatggctgcctgctctccagaatttattgtatgattgtttagttggattttcttgcttatgtttgagtagtggtaattccccttttacattcttgggtgcaaattctaatgcagaagtccaaaagcatttttcactttcggtgcaaatttttaacaatggagttatttattccaagattaacttaaatattttaaataatgagtatgggagtttaagattgttgcatgtggcttgtgggggtgtctggttgtatgtagttttcaaaaaatgataatcttctgcgtatttttatactaggttgaacttttgaagaataagcttaaatttg

SEQ ID NO: 8158 - DNA, 1004 bp, Prunus persica
  Intron number 8 from transcript ppa001274m (locus ppa00127 4m.g) derived from phytozome v7.0 (chr-ID scaffold_1; pos 13525958 to 13526961)
gtccttctggtcttaatacagtcaatcttctgaaggtcagaaaagtgaaaggaaaaaaaaaactaaagattgatgattcattttgtttctaatggcatgtatactgtaaatttaatgatcgtattgtagaagcacatgtttctgggcattgcctgttggttgattacttaacatgattgcctaataaaggaaaatatgaagaatttaatgtctgcagattacgagtttatctttgtcatgtattaagtagctgaatggacagttcagtatgagaacatgcattattcatattagcatgggcagaaagaagaagagtacaaattagattctccagccctgtcctgtgctgcaaagaaggaattacgagatccttattggctacttcacaatttttggggacaatatgaccgaaatcccaatttactgagtgattttttgaaaacttaatatttcaagaaatgcatgtggcagacagtgacgtaaagtggattaaaagtaaatcgtactaattctcatgtatgtaatctagtgagaattggtagttttctatataccagaaaaacaaaaagaaaatgtcttaaagattagctagtgttattacagtttgtacatagtttagtcgatttcttcctagttcattgtaggttgaaatgctctcctgtgttgtggttagagcatgagtttgaaatattataatcaagcagtcttctaaaaaattcttaaagttcattttaataacccctttagaaaattgataaaaagatattctttgaaattctttagttgatgttaaagttttaaaaaataaagaagcttaatcaggttgacctagttattttattttattttattttaattttaattttaatttttttttttgtgtggtctgaaaggttgtcctagttctttatatggattgagatcatttgagtacattgacaagtttttatttttcaatttttaactcaggttgcttcaagtgcactaggttttggaccacagat

SEQ ID NO: 8159 - DNA, 934 bp, Prunus persica
  Intron number 3 from transcript ppa007974m (locus ppa00797 4m.g) derived from phytozome v7.0 (chr-ID scaffold_6; pos 2103030 to 2103963 reverse strand)
caaggcgcttattagcacacttggtttcacttttggtgagtaaggcatctgtttgattgaaatttggcgtaagttgttggtttaatattctttcaggtgttgcagtatatgttggtgctctgctttgtttgagtagttggaattctttctatgcacattgtaggtttcaagataaccttaaataataatagtatgttattttttaaattcatgcagttttagaaaagaaactattctagtaagtttggctggtgaacttaaaagtatgaatgtggtttccttgatgcgagaccgaagggatggttggtgatgaatgcagaaatggacgttatttgaccaaggacctatagacaagtacagccatgtcaatggaaaacaggtccaattgatgggcataacaaggttcatatggatacattgtctaccaaattgaacgggcttgcttcttgttgtcgtttcttgctagctgaaattctaaaaccttttaaaatcattaaatctcattcttgttatttggattatgtgacaccaaatgtctatagtatgtgggttggaaattatttctccctttccctttttgcttgatttttgtttttctttgaatcatttaagtgccccccatattgcacacattgtggtaatgtcgtcagtggaaatacattgaggtttaaaaaattatatattagtgaaaaccaccatatgctagcaacaaattacaattcaaagaatggtgaaatctcaatctgcttgtattaacgttatctggaaaggttcgagtttttaaagtgatttgtttatcgtaacgtttctttacattaatgtcttgatcatcatcatcatatatgactcactttttcaaatattaatgtacttactgattcacattatgggatacacagccacaactttgacaagctggcatcttctggtcaca

SEQ ID NO: 8160 - DNA, 1507 bp, Prunus persica
  Intron number 3 from transcript ppa010402m (locus ppa01040 2m.g) derived from phytozome v7.0 (chr-ID scaffold_1; pos 2602335 to 2603841 reverse strand)
tgctgaactggcctcaagggacctttgcttcaaaggttagttatttatttctctgttcactcattaaaaaagagaaaggccctaattcattcaagtagagaagaaatatgctgcttacaactcgcatacttacattgcttgcttccttgtggtattttgtttcacaccattaagtaattgaggaacgtgatcattaatatgttcatgcattataagttgaagttttaaatgtaggcgaatatgagactatgtttgaatccagatgtcgtttttgggacttttaattggtaatttaagaattcgaaccatctagcctcaaagcttagtagttaatattagtttgttgatgcagctgattatcagtttctagtttctcgtttgtttttaagggctgagcaaaggattttgtttacattccttttaattgtagtggccaggaggcacaaatgactttgttttggtattatagtcaataaatataaagcttagctggctggctagaagcactaccccgttttgtagtttcattccatagtataatattcctgcagcagggagacttctgaagaaattaaaatcaggaagttaaggtttgggaggtgttcctctccctatgccttcgagatacatctattctgcagatatccctattgacctggataccttatggcttctgagggcccttatagcataggcaataactagtggaaaattgaatactgcttttcaagagtttgtttgccctgatgaaagtgaattctgaaattaggcgtgccacaaggaagaattgcagatgaaaggctctaaagtgaaacaagggtgtaaagaacattagttgaggtggttgagagtatagttagagccttagaagcattataccgatcttgtcacatgttagttatcttgagttttgacaatctgattatctagttgctctcttggtcaatgtgcttaccttaagttcttttgtttatggccagtcttcgtttaaattcagtaacatcagacaacataatgggtcagggacctctgatatttgaagtacctggtttatttggagagatgtggttctgtttctactaaaacttacttctatttctcatccttaaatccctgttattcctaaatttcacttattttcttaaaaaaagaatcttatttgccttctctttactccatcacaaagacattatcctctcagctgaaacaaatacgttgtcctttcatttttgtattcatgagaacacatgtccattttaaaatctatacatatatagcaatgtagatgattcgtagaagtaatatgtttttctctactgttacttctttgcatgtttttagctgtctctctgagttaacattgaacagaatttcacagagaatgacatgcgttgatagtgcattttgttctattttgattttcagacaaaactttttatgaatttcttcatatgactaaatatttccagtaggttgtgctggataaggagaagcaaatagtgacagt

SEQ ID NO: 8161 - DNA, 883 bp, Prunus persica
  Intron number 4 from transcript ppa003667m (locus ppa00366 7m.g) derived from phytozome v7.0 (chr-ID scaffold_7; pos 3269107 to 3269989)
atattactcttggcagttttggagcaatcactcaggtacctctaattatccaagtagcaattcacaacatgtaaaagttaagtggcttaacttgtccttaatatttcagtatggaatctgagtagaacttccctgcatttgcggtgttgtttaagtgatttagcgtgcttaatatttggtaaggtatgcaatggactaactagggaatcacttgcaggcaagaactccttataggtttacgcaggttaaattgacccctgaatataatgcaaagatatatagcagctattctagttgagtcatccatttaagaaacttagagacagaagtaattggagctattccagttgcatctgttttttggttcttgggttttttcggtttccttttgatttttgagaataaaattattgctggaaaaattctgatataaccatattatcaaggttgaagggtaattttagatcagccttctagttttggattcttgataatttattatcagatgtgacctttccttaaatttttgttatgtaggtgaccaaggttgaggtctttgctagtttatccagcacaggctagatgtcagtgtagtcaacccccgccccccaacatggcttcttaaataggcttttattctgaatcattattttttcccatgttttatttttaaatagattagatatgtcatatttgatgcagtagtcttaccaagacattaccttttctttaactaggtcatctgtgcacctggacccctttttcttatcatcttctagaatctaagtctttgtttgtaatcaatgatgatccagagaatttcttctgatcagtcactggttttgtagtttaaatccgttcttcctgatcggagcacaaaagt

SEQ ID NO: 8162 - DNA, 1093 bp, Prunus persica
  Intron number 8 from transcript ppa001558m (locus ppa00155 8m.g) derived from phytozome v7.0 (chr-ID scaffold_4; pos 27321833 to 27322925)
agccttggtacaccacatctttcttaccctttaattctgttgagccttggttttcagatgcttgtattaactacaaacttgcattctctttcgttatgtggaatgaatttcagacgtgtgctatattttaacccaagcaatgacattctctgcctgtataactatcaaataatatcttttatattatagcaggggttcgtccgagtgcttaacggtgtttatcatgtttgcatctcatgccttaactccctcagttctcttgggcagctgtcagattctttgaaaataattgtccacttttaatttgttgatgactcaccttgttatatgttcattttaccatacagactaatgttttatgcattcataatactttttttggttaattatattacactaggttgatactcatttgttcgtttgtggagatattcttttggtttttcttgaactcaatcccccgtatacgttaaacgaggtttctttccactaaatatgaacctcaattaacctcgtttctgtttggatccgatataagttttcttttcttttttagaataaaaaaaaactcttgattttcaaggttacagacattcaaggcatctaatgaataatccttgaatctcagtgttagtgctcttgtgggagaaacttcttatcttttcaaaattgcatcttgtgctgtctgtaacagctcaacctaggaatgcatgttaactgcttcactcaaacataatgtgtgcagtatggcaactattttttttcctttttcggaaaagattattaaagactatgcacaatacgctcatgagaaagccacagccaaattacaataagaaagagctggaccaaacactctaatccaatgggacgcagcttatgatgttacctgatttggaattttgttattgtagtcttctcaaaatttaaactttcacagaaatattttttctttttacttcatcttatgtgttttgctgctcattttttctttcttgtttccctatccatcaatgattattgcaccttcctaagttcgttctttcaaatttcttcaggattaagtacagtataagcattgttgctgacaagg

SEQ ID NO: 8163 - DNA, 1217 bp, Prunus persica
  Intron number 5 from transcript ppa002177m (locus ppa00134 5m.g) derived from phytozome v7.0 (chr-ID scaffold_4; pos 27051342 to 27052558 reverse strand)
ctccagagtctgtggtaaggtcacttgaaaggtttttgatcttagcttagagaagtactgcttagtgttgatttacaattattaatttattatatataatttacagaatccagattctgcctatttatgactgaaacaatataaaaaagttttggcttttgacttctggaattgggagagtatctgcacatgtatagttgaacaatattattgttataatgagttggtcagattaaaacttttaatttttacatttttcttcaagcttctgtacttcaattaacgaaaatgaagtattcttttatgtcaaaacaatttaagatttaaaaatgtgtgtttgttcaccttgtcttttactgacatgatttttttaggcatgttttctgtatcatacaatagaaaaataaggttgaaggaatttctccttgtagtttctcatatatatatatatatatatatatatatatataaaccctaaaccttatttgagggacacccttgtagggccccccatacattttatttcattaatccagaccgtctattttgtagatattcattcgaagatcatttctgcaaaaaatcacttgaatccgatatcatttgactactcaattaaattattgaaattttagtactttcttggagcaccgttttcattgattttctaagacacaattagatgtctaaatggtttccgatttgtctaatttttggcaaggatgatctatgaatgaagacttaaaaattagatggtttcgatcgttggaaaaaaatttcatagggtaccctaaagggcgtccctcaaataaaattatttaagggatcccttatatatatataaacccattataatcacaggcagatttaagcagttactgatttattgactggattgttatggtttgctcaagggtgtcttgactctctctctctctctctctctctctgttgcacaagtaattcaggagttcagatttcattatttcttcttcgaatggtcatgtgatatgaaagtcatggtatcactgtatctatgcacattttttatatgacttgtgtattgaattctcatttgatttatgtatggactaataccttaaaattatataagatttggatgtttgggaattttagcattctacgaaaagtatgacatcccaatccttgtttcttttgcagataaatacttgtaactccttctactgtgatcaatt

SEQ ID NO: 8164 - DNA, 1414 bp, Prunus persica
  Intron number 7 from transcript ppa021419m (locus ppa02141 9m.g) derived from phytozome v7.0 (chr-ID scaffold_2; pos 5946131 to 5947544)
ttcttagtgtgttaattcacaatccagaagctacggtaagtggcgagaccttttatttattttatattaattaggtatgtttcaattagttttctttttttaaaattgaagttctgctgtatcctttcaaaggactgtccccccttttattttttggggttgaaaagaaacaaattttatttaaagataatctaagatagacaagagatagtgaacaaggagtccaccaaaaacaaactacaaatgattacaaataaaaaacaacgaaacctacaaaaacacattaccctataaatgactcccaatttagcaaaataaaaaggaaaagatccctgaaatctgatgtaactgaagcccaaagggatgacaaaaacctcaccctctcccacagctcttctacccccatcccctcattcctcttcatccagatcacccacaggacagccatctggcaacaaccccgtaagacccgagccttatttcctctaccaaaagctgcaagactttcactaaccaatgaagggcacccttgtggaattacccaaatgactccagcctccttgaatagtaaacaccacaagtttaaagctacccgacaatggacaaacaatgatctgcattctctccttacattttacacattatgtaccaacttggagtcagttggggaagagtctttgacataaacttgagtctttgtctacatggaaaaattgcttcttttctatcaacttatcagatagttgaaatgaatctagtatttccctttgttacatccaaggatgaaaatcttgatgtcactgaaaatattgctggaaatattgaaatgaatgaaaatgataaatttttcttataaagtatggaatttttgaatgaaacttcaggaaatacaaaactaatcaactgggcatcaattttacatataaactgtatccatgattagtatatgacaatttgggtttaatggcaaacaaatatgtttaggcaagagttacaagtctttaatgtagcatcatatacacttatcttccgtcaattcctttaaaaccaatcagagaattcctttttgcatgtggcgctgctcaataacttttttggaagtagtctttgagaaatttcgtgttgcacttgtagttttgttgtccattaagatgatttgaaactttgatattaaagaatctcaatgattggctatacagtaatgttaaagtatgactttatcattgccatcactgttctccatagaagttagagctattgggcataattcgaaccctcatgttaactaaaaagaactttgctttctattgacccatttttgtttttgtgttcactttattttccgtttcatttttcctttcgagtatttgacatttggttttccctgtgacagttgcaagaattactggaatac

SEQ ID NO: 8165 - DNA, 656 bp, Prunus persica
  Intron number 13 from transcript ppa004671m (locus ppa0046 71m.g) derived from phytozome v7.0 (chr-ID scaffold_2; pos 16833680 to 16834335 reverse strand)
tgggtgaaaacattctcaccgtcaaggcaaatcaggtattgtgccaacaacatggcctcaaataaattggttgtacagcagtctataaatgttaattaatttttggtctatgctttagtagatatagaagtaaatttgcctcaaaacacatctttactttgatgatctgattcattttgtggaagtctttttgctgagaatatggttcattgaaaatattttttccaattctggtttccttggaggctgggaaaaaaattatgagagcttgatctgataaatgaagaactggatcttggatctgaattcttcatgcttgaaactgatttcttaataggaaaagcttatgggccatagaaaatgtaatgcaaaatgcatcattctctggattacatgacacatttacaacaaaaataaattggcagtgaagagaaaaatttatgcaaaatgcatcgttctctgaattcttcctattctgtttcacttaaattgaagtaatttaagtgataatcttcttttttttttttttttttttttgttgttattgtttatggaagtactttatttgcagaagtttctataaaagaatttcctcattccagtccagtctcatgtgttcatgtcgttatttgtttaccaggtaagaccactaagat

SEQ ID NO: 8166 - DNA, 1471 bp, Prunus persica
  Intron number 6 from transcript ppa004314m (locus ppa00431 4m.g) derived from phytozome v7.0 (chr-ID scaffold_1; pos 43522498 to 43523968)
ttatcaaattttttggcccataaaaaagagggaaggtgagcagtgtatcgctgacatgtttttgttatctatattgggctcatattagaaatggagaagaagtcaaagaaggaatttgtcttacttttccgttaaagaaccatgagtcctatcgtttcttcatagaacactgattccctttgataaaattttaccaattgctgataaagtaatttataccacttttacaccctaaaactttgtgtttgtctgtctttgcttcttttatttttatgttttggttttttccttaaccagtacaatttctgatgaaataatttataccactttaaccctaatactttgtctttggttgactttatcgctaatacttttgatttgcccgtcttttctgcatttgtttgttttgttttttcttttccataaccacttaaactaagcaataagtctatattctataagaaagtgtagataggtgttagctgttcactggactgataatatgcttgttaaagttacttcgtttaatcagaccaaaaaagaagttacttcgtttaataagtttctttgccaatttattgaatgacaagtgacctcgtaataaaaatctcagtatttaatttttttaatgatttggtgaccttatcagtttggagtatgttttctttctttgtaatacgtagtatactttgatgttctaagctatttcatcaaagctattcatagctttattatatagatgatttgcaatgtatatttggattacatacccttatccattaatatcattatttgtcataactttctctcctcctttcccctttctcctttcatactcttgcatctttcttagtgctgctctcatccccataacgaggtgatattattgcagcagttatttaggtgtagtacttttatgtgtgtttttaattgagttctgttacatgtattacttaaccattaaatttagtcttaatggatactgtttgtagcaatgggaattgaatttttgtagtttaagcgtactttgtaactgtgatgtaaatacaagaatttttatactttgaggtattgaagttttactgtaataataggttggtttagtttttttacatttaccaataacggttccatacttgatagttacgatttggcagaatgtctttggccaaaacaagactaaaaaatttacactctgttgattctgtaatcttttcttttttagactaaatgatgtagtttggtttgtttttgttgtgaatagtaaaagggttccactcaaacaaaacattagcagaagggagaatgcttcaacttctttgagattaattttcactcctccctccccttataaaaaagacagttgtttattattagtcggtagttcctatgcttgctcgaagaatttagttcatattgaatttttaacttttcaacaggttatctgtgactatcccaagtgtgaaagcaa

SEQ ID NO: 8167 - DNA, 822 bp, Prunus persica
  Intron number 1 from transcript ppa017310m (locus ppa01731 0m.g) derived from phytozome v7.0 (chr-ID scaffold_4; pos 4923727 to 4924548)
gaagaggtcggtctactgttggagattatctggaggcttcgatttttatgggagtggcgtgcgtcggtcttctttttcatatcgaactccagcttcctctctgtttcagtctctttctctcactgatctgtaagtaaattttgcttcatctttcctttcgatttttgttgctcttctttttcatttttgttgtaactaatatcttggatcttatttgattaaactataagacctgttttaatttgctgccctaaaagtccaaatctctaatagatgttatagattttctgtttgcatgtggttataaattttctgtctggccgatttttttattttttatttttttctgtttgtacttatcttccgttccttttttggagtctctctttgaccttgaagatgcataaggttcttgattactgtcaattactgagaatcctgttatgtcattttcacatacagctcaaacagactagcttcctatagcatatacagcccttgattataaaagggtggaaccacattctcttgatatagtattgcaattgtatagcaagctgtaaaatttgttgtattacttgcattgtcctgctgttcataggtaaatgcatagctttaattacctcctctgtttttttttctctgttttcttctttttctcagccttttgtagatctgagttatcaatctttacttcttttttccctttatttttcaggaaggtttatgcttctttggcaagaagagaaatgcgctgcaaggaacccaaaaataccaggactcttcatgcctaataggaaacccaatagatgactgttagga

SEQ ID NO: 8168 - DNA, 2250 bp, Prunus persica
  Intron number 2 from transcript ppa026996m (locus ppa02699 6m.g) derived from phytozome v7.0 (chr-ID scaffold_5; pos 1456335 to 1458584)
aatatattctgtttagagcaagtgacattaaggtaagagggagacatagtatacttgattactgtttactcttatatcattttccttttatttattttgttagttcttgctttgaggtggcaggtttttattttatttatttatttttaattttaaaattttttgtcttggacatgtcattgtaattcctattattttgttttttgtttattctttatcttcattgtaaatttcctttataccatgcttgtaatttgtaagtttactggaagagacaaatttttctgattctaaattgatgtagaaccagaagagaagtagacaaaggttagaaaatagggagaaccagagaaaaacacatgatagaggtctaagcagagaagaatgagagatggaagagactgagaaggagaaaggcaagttaggataaactcaaattctttgttatcaaatcagataggtgaaagtatcaaattccaatcataataaggccagtttatatatgcaatcctataagattatagtcgcataccaattatcaataaagctaataaataactagcccccaagttccatgttaattaaatataatttaaacttaagattttgcctacacacaaaattttcttcttgcattcatcattaattttgtaggcatttgttctcccattggataatatcatcaatcaaaactcctttataacgtagatatttgtatctttattacattgatgcataagagaaagaaatagaggagggagaggaagagaggaagtggttagggtttcaattttataatagttcctaattccagtcatcttaggtttttttgatgcctattatatataatcggcagtccaaatctgctaaggaaatcctgacagtagtagaaatatggatcctaatagtttaagaaatcttaatttaaattaatgaaacccagtataagataaaaatcccaaagttgaaataaaatgggaaggtcctaaattggtacaaacctacttacatcatttttctggctacaagaatttgaaattttaataacactcgggtagtgccattcatacttgttgaaaaggttgaagtgaggtgaagaccaccatcagcatcagggttcgtagccctaggcttgaagatctaggactaatctgagcatatgatggtgtttcaaaagggtaactataggctctccaaatcaacatgaaaattatcatatgttctcacaagaatcattgttaagtcatggctgaaaacaaaaatccaaggacaactaagtagaagtttagagtgtagctgcatatcattctttgtggagttgggttatggatgttaaaaacgatattggaagtttaatgtcccattgatggtaactggtgaaggttctagattctttagaggctactaattttatgttaatcacagattgtgatgcaaggatttcttgaggcatgttgctcctttttttctgggtgaaaggcatgctgctctttgaatttttagtatgtaacatagacagagattaccctgctctgtgtgtgcgtgtgtgtgtctataatatctctgtaaacctctttaaaagcctctacttcactctatagctgttttggttgatcttaaattcttactgatctagctcactataaagaaaaaaaggtgcagttctgtcaacaatttctttaattatataatggggaaactgagaaacttgagcatgcaatgttctgcgtgactggccttttaattggttttcttctctatgttgtatgaaaattattgcatgtatctggctttttatcctacttgtggtttacatgacctttttaggcatgagaccccctgtgatgttcaaactgacatctttatcagcatcaccttaagtatattattgtccttttccctattctgccctctgttttattagtttttatgtggcatggaaggtgatacttcaactagctctctctctctctctctctctctctctctctctctctctctcactctctacccttccctctctcccagaacacagatgtgcattttttttcctagatttctcttagagcatgagatgattttatgactgatgttgatgaacgagatctcattttgatgaaaacgtgcctagacaattaaacaaacaaacatattgggatgctaaatatgatagactattcatgtactgaaaatgggcctattttcacaattataggatttgcaagttaagtctcatccgcctgctcaaag

SEQ ID NO: 8169 - DNA, 348 bp, Prunus persica
  Intron number 11 from transcript ppa002976m (locus ppa0029 76m.g) derived from phytozome v7.0 (chr-ID scaffold_8; pos 18594738 to 18595085)
caaggctgtggtgagctgaataccttagttttgtagttttcattctgtagttttaaactgaagaaaagggaaaatagaaaaaaggaacatcaccaatgagttccatcttttattcttagtatgattttgagatctataggagaacgttgtgcactgggcaagaggatgtgaaatattaggatggtggctttgtaacgtttaaaattttattctacaatctcttaatatttccaggcttcaactctttgtttctcgacatgctttaaagtagttttagatcttagacagttcttatggtttgatttggcttcaggtgcatcacggaggtgctggaacaacagctgctgg

SEQ ID NO: 8170 - DNA, 1465 bp, Prunus persica
  Intron number 2 from transcript ppa003872m (locus ppa00387 2m.g) derived from phytozome v7.0 (chr-ID scaffold_4; pos 867038 to 868502 reverse strand)
ttcaattacctacgtgaaccattcctcatttcttggtaaaatactctgtttctgtcttccagtttttattgtcttttttttatctatagaaaattctgtttgttttctgagaaaataaaagaaagtaattctgttctgaatctggggtaaaacatagaattccaaaatgctattcttttttttgtttccctccttatctcagctactaaacagtaacgataaaatgttttgtgtcgaaacctagaaagttttgacctttttatcagcctctaccagatctatggctgcaaaacttgactttcatatagaaattagaataatcttccccctaattgtttcctaatgactaatatctccttacatacatgccattgctaagtaagaataactcatgcgtctattaagcatgtgaatgaatttggggttagtatagtaaagttggccgtagtttagaatatgctgcatatccttgatattaattataaagggagtttttgttcataaaaagaaaactcttaagtaacttttgccctttaagtcgctttttgtcggtttgggtttattaagtcatggtacggacattcatttgaggacatgactttgtttggaatgttgttttaatgttaaaatctcagttatcaaattaaatttcctcttaaatgcaatctatcgcctttatctcaaaaaacctattgcatattaggccataccacaccacactgcatgataataaaaattatgtatgtgcaaccgggactggcctcgtattgtgaaatctgatccttcacatgctgcatctcttcctgtccacagacaggaccacaccacaactacatcatattctataaataaacaagtgttacgcagacctagatagtgagcccatctgcgttatatccctgtccggtttataactagatcaaacttgagtaattactggaaccaaatccagacatatttgttagtaaaaatgggcacaaatcaagtaaaatatctcttgatttaccatttcgcagaattgccatctgcactgcacgcatgtcagctgttaaatgtggaaaacattggcattcaaagagtgcatttactgtatagccccacaagccaaagtagatctaacttcacgtgcagtcagatccttaatttatgacaagcaaaaccagcattcaatcaagtctaacttgttcctcgttcaatgtgttagaaggagactattagttgaaactactagtttgttgattttttatctgccacattgtaaataatttgctggtggcttcctttatgcatccaacttgagtttgatgatataaaattttggagggcaaaacctatttgaaagaataaatagtaaaatctgtcttatgtttatgatcaagtgatgcattaagttgcaaccttttaagtgaatgcaaccttttaagtgacactattgagtttcaatctgaatgtttcttctgtaggg

SEQ ID NO: 8171 - DNA, 576 bp, Prunus persica
  Intron number 5 from transcript ppa007878m (locus ppa00787 8m.g) derived from phytozome v7.0 (chr-ID scaffold_2; pos 23518776 to 23519351)
cgttgctcagattgtatcctcaacaatattgtctttttttgacaaatatatatgtgcacttcaccttataatataaaccattgacacatgcaccactatataattaaatcagggaaatacctgaacctaaaaattcttaaataatattgtctagtgtcatggatacagattctctgaaccttactctaatagtcttttatggagaacacacttctatagttgactgcattaggcaaagaagttgcacaaatgtgccttctctatgtggaaatgtacccttctgtttggtgggaaaggctaggtaaataactgaccaggaagttcccatattagttgtttccgtcctgtaaagcataagtgcatgtacgagtcagaagctgttctggtctggcagttcatagtgctggatacttgtcattacgaagagctgacacacacgcccttgtcaagggctttttcttttttctgtgcatggatggttattaaaattataatctgatgataggtgtctcagtagcagggtattgtaggttctcctatccaattttgtttgatatcttaactagtttatttcag

SEQ ID NO: 8172 - DNA, 584 bp, Prunus persica
  Intron number 3 from transcript ppa006949m (locus ppa00693 3m.g) derived from phytozome v7.0 (chr-ID scaffold_7; pos 22169243 to 22169826)
ccgtaagtttcttattcttttatcttttattaattatgagagccagagtaactttattatcttattacgttctgttctctcagggtttaattggttggtaagatcattgttttattagtgtacatgtgcatgagcatgtctatttttgaatttttgtgctgaaggtctgtatgattagtttgtgttgggtaaaatcttgaattaggttatttggtagcctacatctgatacatttatgttaagaaaacatccaaatgggtgggatttgtagattgcatgtctagttctagatagaactacttattgtaaagttacaatgccaagacgccaagaacttgtctgtttatcgcaaatgcagctattagctaaggagattggttaagtatgcgcttattgttattttgaatttacaagaatgaagagttttagtacttttcttgagatttgtttatgtctcgcctttataacttgcttatgatttaacagtgctggtttagggttatttttcctgctgtttactaactttctctttttctttggtctatgtgcacgtttgggtttctgcgttctttttcaggcccaat

SEQ ID NO: 8173 - DNA, 868 bp, Prunus persica
  Intron number 2 from transcript ppa003999m (locus ppa00399 9m.g) derived from phytozome v7.0 (chr-ID scaffold_5; pos 15024151 to 15025018)
gcgtgagtacctctaatccacattcaatgattgtttttcttcttttcctaatttggattctgagctcttgttcccttatttaacgatagtgtaagagtattcatggtggatcatagtttctaactgtgattcttatggatctttttggcatatctcaggcaggttgtatataattttcttctttaatttattttattttggatacgagattcatgtattgaattgttgaaagtagcttttctttagttatctctttttctttggtagataccgcttttcagaaaggaaatgaaaagttgaaattctatccttcttttgtttttctttaatagaaaaaaacatactgtttttcttcttcaccttcttttccttttttcttttttgattgcctttctggggggatttatttgaatctttttatatatattctgttaattgcttggttatctattctttgcctgtgcagctgtactgattaagttttgtactattttcgtaacctgccatcttgttttgcattaggcgtaacctaagctatgtgcccaactctaatttggtgggaacccatttgacttttgtttattgggcacctgtaaaattctcttatggctctggtttctcgttactctttgtccctttggcaaagcttttctgtcactctttggtaatggtactctaagttctgcttgaccgtcttctgtttaggaaatttaaattgaatatgttgtggcattgcagatattgggtagttttgatttttactgtagttgagcttcattactcttaactcatgtcgttacttcattagctagtcatgaataattgaacagtgatataacaaaatcatgggccattactggtgcagctg

SEQ ID NO: 8174 - DNA, 1514 bp, Prunus persica
  Intron number 7 from transcript ppa000040m (locus ppa00004 0m.g) derived from phytozome v7.0 (chr-ID scaffold_7; pos 4548408 to 4549921 reverse strand)
ttggcataaccttgtcttgggtattctttttacaggtagatgctgataatgatttcctctggatcttttctctcctttccccaactccccttttgttgttctagtttgaatcctgagtaattgaattccgtgtaccaaaaaccattgtgaatagcgagaatttttttgacaagaaaagtgattatttattaaaaacttcttgtgttatttttttcattgcatttaacgtccgttatgtctggtattttttcaagtccaaaagtcacttttggtccatgtaatttggacttcaccacttttgaccctgtagattcaattccgtcaattttgccattgtagtttcgtatttgtagcaattcgaggacctgttagaattcttgtcatttctttaacgatgcaaggggcaatttcgccaacccaaaacccttgaacgtaaaagcttgtttgaaagtctccctatttcatattaaggctcgaaattcaaccactaatcccaatttttgaagaaccctaacccaaatgaccaatttcaagccctaatatgaaattaggggagtttcagacgagcttttatgctcaaggattttgggttgacgaaattgccccttgcatcatcaaagaaattgacaggaatactaacttgtccttgaattgctacaaatatgaaactacagggttaaaattgacggaattgaaattacagggtcaaaagtgtttgaagtgccaaactacagggaccaaaagtgacttttagccttttttcaaattggaactgaatgttggagtcagtgcttgcatgtgaatcatgtcatatttgtttcctcttgtgcatacatgatctgtattgctaatattaggcttaggtttggattaaggtgtgcaaaataatcaagcaccaagaaagctgcccaaaccgaccttgcccgctctgtttggtgtgttggacacctagtacttgacggtgtaaactgacaaggtatcatattactgacagaaatatgatgtaatatgataccttgtctttcgagcctttgaactgaataacatagattgccaaccattcctgtggaggcatttagttgataagatgcaatttttcaccttttaattttaatggcagaaaaacaaacatgtgtaaacaaaccccataatggtagaaagtgaaacacttccccctaagcttcttttaggggaaagctgctcgctcataaaagggctcatgttaacacacgtgctgctaaaattcaaaatagcactttttaggcctacatcccagctgagcaccagagaggctaaaccaagaaatatcagaaaatagtggatcgtaatggttaacatttggctgggattttctcaatctcacctgattggttcgtttataattccataaaccgatcttacctatggcagccatagtttggagtggggtatgtagttattttacatttctgcctgggtaagtagtacttatttattctttggattgtatactgcaggcaattcgtctgaagtac

SEQ ID NO: 8175 - DNA, 700 bp, Prunus persica
  Intron number 3 from transcript ppa012749m (locus ppa01274 9m.g) derived from phytozome v7.0 (chr-ID scaffold_8; pos 19469826 to 19470525 reverse strand)
gaagggtttctatcctcatccaagaacactaacttgtaagcagtagctaagatatcctttgaaatgtatgaggaactactgtttgagtactctgggtatttatgcctgatatcgagtcttcgacctgttatgcttccatgtcatcttttgcttagctagctgaattcttttattctttcatgctataacggggtcacttctttcactgaccacttttcaagctaaaatcgtcagtatagctcatctaggtggtccctattagccatgaacaacccaaagccatagacataaactcacagaatgacatggttttacatgtcgagtccatattatttgcatatatgatattagtagcttttgaatagattgactcaggcaacactactttatgtcagagacatgattttagtctgggacaattggttgttactcatttctctaaaggtatctgaattgaatgttcttacaacatatatctcgccaaatagtctatttttcaggttagattttttgatacataaggttccacatgcaagtaatagtaaaccaatgcgtaaaattgatgttttctggattatatacgtatatctgtgcaaattttgtataattggatttactgtatccgtatttaatggaatggaaatcttcaaaacttttggctgcagcttgaagcgatcaaggaaatttcagcctgaagata

SEQ ID NO: 8176 - DNA, 1332 bp, Prunus persica
  Intron number 1 from transcript ppa008010m (locus ppa00801 0m.g) derived from phytozome v7.0 (chr-ID scaffold_5; pos 2237000 to 2238331 reverse strand)
acgaggtgtgggcgggttggttcgggattgccgtgagttttgttggggttttgcagctgctgcctcgaatggttccgacatttggggaattgagttggcagctatttgtagcaggttacttttggtagttgctaaatgtacgatttatttgactgttgcttctgattcacaagaagccgtgaatatgattattggtactgatgggtggatgagtaatgtgggtaatctagttgatgatattcgaatgctgctggccagttgggtaatgcaaagatggtttatcaacctcgtgaaggtaatagtgtggctcatgctatggctcaatttggactgcgggaaggcactcaatttttctgggaaggggtgggtccaatatggattcgaactctactaggaaaggatagacaagggggttatttttcttatgtattgtggtgttgtggtactttttttcttgaccagatttccttcattgggggtttttatggcaaggttttaatgagactactttgtagctcctagagaagccagcagccctagttgtattgatgtttatgaatgaaagttcttattttgataaaaataaaaataaaaatttaaaagtcacaactgaataccactagacttttataaactcattaaaaatctcaattgaatacatccacacttttaaactctataaaagtcattaaaagtttgaactggatacaccccaacatgaaattagtcattatgtgtaatttaaccttgaaaccccaaatatattatatacattccaatttcaaacggaggggtatagaataacttgtctatggtcattagattatatataattcaacatgaaatcagtcattaggtgtaatttaatcttgaaatcccaatatattagatacattccaatttcaatccaattatttaatgaatttttagatttcggaactttcagatgtcggaattgatttgaactatcaaaactaaaaaatttgggatcgaaatggggaggaattggaatttcaaattcaacttgcacccctgtgctgatttaaaaattaaggatcatattgattgatttgaaaatttatagactgaaataaagaattttggaaaattcaggtagaattgactagaatacaaaaacgaattgaaaaagaacactcccaaagcaaaattggaaaagaacaaagaaagcaaaattggaaaagaacaaagaaagaagcgaaaagaccaacagttcatttcaactcctgcaggtagaaaaacaaaaaacaaaagaccagcaattccttttgtttgttctgctcagggcgcgagggcactccgatcaccggataa

SEQ ID NO: 8177 - DNA, 1684 bp, Prunus persica
  Intron number 3 from transcript ppa026846m (locus ppa02684 6m.g) derived from phytozome v7.0 (chr-ID scaffold_2; pos 773798 to 775481 reverse strand)
gagagaaaagaaggtatgttttcaattcaaccaaacagttcatatatattttcatgaattggcgttgctatttatttttctttgctttttctttcttatgtcattagtcaattacagcaaaaggtccatctccgcatatatttttttgacgaatttcacatttacaaacctttaaaaaaataataataataaatatagaacttctgttcaggatttactactgttcaagtatttgagaataatttttataccataattttgtctctaaatggcacagataagccataaactcgtaattcctaagctttatgttcttaaacattatactacgtacactaataacacaaatgtaactcactacaaattacactaatttacttatatgcttaggaattaggaggtcatcagaactttgcttgggctcattcctatgatacgcccctcgatcatggactataattaatacaaaataatctctaatcataataaatgcttaaatctaaattctcatgaattaattaatgaaaaatgaaaaataggatttatttgaaaattactgaattttatggcttatttataaggatggtatcatttttcaaagtagtacttaaccattaatatttttccagtagcacttgcataatattcattacatgcattttctattttaatcatagataataatttttattctttatttttcataatctttgagaagaatatcgtcagaagccaagaaactagggacaagactacataatatgttgcagtgcacagatacaagataccatcacataccaatttcgttcttatcagataccgtcgcttccatataactgattatgcattttcttgattaatgttcttcaaatcctgtcattgcgtgagaacatcacataatttagttattatatattctttagttgtattgaataaaatggatatatttggaccttccttatcatatatgtaattacgatattgaatctttggatatttggctcaaaatgtggggccttgacatgggtattgatgtgaagacaacacgggctttctgccctcctgataattttgcaatgggagtgagacggttgtggctagggagcatattttccaagctttgcgcggacgccttgcttgcaaagtccttcttggtccggatgaagatggagaaggtactgaactggggtctcatccattgtcaggaggtccacaaagtactgtgaatacctaccgatcctcaacttctgactcctctgtacttcaccctccgaaggaaccaaatcacctgcaagaaggttcagcagagtagactttaccgctcgttaggtccaacaatggcaacacgagtccccatatcaatacaaacatcaacacctgacagcttgaaatcctcccgttgtggataactgaagcttacttcaacaagttgcaaaaatgggggagtaagttctgtaggttcaggaaagtggaactccacactgtaatctctccacttcttaggagcctcagctggtgtctcatcttcatcaacctttcccttagccttgttctttgatgcttccttagctgcaatagactttgctcgatccttgaccttcttctgttgaaccgatttccactccttttggcacctttcatctgcttgtcataaatttcaaaccttttgttcacctccttgcag

SEQ ID NO: 8178 - DNA, 936 bp, Prunus persica
  Intron number 1 from transcript ppa006209m (locus ppa00620 9m.g) derived from phytozome v7.0 (chr-ID scaffold_4; pos 6362538 to 6363473)
ccggaaagtctgcactgacgaattatgtttgttctttgcccttatcgtttaaaggtgtttaatctaatggtgttcttgatgaattattaaatgattgtattgagcgatgaaggtactgcggttaattggctttcgtagtttttgttctgaagctgttttttggttttggtattaagtagtctttaatttgattaacagtttcttgatgatttggttatgggaatttcagtagggtatacacaagttctgtagcatgagtataatgaagtgttggagacttttggtaattttggcgttatgcattatttcatttgcctaattggtcatagtttatattttatgggcagataacattcgttcttctatgttgctctgttgtgttgtgtatattgcatggcattagatgaacaacacgggtatcgtattctgcctaattttcccatgattactggacttcggttgttaagatatcaaaatagttgctaaggttaaagcatgtttgagcttcttgacagaaggcttaacatgtcagtggctctgaactcgtttccagctaaacaaaggtgagttcttcttaggagtcttaagtgagtatcaaacaccagtattgagtctgaacctgtcctgtgcataacatttctcttaaatccaaaatgttatatttcggagagaaacaaatgaaaaatctttttagactcccatctgggatatacatataagcttgggagattatcctttgttcttaaccttgattctttgatgtactctgttggatataaaatgatttgcggtactatcttgaattaagtttattagaacatggatctaacatcattttatacctttactggatttattgtaaccagaaccgttctgatgacgtcctctgcattttttacaggttgggactaaggttgctgctgtgtcacggaagac

SEQ ID NO: 8179 - DNA, 700 bp, Prunus persica
  Intron number 8 from transcript ppa011011m (locus ppa01101 1m.g) derived from phytozome v7.0 (chr-ID scaffold_3; pos 14783913 to 14784612)
gagatcatcttacccttcaggcagctgcagatcgagtaagttcaaatcctctccttttacatctggtgcttttgaggtcactaagtgaaaatacttgctttcttctttgcctcaccattatcatgtcaaggtttagtagttcatcttatgtatgatgtagccacatcggtgtccccttatagatgagaaatgaatcatattacaaatcataagaatcaagtaatagatgggaaattcgataaaaagaagaagtaatagatgggaaacaattaaacaccacttacatggaaaacttggtctcttgaacctcacttatgatctgttctgctcttgcaccttgtcttgtgagatttcatgtataggtttgcaaagaacttcttccttttccattttctagagttaaatatagtaccatctgcagaatcatgacctgagtcgataaattgtaattagaagcttctctttcgtatgtggttgtgatttgatagtggtaaaatgcagtttttgtgagattgaagtaaataactaaaaaaacattgtttctttgtatctgttaaatcttttggtttctctgtttattcctatgttttcttttctttcccactttatttatattgctgagtcctacagtggttgctttctaacagttacagattcttctgtagtttggagccaaaatttgtgtaatcacctcttttcg

SEQ ID NO: 8180 - DNA, 1058 bp, Prunus persica
  Intron number 1 from transcript ppa019672m (locus ppa01967 2m.g) derived from phytozome v7.0 (chr-ID scaffold_7; pos 10354510 to 10355567)
caggtaagcaattcttgcccttgaatgaattacttgttgaagattcattcttttttacaagacacaatagaactaaatgttcctcagattgaggatgggtctggcgtataggaaacagaggatttttaacatttattcttttaaaaatatgaactttatttttttaaataagataatttcctcatttttagcagtgacttccactccccgtataatctaatcttccatgaccttttgtcaatctggggggaagatggttggttctccatggtgtgcctgcaaggcttgtccatgcccaagaagctctagaaccgtgtgtttagagttgaggtctctttatcagcctttcatattctttaaaattctatctctgacatagcagaaaagcctctttcttaggacatagcagaaaagcctctttcttagagctatcccatatagtgcgaagccctacatattttcctggattcactgtcacattgatcttgagtacgcagacatttgttggaagttaggaggagtactaggctgaaaaatggacttgacttattatagttcaccaaacaagcttgtacattacaagatagatccaggatcctggccattgccttgctattttcaacagccgcgttcacaaaaatagagaatcatctacaagtagcagatgacccaacattgggccattcttataaagtgtcaccctttgtgaccttttagcttgaaaggacttttgtaccatttgagataaagtttcaccaacaaaaagaaatagatagcaggtaagggatccccctgtcttatgcctctatttgatgtaaatttcctgcttggattcccatttcccaacactgagctgattcatttcagtttcacaatcaaaccaacccaagatcgattaaaccccgttttgtgcattttttttatatatattctttacttcataatttaagagaatcaagaaaaagagaagatcacttgtgacactcaaactatttttatttttgttttttgctcggttcatagggtgattacatcttgagaaagagtaacaaaagtaa

SEQ ID NO: 8181 - DNA, 931 bp, Prunus persica
  Intron number 2 from transcript ppa017844m (locus ppa01784 4m.g) derived from phytozome v7.0 (chr-ID scaffold_6; pos 20280009 to 20280939 reverse strand)
ggtggagatctaacatctctcagctttcggatcttgtaagatattcttgttcccatttagtatccaatcactattgttttcttattcattttgcatttgataaaaaggaaaaagaattctttggttcttcgaatatgctgagaatttctctacacgggccaaggatatctggttttttgtgtgccagattagttatagtgatttcaatataagaaggaagtggagatatttagttgtgagaaatgaaatagtgctgccaaacatcttttgtcttgtgtcccaataaatatttaatgctgtaaacatgtcatgcaattatcaacttattaaaagtttcaagattgtatttgtgtcgtggacgagcaatctggttagtgtgaagtagagtaaacatgctttatctgaaggcatgtgttgtgttggatattatttcttgggttgccgagttctattttttggtcaaagggttactgagttcagaactgtgtttttcttaatccttaattctcatcagtagattaaattttatatatcaaggaagtaccaaggaaattctaaaatgtttatcctgggtgcttgtggagtattaaaccctaaagttatgataagaaaagtttaattttccaagaatcagatttgaacttctaacacttttcagagtagatcgtttaatacaatagtgttatcttaggttatccttggaattttcttttaacaccatgttgtttagcaaaaaaatcttcctgaacatttaggctgttattgcaatcagttgtttggtaaaatttccttttttggccatgcaatatgagtttctgccattcttcatttttttataaactttttggcattcttttccgccattttgcacatgtttatactgtcttaatcatgtagtgggctcaatcttttgtaaatctgattaccagag

SEQ ID NO: 8182 - DNA, 1390 bp, Prunus persica
  Intron number 6 from transcript ppa003609m (locus ppa00360 9m.g) derived from phytozome v7.0 (chr-ID scaffold_1; pos 43091738 to 43093127 reverse strand)
ataagggcgcacggttagttattggaacatgcttgacatcttcagctctcacttttaatctgatgatttgtaaaactcttgttttttgtatctgtttcagttatcatagtcctgtcaacttcagtcagtttttggacatattttaagttaagtaaaatgtttcattagtagtaaatttttaatgcattgtgagtactattggaattatagagaaggcactccacttcctggtaactctctactgttgcataatgtatacaccaaggtgaatggctcttgtttcttctcacaaacaaatttcttcgattactaaatgctttactaggtatagggcaattgtatgtcatttcacctagataatggactaaaacggtaagggtcatggtataggatttcactatttccagtgcgtgacactattgtaaaagggagtttccttgatattgtattcatacatttgtatttaatgatcgtggtcatttgtgttttgtttggatttctgggtatatattttaggtatgcttcttggttgggttagttcaatggctctacagtttagtcatctttaatccccttgacctcattcttgaatcttgtgggggtactgttttactgttatcttgttcacaattatctgtttgatggggaatatcatagacaatgatattttacaagttgtccagggcataaactgtgttttctggcttgtgcttttttaacagtggtgatatgaatttaaacaaacctaaataatagattaatctaaatcaaattgaactcataagcaaatgaatctattgaagtagacatgtaagaacgacattgtacccacagagatttattaaaacaaccttattataaaatctttttttatttatagaattagcgatacactgcattggggagggggggcacttttcctgggatttgaacgggtgaccaagagggggaagggggagggacctcaccactgaggtaaacccattggtcaccttattctaaaatcttttcttaactaaatcagtaaatttttatcagagtattgaaattagtctttccagtagggggaacaaagtgaggagacagtgactgttaatggggtaggaagcccaatgtcatatgctctctcatttaggtttaggaagggttacagcaagataatgttggcatatctatagcaagttaccattatggggtttatgaacatttattttattgtgaattgaattgtgtagttacattgttttcttttggcttattttacttagcgtagcttcattaggacagaattaatgcagtttgattgtaggaaaaatttgaaataaacattaagctgctttgtgttgaaacagtagtttgttaaaacaaattgcttctttacttgtcagaa

SEQ ID NO: 8183 - DNA, 2282 bp, Prunus persica
  Intron number 1 from transcript ppa000790m (locus ppa00079 0m.g) derived from phytozome v7.0 (chr-ID scaffold_1; pos 44507354 to 44509635 reverse strand)
ttttggcccgagatctccgccagcgtacccgtcatgtacacattatctctcacccactcttttttttttttggctgaatgcttgtgtatagggttcatgtttttgttgatcttagaagaattcttttgatttttcgtgtgtattttggagtatttagtagttatttaatttttttggaatgaaagcagggtttcaattcttagttccaggttagaagattagtattttttttaataccaacgagattggatttatgtgtttgatatttgcaatcgttttctgtgttggtggaagtgaggggtgtgtaggttgtaataattgatcatgtggtgactaagttgatgatgttatatgaagctatataagaaagcggatgatgggatttatacatatcttcaattcttcaatgggcagttaaattgtattttgtaggcagtgttgagaaataagaatatggattcataatacaacatacaggagaaatgcaactgagttttcctcataagtttttctgctttatttcctaatgttgacctttacttaagaggaagaaggttacttgggatggtattaaccgggatagaagttctcgaagctttgcatgggaggctactttaggattgacgatgctacttggttctaggtgccaatgtccagtgcacctggcagtgtcttcctcatatgctttctccctccagattcttgatcagtgaaggcctcctaaaaaatgttttgagctattagtatatatgcttggaataatcagaataggttcacaagatccattaatagtagtataagagcctactaataatttagtgaattttactcgagttatttgtttttgaaaccttgtgtgatctccttatgaatttacgacaagggttatataacaaaaaggattctttacagtgctacttgcattctgtatgacttaggttgttcatctggtatctgatctctaatttaatggagtttgaagatgtgattttctggtttttggttgtgcaggtggttttaaggagatctattaagattagtgaagtccatggactttaaagactgttgattttttgttttgatgtcagtgataggaaagatcagattgtttttctatcctggtaactatagttcaggtcatgtttgttttggatgtaagatatgttttatttgaatgagattattagatgttgatttttgtgctttagactgttgaaagaaagagggaaagtggctctttcaaaatcggataaaagctgatggttttttatttttgtattttatggtgggagtggcgtagcatgattcaagcagacttcactgctctgttattgtttaattatgctgaaatacacctaatagatgaatcgactactttgtattttgtgtgttgcgattatgcctttccaaggattcgatttggaccaggttgacctacatcctgatcacacattttgatatgattacctgagcttaaaataagaaatctgatatgtatatgttttgacctatatccatattcttgaggagcttaacatttttatttggttattaaggagcttaacattttcttcttctttctgataaaaaaaatcttctccattacaaaataaaatttaaaaagttcacctgtttgcacagcgaaatatctcttctagagagttaaatgatttatgttataactatccataaggagctatacatggtttcttatatggcttagtttcttgactactatattttttgacctctgataaatgataattaaataacaaacgatgcataaataaacttattagacgagtaaaattgtccattttgtaactattctcataatttatattgatttattgtttgttatcaagttgtagcttatgtataaataagtgaatagtttaagggttcttttaatgtttttaaaaaagtttctttagtagtaaaggccttatttacagaaataaacctaacatttcttttgcaacaaataaggacctctgacatatttatctttgacaaataagggcctctgacagttactgcaattgttactgattaattaaatttatttggatcaaaatcccatcttcacagtgctagttttcatcacaaatttgttactgattaggctagtgtgcttttaatacctttgttatgcatacctccaaactatgatattttggatagatagtgaaaataaaacttctgttgttgaacttctgtatttatcgatgtttttctgaatatttataatgatgtcatattgattctcagagaaagtttgt

SEQ ID NO: 8184 - DNA, 1921 bp, Prunus persica
  Intron number 4 from transcript ppa005223m (locus ppa00522 3m.g) derived from phytozome v7.0 (chr-ID scaffold_4; pos 23778704 to 23780624)
tttctggagtgaaagggcaacttagtccaagaactgtaagtggaccttctgatgcatttgtgttatatttggacagatctagtgggggaaagggtgtgaaaacttcatggcatagctaatttatttgtttatttcaattataaaagataataatggcaaggaaattttatttagtcaattgatgttgattctgaatgcttaggtgccagttattctttagaaatcaatctttctacagaatacctttctagatgaaataatattattagtttttaagtccagattcagagtctggctacattagtctgacaagagaacaattattattattactttaaaggaaaggatgaaaatttatttcacaaaagaaactgaagaaaacattattctatacatatgtgtgtgtgtgtgtgtgtgtgtgtgtgtgtgtgtgtactggagggggataccacctgctcctgtttcccgggatgtgagaagcggtgcttgacttatgtattgccagtcgactgggctctcacatcccacaaaatggtattctgatcctttgtttatgtgtgttcctttcacaaccaaaacatgtaaaggctttgttaaaaaatttccgtgggacatccttgtgatttatcattcaaaactatgtataagtgtatgcaacttcatcatgtttgataaattctaagttctgaaatctcaaatctctttggtcatttcccttaggcccaggtgcgagacatgttctgttatgggttgaggtagagagagaagattgttctactttggttactgcctattttgtaattgttatattataaggtagattacatattttacctacataaactatagcggcattcactttggtgcatgataatcaaaaccttacaatgccatacccaaagtttgcgccatctttgaatttcaaacttccgttagtgtctccatcaatttagccattttctgctgatgtagaactagtgggccccacaaatttgatgaagattatgccacgtgggaaaaaatgattatagaaaaagccaaataaccttttacatgtttaaaaaattgagaatcagataagtaattaaaagatttatagataaaaattagaaactaaacaacataaaaggaaagaaacccaatcttccccaattctcttcgaccctcatctcctcccttctccctcatctatcccgtggcggatctgccattgcagatgaaaccaaacccatcttatctcgaacgcctaattaagagtccaaacaatatatgctgcacagcctgttggctacaagacccaaatcaaacccattatcactaatccaatgctgtcaaaactggcattattgggtttggaacgttggccagaacttcttttgttgtcgggtctttaatttggtggataggtcttagtgagcagcacctagattttttcctttatggtccccccatattctgcaggttcaaaatttggcagaccgtactgtaccataatctttcctatcttcagtgcaccaccattgctgactgtagacgtgtgccagctgatacaagccatgccacctgcattgcattatcatcaccattgctgtgaaccctatcctttacttccaaatcctcttcaccctgtgaaatgtaaaacaaaagcccccaagatagaactactacgacatttctatgaaccgttacatctttatttatttatgaatttatttatagtttgtcttgacatgacatatagccaaattgcatttgcataaattaaaattataattgacagtttggattagcacaacttacacctcaaggaagcaaaatatctctgctataatatcttgtttttcatttgtctgtaaccggaatgcattttctccctcccttttgtgatattctttccaccttttgatgctcttgcagagat

SEQ ID NO: 8185 - DNA, 953 bp, Prunus persica
  Intron number 2 from transcript ppa006285m (locus ppa00628 5m.g) derived from phytozome v7.0 (chr-ID scaffold_2; pos 3082343 to 3083295)
gcaactcagagcaaaaagcttgcccatcagtaaaggtgagattttatttgcattaagtttgaaattggccagagggcatggtagcttgcctaattcttcgcctgggacagctgtcttctgacatgcttgggttactagcagtgtgattatatgtatatgttgaagataggtatctaaatagctattacttgcgtattgctgagaagtttgttgtacctgaaagccgaccatttttgctttaacaggcgattcataatgccatgggctctatgtagtttcatgtgaaagatggtttctatgagttataggttttttctaagttatcatgtcaccgtatccattagcattctgcaaatatcaagattttgtcaattaaaattttaactttttgtcttcattaattttttacttcttaaagctcttttatgtacttcctctcttcttctcttctctagtcactcttttaactttctctctactctctattcaagcgaaaagaaaaacagaatgttaaaatccgggccctcagtattgtttccttcttttattttgaaggaaaacttttacttgatttaaatgaaaaatacttttccatttgcggagggatatgtatggtcgttgtatacttaaattacgtatcactgctctctatgtctggactcttttgcaaggcaagaaaagggaagggggctttttttttcccctcctactaaatttattttttttaacaaacagagacccttgctgaaagttgctggcgtctgttattgaagttgatttgtagtgctagtttcttgactttcatttactaacatctgtaacattgctgtagtagtagtttccttgacttcttatgtcttatagcttcttgactttcaagcttatatcttatatatgtatttcttttttatgatacaggcagaaagcggctttgccccacctgagcaaggcag

SEQ ID NO: 8186 - DNA, 981 bp, Prunus persica
  Intron number 1 from transcript ppa002184m (locus ppa00218 4m.g) derived from phytozome v7.0 (chr-ID scaffold_6; pos 21125747 to 21126727 reverse strand)
gtgaataaaggtgcattcattctttcctttttatctgaaatctgttcgtaggagtacagttgaagatatactgattggcatgtcctttaataatatgatttcacttgttaagaatctgcctttttgatacactttaacaaaaactagggggtctactacaaatatatgtataagtttattttcatggaggggacatgtcttgcatgtcaagccagccagcaagaccaaaggaaaaatacaaatgttggtgagttaagtaaatattaaagaacaatgggtgggtgttattaaaaaaaaaaatcttaaaacaagatggcttgttcaggaatgattttgttggtgtgtaaattttgtaaaacaagttaatatgctgcaagaaacacattataatgatttataagagtagatacatgaatattataggggagtaaaaggcattgtaaaaactgattgtacttgccttttcaaaattattagagactctctctctctctctctctctctctctctataaacacgacacgagtgcaggcatgccagtgtatgggtgtgtattgtaaaaattgaattgacaattatgctgcaactgtgcagaatgctgatttcaaatatcgttggataagccttgaaagcagttacagaaagaaaaaaaaatctacatattgaatatatatgcaagtagaatatctgtcagttcgcctagatttgaattataaatctgttcgagttcagcctcttcattaagatggacttttctggtactagtccaattttgttgattccaatttttagaagggtgaactcatttgaatgtaacttcataggaaatcagttatcattattgtgcttatgcgatatggtcgttattattttgaaaactattttgtgtatgcttttccattacttcttaagactttgtctctattcctttcattctgcaaagagactatttttacttgtttatatattgacacaggtgtg

SEQ ID NO: 8187 - DNA, 2497 bp, Prunus persica
  Intron number 7 from transcript ppa017994m (locus ppa01799 4m.g) derived from phytozome v7.0 (chr-ID scaffold_2; pos 13158422 to 13160918 reverse strand)
catagagaagaagatcttgggaaccatccccctaggtgagaattgtaacgacccggtcctaaataaattggtaattattaattcatgtatgtaaaagactattttacccttaaaatattttattgggtttaaagttgacttttgaccgggagggaatttgagaatttcagctataccgttgcgtagagcttgacgagatgagtccgtagacacgtagtgggctcgatttggaattgtaacgagaaagttacgatcaaaagaaacacagtggcacaatcgtaattatttcgaaatggaatttttataaaaacagagattcctctctctctctctctctctctctctctctctctctctctctctctctctctctctctctccctctctcccccgagcagcccctccccttctaatttttctgcacagccggtggctccaagagccaccacctgccgccacttggggcagcaccagtcccaaaaggaccgtcgtgagtccctcttccaccccaaccaccagcacaatcgccggaatctgtagaaatggcaccggtttttccaagaattcaaaccgctcgttctctctcatttcttcaccgattcagtcgagtaaggtatgggttttcgactattttctatgctctagctgatggttgggtatgatttctttgattttgaggtcagttcattttcaatttgggattcggccggtttttggtttacgattcgagccacttccggtcagtttttggggtaggtccaagaacaaaagtggttccaaatagggttttatacctagggtaggagtcttgagccatggttttgagatttttcggcgatgcgtaatcgctttggacacccacgtgttgccggcccgtgggcactgtagaaaaggggcattgtgtcccgatgcgatccccttgttgtcttgagcgcataggtgtgctcggatttcaattggataccgtttgaatgtcgaacggatatcgcatattgtgcgttatccgagttcgatatgtttgaaccgttggatagtcttagatttataatatgttaatctagtcatttctaggatcgtgtaggaattcacggatcgtgaatcggagccccgaatgtcccgatttgataacttaaagtttatgttttataataaccgtccgattgtgcgatcgtgagctatccgaccgtccgatctagaccaaacttgcaggacgagtgttctaaactttcggatcggaatttagaggtcatgggccccgtgggcccgtttgaccaagtttggatagtttgacccttggttgaccgtgagtcttccgaggtagttttaccttcctaggaggattatattgaccctagtgacaggtcacacgtgatattatgttgaggtcgcacgtggagtaggttatccggcgtgttgacagaccccatacacagtgttggtagttctggtgtatggggagattatatgatatgatgatgaggtcacacgtggtgtaggttatccgccgtgttgacaggccccatacgtggcgttggatgttccggcgtatggggagattatgtgagtattaaggagataaattaaagattgtggtggggaagttgtgatttaaagtaaagggttttagtgggaagagctacgtgtggcttgatccctcagtgagggtacgtaggcagcctaaggttactaggtgcagccgcatacatagatgtaattgtgttaggaggttaaaacctcgtatgttggaattggaaaggtagatgatgtaagttgtgtttggtattcataattcatatttgagtttattaattaccttgcggaagacaatatttggcttaagggctttgtgggttgtttggtttcgctttgttttttgtgagggctgaaggctgagtttgtgaattccatgaaattatcttgtgcgtgctgcccattgggatattaaatgtgtttttgtgcaggttgaaatttggggaatgttcaatttacaggggagactctgccgaaattttggtagaaagtctcgtgcccttattcccttttgggaaaggaagctttagttttagtgattgggtccgacatcggggtgatgtcgaaatttccacatgattcttctcggatttcgggaaattcggggcgggtcctgtcaagaatagtcagttggctcctagttatttaagcattattatcaaacctatcgtagttaatgtgaattattgagaaactgctcatgttggttatataacttatagccctccgtttggacaaaggaattaaaaattacatagaattttaaaatgaccgaatttagattttcatcatttcaatttctggcaattgaaaatttcagtgtttggatttatgtatgttgaattttgtcaatgacataattttgtaaatgacactatggaaattgtgaaatgacgcttattttggtggaaattaaacggagggtagatgagaaaataaatcaattttataattctttcagggcgat

SEQ ID NO: 8188 - DNA, 1296 bp, Prunus persica
  Intron number 1 from transcript ppa002073m (locus ppa00207 3m.g) derived from phytozome v7.0 (chr-ID scaffold_7; pos 17731322 to 17732617 reverse strand)
tccagctcctctgctgcagcagctgcaagtgcaaggtaagtgcttttagtctgtcttcttctttcttctcccttgttctcaatcaaagattgttgtgtttttgtatgaaatttattcatgtcagttgcgtgatattgtgtcaagttaagcaccaactgaacccgctgaaatgtgttccaatttcaatttcttcttttgtttttacttattttggattaaaattgtggttttgttctatctcttcctctctaatattactgtagtgtttaggttgcttgaacgtggtttagtattgtgaatggatattgggtttttggtggtgattaaaaaggtggctgttttctggggtttgagttggattgtatacctaataaatattggtgatattggttgcttgtagtgactaacagtctgactgtctgagagaaaccttgaattttgttggttgttaacagaggaagatggggggtggtgttagtagttagtagtcggaaactctagctaagctcagcctgaaattttgaattttatcttgttagacaaacttatcaaataggaaagagaaacagagttcgtgtttgagcagttgtggtaggtattttttgagtaatggtgttggtgggtttatagctaagtccattgacaatcatgttttcacaattttatgtattaaaaaaactatcttgatctattacagagcaaaaggggttcagatatttgggaagtagtgaaatgagaacagttttcgttttcacttctctggatcctgaatactgtttctgatttcacaaaataagtggaacctctagggattcagaaagttacactgctgcggcatccatgtccagccttctttgtctaactgatttccacactctctcggatctctctcttttggtctttccttccactgcaaactttccttcagttcacgaaaaaacagaataagcttataagtttctctctgtttcatatgctaataaaatttctctgttggtcgataatgcctagttctcttgttttctattttagtttgttaaatatctgggttgtgtgagtattaaattatacattagactgcaaacaaatatgttggactgtctattgtgtactatattgtgtactttcttctacataaattctaagaattttacgatgtgatgatttaatttcatggaagtatatccaaagtaaaattccaagtttaacaaccatggaagtatatttgcaacttcttgatttgactggtttatgatattcctttgttaatgagattgtgtttgctgtatttcgcag

SEQ ID NO: 8189 - DNA, 519 bp, Prunus persica
  Intron number 1 from transcript ppa008869m (locus ppa00886 9m.g) derived from phytozome v7.0 (chr-ID scaffold_1; pos 29289746 to 29290264 reverse strand)
cagcttttcaacagaggcgtttttggcacaaagtggtaggtcatacccatttgccttggcccctgaatctcatccctttattatatgtttgtttctgttattcaaatccttattctttgcttatcatgatttgatttcgtataatttctgtcggtcaactttactttcaagtttgatcccataattctaagttttcgtagaattgcagtttaattagtggacaatatgttctcgaaattctggattcttcgaggcacccaatcattaatgcatttcagcatatgggtttctttcattaaaatatttttgatcgattttgtgcatttctcgtcaatatttttggatagtttttgctgttggcgctagatattcgttgtctctagtaatttggttgtttcttaactctgccgcgtgtgattatcaaatattgagacttggagtcaaatatctgtctacttgtttgaattgctcttgtaattcggtgaagtcttaaccttggtagttgttttgtagcaaaac

SEQ ID NO: 8190 - DNA, 1134 bp, Prunus persica
  Intron number 1 from transcript ppa005578m (locus ppa00557 8m.g) derived from phytozome v7.0 (chr-ID scaffold_7; pos 20461806 to 20462939)
gtgtgcttaagttggctgattttggtcaggtaattttgattgctcgcggattgcttttgttttgttttttttttcttttctgtttttgtttcagaagaaaattgcgaaactttggtgttttattgatggttattgagtcacattaggggctaatgattcttttaagttttctaataagaactataatcgtgcttttataggtatgtagtggattagattttcttggagctgctttcgatcataataaagttgtggattttcgtttgtaacatgtttcaatgaaaaaagttttgagtgagagaagaggacggcttttaggaggagcaaactggtttagttttcaatgcactggcattaagtgtcagtctataacttaaaattcttaaatttggtaactgcatctattttgattgattagtcttccattgtggtctaaggggttttgtaccggtcttgattggaaggttggcattttactttaatctttatcagaactcagatgatcacatttgtcatatttgatagaatgatttggataacgggattttgatttttttgactgactttgaattatgtgattatttgttgtatgaaaatacaaattagatttgtttggttgtttgtgttggagaattttcgagttaaaatgatatcagaacgatctggaattagttgaatgttaattctgaggaagcaaatcatcacattgctctctgtagtttgagaaaggattggtatcatcgttcttcatgcactggctgcagaagattggcatcttttatgtgtaatacgaaatcattcacttaaactcactacttgttatgaaatgcctgcctgctaactagccattcacttatcataagttggaattttgatagctgctaactccagggctccagtcttaactagaatatttgtagacttgattttatccaaaatgctgacaaagatgtcaatttaaacatgtctaacattatgttagtactttttcatatttggttttgtttgatgctttctacaattttacatttcaacagctcggagttatttttgttatgtcctcattaacttatgtaggagtgaacatttagttttgtctctatttttaggcaaggatactcctagagcctggat

SEQ ID NO: 8191 - DNA, 1206 bp, Prunus persica
  Intron number 2 from transcript ppa005883m (locus ppa00588 3m.g) derived from phytozome v7.0 (chr-ID scaffold_1; pos 40482371 to 40483576)
agtgggcaccggaggcgaggaatttgacataccaggtgaactttttggctctgttcagtttcattgattttgtatattgagtttgtggatggattcttcagtgttttcattcatttactataatgtgaaattataggagttaggaatttttcattcatttagtataatgtgaaattataggagttaggaatttatgtgtagataacctaatttctaattccattgttaaatacattactccatcaacttaattatatgtttctctgcaaattagttcgcatgaatctgattagaagataaaccctgcatgcaggctattagtttgtaatggtaatattaattatctgcatagttttctgatttttctgtgcatcctcaatataaactttctactcctcaacccattatatatacatattcagttactgtgccgcacattttcctcacgtaggatgataagaagttatagtacattgattctcaagatttgatatgctcaatttcaaaaccattttttcggactatgaaattcaagcagttcgtccctgtttatcatttttactgatagtgagctaccgtgtctaaggcttttcacttggaaatcggtattaaagtcggacgtcaaattagaaaatgtgctgcactttgatttgggtaaacaacaaatgtggcaactacttatcgtaatttcctcatgcggttaccaatattacaactttcctatggctggtaaatggctacttgtcatcgttgcatcagcttgaaagagagctgattctgtataatggtctctgttaacatttaataatctacctgaaacattttgggtatgccatttttatttatttatcttatttggaagatatcatctgagaccagttctataacattctgctctactattaaatcactaaatcaggtttgcgttatggggtttggtcataggagccgaacccttctatttttgtcattgcatattttcctgtacttacaaatccatatgcataatcttttcagagcgccaaaaataggtttcgagtttcaaatgtattgttgatgaccactgtgctgtctttttttctttgatctgtatattctcttcgtttcctctatcttctctgaaaacaggcgcataaatgaaaaatggcttatgacttactttatatggcagctaattgagaaaggaccgaatagcgactatagggg

SEQ ID NO: 8192 - DNA, 1542 bp, Prunus persica
  Intron number 1 from transcript ppa005088m (locus ppa00508 8m.g) derived from phytozome v7.0 (chr-ID scaffold_7; pos 13743539 to 13745080)
actgccagaggcttcttgctgtaagttaatttccagtgtcttggattattattatttttctttcttaagatagtcaatatttgactgtacgcaggcatgcatgtgattctaatgtttaaatgccacttgcacaatagttttactagatttttggcaaaaatcacctttagtttatgtggtttgccaattttatcatttatgccatggtagttttaattttgataattttatctctataattttaaatacgagcaattcaaggacagattaaattctgtcaaatcccttgctaaaaaatttaattcaaaggaatttaacacattttgtgactaatactttaattgctatgatttaattatatggataaaattgacaaaattgaaactgcatagactaaaatagtaaaaccgacaaactataagaacaaaaaatgacttatttttcttccacttcatattctataaaaatgatactctaaacaactttaatttacaaacaaaattggtttttaggtatactacgagaccatattctagtaccactataattaccataataaagtaatgaaattaaaataatccgaaatgggctccatatagtggcatccagaatggggttgatgtgggcgcgccctgtaggctttgcgtttcgaagaagaccaatttgagcctggtagttaggtttggtccactatcccatcatccattgtcttttctaaaaggttgcagtacaagggatgggagtcatgggctcgatgatttgtcattttgcgtggacagacatccgtgggcttatcacctttcttgtaacttattattttatttttttaccttcggagagggagattgaactcggaacctcttataacgttgagatcgtaactagcatcactagactcggagctaattggtcacctaacaagttgtgttcaagtcatgttacttgatatttggtgaagtactaatcaatcttaaccagacccatttcgttaatcataacatgttcgagttgacacaaaacttctacattgtaaacttaacactagaatgctagcaagacctcggggaaaaagaaaaaaccctctacttgtggtagacatatctcgacatgcctcgaaatgtttattatttgtgttagcaagtcatgtcattttttaggttcatgtgaagcaatagtcaacccaaatctgtatatttcgtgttggtttgaagttgtgttctcgtgcgatgtcaagcattgtcactaatggtgttgatagcttagttcttggagtctatgcctacaagtggttgttatggattcaacaaagacttatgaggcttctttcttttcttcggctgccaatttgtgagagacattgcagtgcatcaataatacagttttgatttttgaccagcccaagctgacattttcaattttctctaaatgaggacaatcatatatgaagctggttaaatttgaccatgccccaggacttggtcactttgatggtgattgaacttttcagggttgcaaatctagagaaataaaattatctggagc

SEQ ID NO: 8193 - DNA, 2243 bp, Prunus persica
  Intron number 1 from transcript ppa025750m (locus ppa02575 0m.g) derived from phytozome v7.0 (chr-ID scaffold_6; pos 5784259 to 5786501)
aatttacaagaatacacctcaaggctctaattacggtaatgatatatatctataattcttaatttacatgtggggagatttaagataaaaaattatttatatgaacacaggcacagttagaggtgggcacggtttggtttggaccgatttttgcctcaaattagaatcgattcggtactattcatccggtttaattcggttcggttttaataaaaaaaaattcaaaaactgtctggttcggtttgaaccggtttcggttcctgtttggttttgaaccggattataaaaattattttttaatacatttctcaactgaaatattatttttttacttgaaaattaacaaattattcaatttcatataaaaaataaatattaaagttagaaaagagagatattttgacattgaacttggataaatattaggtttttttagtgaaattaaaaatatagcattatatataaatatatattgaaattatatatatttttaatttgaccggttcggtttttgaagacatggaactggatccgaaaccaatccaaaccggtcgggtttggtttttgaccgatttttgactttttgttcaactcggtttggttcggtgcggttcggctagaatttcctgttcgccggtttgagtgcccacccctagacacagccgaggtttgcttaagaaaggactcgtcaatgggccgagccgggctagctcggcccaaatttaatgggtttggactgggccggatctggctttaaagaggagagagaaagtatcaggctgggccaaaacgggcctacttcattcgaaaaaaatcataaacttaatcataagggcattttagtccaaatgtgagattaaactcacttaattacaatattttcacatcaaaccaaattcataaaacacccaatagagtcacacaacttaataagatttttcacaaaaataataaaaccaagtattatttttgacgttattacataattagaccgtaatatgttttaaaaaataataagtatcaacaaattttttatttataagaatggtatgaataaatatgcaaatgtttggtgatgtgttcaagaaaagtattattatatttggtggtacgattatgtttcgtgatatgattatatttgataatatgatatgttgttcatcttatttatatatataattgttgtattaataattgacacaaattaatgtgctcatcatcaaattataaactaggaatgagtaaagaaaagtaaatgaaatgaaacaaattatatatgtgatttaagtgatataatcctaatcctaaactcttatttatacataattatatatgtatgcgggcctaatgggccaagcttttgtgggcgggctgggccaggctttcttgggcttaatcaggcctggctttagacactcaagcccaagcctagcccagcccaaggtgggccgggctttttttcaatgggccgggcgggccccatcaactcatgagcccgcgggccaaataatgaagcctagcttaagatgataatagataagctgatggcactacaaaaaaaaagtggcaacagtctcaattatttggtgacatttgctgggacgaaataatgatgactgttgccactttttttttctagcgtgatcttcaagtttttccctttatcgcatataacacaacaataaaccatatggggaaacgtaggtagaatccatcgccataagcttgaactctgttgaggttttatatattgaagaatataaagattgataattaaatttgaagaattttaatttacatgcatcatgcatgttaggcatgagctcaacacagtcaatgcatgtcatacttcccggcagtttagattagtttaaagtaaaatgtcgtttgtattaattttataaagataaaatcaattacatgcttagaactttatttttccagtcggtgattcttcataatgatttacaactttgtttctctatattcttagtatatgtagaaatgtattctgtgactataaaaaattatatgaattttttttttaatattttaggagggcaaagtgcagatattatattgcattggtatatcgtatatgagttacttgccttgacgatgttgaaagattttaatataattatcaatgaaccttatattctggatctaggatgatgttttaatttactaaaaacaacataaatattcttttcaggatttattcactgctggaacagacacaa

SEQ ID NO: 8194 - DNA, 911 bp, Prunus persica
  Intron number 5 from transcript ppa018837m (locus ppa01883 7m.g) derived from phytozome v7.0 (chr-ID scaffold_8; pos 16736787 to 16737697 reverse strand)
ttaagggaggacaaagaagggcttcctgtattcaggtctgtctttgaatgctcaaaacttaaagctgtttgctattaacatttgatttaagaatgagaagtgaaaatcaccctgtggaatgaaaactcaaagcaacttttctctgtctgtaacatttatgatggtactttttggggttaaagtttatgattgataccgtttagtagataaaaaaagtttatgcttcattatcttcgattacccatcaatgcatgtttggctttcccggaaggtcaaattgattagtattgattttatatccccttaatggttgaattatgataaacatcttatgcattctattgattttatgatgctactttttagtggttgtagacctctctcattaggtccttttcttttatgcattctaactcaaacatcttatgtagattcttagggtcttatagttttcagctgagcttctttttttcatcataattttcactaattggaaagcagttgtctccgaattgggtttatacgcaattttgataaatagggagtctgcaggctgtagtattcagaagggcttcaagttcatgatcatgcatgaaacagaagagaaattactttagatgtgtaattcctggtaatgggcatgatgtgctggctagatatcatatatagataggtattgcaaacttaccggcattaatgtggtctggagaacatggttctaaaagtcgtcaattctataggccattaatacgtatagtggtcttcgtgggataatagattttctttctggggcattttattttgttgtctttggggaatgataaatgagatccttacatctggtattatttcctaatgtttaccttggtatgccaatgaattgctgggcttacactgcagaaacatcattt

SEQ ID NO: 8195 - DNA, 1361 bp, Prunus persica
  Intron number 2 from transcript ppa014447m (locus ppa01444 7m.g) derived from phytozome v7.0 (chr-ID scaffold_8; pos 2538799 to 2540159 reverse strand)
tgtgaagcctctgattgaatatcaggtaatgaaatttatttcctatgttaattttagatgctgttaatatgaacttacaattggatcagatattttttttaaatcaaattactagagagatagtcgtatcaacttattggtctttgttgtacctgtgtgttttatccatatccatgctccctactatagaggtaaagggaattacaacctagaaaagctcccaaaattacttctcctatgaaatcttggaagttggaaccatatatttgcatggtccaacaagttagaatgcgttctttatgtttttccataagaggaagtaatttggaaatcatatatatcatcaaatgtgaaatttagtaatatcaagttatttagttgggtatgccgtgcagaacgttatagagagtaattgtacaaaggttatagccaaaataagagtatcagaatatcaggattcaggatgtcatactaaagtgattaagcaagctcttttgacatattttaatgggattgttgggttggcttacaaggttcataactactactcttagtattggacgcttgcctagacaacatcaagattcggctctacctctacctgtactttctttttttactccaagatttcccacttgaccattgtttgtaggtttttgatattataggctaagaacagggaaaaattatagaacatatacttactggaattttttatttttgtttattttggaggaagtgttgcatagactatgaagtctcaatcaaaatcttttgcacttgaatctgttgaaatttggacttgctatggaaaacaaatcttatattgtaggtacttattctgttgtatgtagctctatgaatataatgccactaccaatactatagttatctattaaatgcagcagtttaaaaccagcagaatgactcctaacatcgcaaactgttgggtctcaatcgaatttcccctacttgaacttttgggctagatttaataaactgattgaatctttttacttacaaaagagtagatgattaggcagctacttctgctgagcatcagttatagttcaaccttaaaaagttgtggatacatatggctttcatattgtctttatttctactttcttgcacccctgttccctcctgccataattgttgagtaataaaattaaaattttaatctttttttctttttgtttttaatttttttaaaaagaaaaaagaaatggaataatatgattgttagaggtctttgttttggtatttatatgtatacttgagattgttcacatttggtttgaatgaatgtaatttcgtatttgtactgggattgttcaacttttttatttattgtaggc

SEQ ID NO: 8196 - DNA, 1002 bp, Prunus persica
  Intron number 1 from transcript ppa011737m (locus ppa01173 7m.g) derived from phytozome v7.0 (chr-ID scaffold_8; pos 16432994 to 16433995)
tgctcatctcctacaccagcaacactttccctacggtaaaggactcttctttcttttcttcttgttttgtttgattgcagagagaaagtttaagtctttgaggtttgtctttagttgggttgcttagctgagcctggtagggtagttaggttcttcaatgtggggttaatgcaagattcttgagcacaatttacttgcttttgtttggttttcaagaaaacgtgggatgaagaaagcaaagctttgtttttttctattctgtttcctcgtttgggtgttcagaagcaaaatcaggaaatcacatgaaacttgactcccatagaatccgaatttcggttttagcatgatcagggcttttatttgttgtaggtcattctttttaacattttcaattcaccctgtttggtatgtataatatagtgaagaaatcttaaaatttcgatcaagtttgagtctttatgtttgaattgagctgatcagagccctttatttttgttcactttgttgtggtgcagaatttattaagagggttttcttggttttgttcagtgacgttgaccctttctataatttgtcattcctgaacctgtgttgaatcatatctctggattaagcctagtaactaagttggatagtaagctcagaaaaatttcatgtctacaattttctcttactttttgtttatttttctttcttttgtagaggcttctgtagctatgcgtacatatttccttgattgatcagaatcacttagtaaaaacctttctgcattatacctgttcaatagactagaagactgttcggtgtaaggtgctttgtgtgatataaaaaagtatagcatgtatgtaactttgagaattttctcatctatattttgcattgcatgtgattattaagattcaaaattttgcttttcgcattttttttctgtatgagattgaattttctagaggatgattatgattttctgtttttgcttgcaatatgttggggagcaggatt

SEQ ID NO: 8197 - DNA, 1590 bp, Prunus persica
  Intron number 2 from transcript ppa013937m (locus ppa01393 7m.g) derived from phytozome v7.0 (chr-ID scaffold_1; pos 9208088 to 9209677)
aggtgctctgttcttaacactcccttaattattctttttaatttattgttttgttaaaatattgagttttgacaaattaagctcataaaataaaacaaataaattcagagagtatatatatatatatatatatatatatatacacacacatgttgttaacaaccatagactacttccaatttccatggtgtcggttcaaacttcaaatgtataattaagaagagcttcgatggccatatccggctgtccttgctgcatgaatcaatggccatacatacacttggcaggcagttgcaaactttatttttaattaaattcagttggtggcagatattttattaattatgtttttactacatttccttttcttttctttaatacccccccaaaaaattatctttcttagtcaaggaaaaaataattagttcagcttcctctattttctcgttataaaacaggagaatgagtaaggttgaaactcacgttaagtgtctgctttttactttttatggcaaatttgaatttgaaatcccttttactattgagaagataaatcattagacagaatatagagattattagtcatagtatttgaaaaagaaaaacattgatgttgagtaaagatgtgaaacggaataggccggcacatcacaacgcaagctcaacttgtttaaatggaacacagcacggtacaaacagaaatattaatgggccatgcatgaatattgtcgaggctattagaaattcacttaccattttattttttggttaatcccattaagcataaaattggatgctcttgtgttgtgccaaaagcaaatacgagggttgcaattgtgatcccaaaatatctgtaatttctaattagaccgttttgggaccgaagatgcaatttagatttgggtgtatgtggatgcataggatagaaaaaataaaaagggacccacatttaggatattagtaaaggattgttttgacaagtaacggctagtgttgtgacacgacaggagaatatgtctatccgccaacgtacgtcttacttttttccgaaatgtcggcagcagcaacggtagttacaagtatgaacatgaccgtagactaccacagctctagctgccgctcctgctgactttttgtgttgaccagccacagccaaagagttgggccgtttcgattgttgattgattcaggcctgcctctaaggcccgttgatttgctaaccgcagaatatggcccatcaaaccatatttataatttatgggccatgaatcttttttgtttgttcaaaggccatgaatcttgatccatagggttttctgttaaacatatattctaaaaggcttttcaggtgaacaaaaaaaagaaaaaaatttataattaagagtatttatctacacacccgagaaaaaaaagtccgatgacccataataataacactcaaatattttattcggatgattgatcatttaacctctaaactgttcttttgtaatttaccaagtgtgtctggataaaagctcgctaatctctattgactatagcagttttctttttcgttttaattgcaggcgtcaacagttgtccagaaat

SEQ ID NO: 8198 - DNA, 1463 bp, Prunus persica
  Intron number 3 from transcript ppa013182m (locus ppa01318 2m.g) derived from phytozome v7.0 (chr-ID scaffold_8; pos 12614719 to 12616181 reverse strand)
gaactccatttaatccagccattacaaccagtaagtattgcttaacaactactgcacgcacctttaactttatgaacttctctaattatcaattgcttctttgaacgtgcaacatacttgtttaatctgatcatttaataccggttagaataaatgtggttttttgagcatccctcacataatgtttttgatactgggcaagtagagaattgttgttttgacagagatatatgtgttaaggaaattattgaatggcacccactcttttatggcagcattatggtctcaatactgcttgcaaagagctccattacaaatgttttaatcagatatcctggtttcaaatctgagtatgacagtacattgattatatctgctcccaaaaagaaataaacctcttttcctctagttcacgtttagctggccatttcttcctgaaagttttggaatttttgcctgtgaccaaataattgtaacctggtgtaacaaaagcattagcattgatacatgataatttttacacgcattaagtggttcactgtgatgtgtggcactactattccgttttcagaagaaaaagcagaattagttatctatttttctatcaaggttaggagcatcggttagtaatgattttctggtataatgtcgtgcaacagtaatgcattaatttatgaaagattttcggaggggacagtgaaataagttcctttaattatagctagtccatttttctttccctgactgcatacgattaatagtgagggggaatattgtagggagaaaatctcaattactatttttttaaatccttggtttgaggtatacctcatcttgttagcagttgtagccagatacagtcattatgtatattgctacaaaaaaacttttgtgatatttggcagttcgtagctgttctctactcttttttgtataaatattttctggagttccatctagttaccgtcagtttactatcaccttatacgtaggctttgactaatccgtgactcaagctgtgttattttcccgagttgtccattctatcatttctagtcaccccttcgggttttcatgctttggattgtcacgctttgggcggggctggctaatgggaatgacatgtagggcaatagagatccttgtctctagcgttggggcataataagtccatgatcatctctgaacaactggttcttagtagtgtcagcatctacaaagagagttcaggtcggaacaacttggttatgtttagataaatggactttgttttttaagttgtttcagtgaacgtttgaaattgattgctttgtcaggttgtctcattaatcccgggaaggatgtcttcgcattcttgcatagtttagctaaaacagaatagagatatctgttcttgcgcctttcgttttataattatattaattattcttttttttgggtgactatttgcagggaaacagctg

SEQ ID NO: 8199 - DNA, 2017 bp, Prunus persica
  Intron number 1 from transcript ppa018998m (locus ppa01899 8m.g) derived from phytozome v7.0 (chr-ID scaffold_4; pos 2763715 to 2765731 reverse strand)
gcaagtaattgatctaagctttaaccgactatcaggtacgtatgtgccaacaagttatatagactccactagtgatataacgttacgttttaacattttgttattattctataagcccggtttgttcttttttctttagaaaattagactcattttttcctacttgcaagttatccaatacttaaaaactctcacttgaatagattatgtatttgtttttattttattttaatgatggttgaatctatttatgttggttttttgctatacttggaagtttttacaaaacttacatttataaaactaggactaccagttgtacaaatgataaaaactgtttggcgttgggggataatgacataaattgtaaataatgaattatatatggggaatatttatggggttttcacatctaggcccattataatataacattttcttttcttttctttttagaaaacaccttcaaatccaatactatagtaaaactccatattgtaccttcaagtaaaaatttcataacatactaagaatgaatcaattagaaagtgacaagtgactagttgaggttttttcttttctccaaataggcactctaagagttttttatatataaattatgtagttttcttggtgtttttttctagtttaatttatttagagtgctgctaaacgaaccttaaaattaactaagtacaccctactgtcaaagtatttattgaattactaatttaccctaatataaaatgactaaaaaggatatattcaattgtgaaacataacaccacatatttttagggtgtactcagttaattttataattcgtttagcagcactctttaaaaaccatctaaaatatgacaccgcatatttttccctacacttctcttcttctccatcttagcatttggacagccgaactcttttatctctcaaaaccaagctcagtagaacctcttcttctttcaatcactcttttgctcagtataaaacatacaaaataccaaactggaagaataaagagcagttttctattggccaataccgagcagcagtttcaaaaaaagaaaaaaaaaaaactgcaaagacttgactgattgctataataaaccacacaatgtagttgtttcttcttagctctctacaaattttcatgatgaatgtacagtctctgaacatgggatcttgaaaatgcaattttacatgaagacatattaaaaactgctcttatgtttgcaaagcgaagtgtatttcagcaatacagttgctgaaattttcgttttgccaagaataattttacttgaaggaattaaaagaaatatgcaggggctgattcaatacagtgcagtgcttgtttgtgttagccattgacggatggactcgctgtgagacacacatcaatcaatggctagcattcttcaaagaaaattgaaggcatatataaatacaaggctgattgatctatacagtgaagtccttgtctgcaatcttaattaattatttctttgagtctttgtttatttgctctaccatttggagttaaagactcaaacattaaagaactaaagaagactttgaagttttcgcaggcaaaatcataatttgaacgttttagcatcaagaggaatgaaatcaaagaattatgttgaacgtttttgtatcattagttagatttaggatatatcaaaaagacaatattgtccagattttacagttaaaatttttgagaattaaagtatggagaaaaggggataatagggagatcgatgaatgttgttggtttctttttttggcgagatagagtgtattagggtgtaccatgggtatttttagtagttaaatagggtgtacttagttaattttacattttgatttaaatattagtgtgtacttagatcatagggtgtactcagttaattttagggttcgtttagcagcactctttatttaaatgtaatatgagttttatttggcatacataacaggtgagataccaagagaaataggaaacttaaca

SEQ ID NO: 8200 - DNA, 877 bp, Prunus persica
  Intron number 1 from transcript ppa006754m (locus ppa00675 4m.g) derived from phytozome v7.0 (chr-ID scaffold_7; pos 14115899 to 14116775 reverse strand)
gccgggagaaagaggaagctgaaatcgtaagatttgatttctgttgcttactaaaaacattttgtaatttgcatatttcaatttgttgttttttcaatatggcttcaatgaaatgactcttaaggattttaggaatgggatcagtttagggttcataattggatacccaatgttttcaagtcaggaatatgctttaatttttgagaattgaagtcaattttgagattttagatgggtttttggggaagggtttttatatgtggcgaaaaagtgaatttagggtcttagagaagttggtttatctgagttttatggtagaatgtcaatgtgattttttgctaagaattagttggagttttataatttgtggaaattatgggttaaacccattgctagatcatggattttttttggtatgaacaacatgttgagttgaatgaattttgtagcaacttcattggttttggtttttagtttcatgttaggctcattttaacttttcataacttttcgggtcccaaggtcaagggatttctagtgcttatagtataattatattctccttttcgtataagtgtattatgtcttaggttcgtaaattgcttatttacatgtcttgcttaaacaaaagtaccagtacaatcttatgcatcaacaaaaaaaaagtagatagttgataattgacttgtaatgggattgtgctcttgttgataaatgcatgaaaggtgagttgaaacaattgcctttcatgcattttacaactcattatggcattctctgctcatctgtgtgtttcgtttgatgttctacacttagaatttatagtattttatgatgtataggttagctgaaaccatcacaaacagtaaaagaagag

SEQ ID NO: 8201 - DNA, 1253 bp, Prunus persica
  Intron number 1 from transcript ppa000612m (locus ppa00061 2m.g) derived from phytozome v7.0 (chr-ID scaffold_6; pos 17753333 to 17754585)
ccttcttagtaatcttgaaatatataacaaagttggtgagtcgaagtatttaaaattgacatgaggggtgggtcaaattgcaaaggcaggaaggtggtaaaagctaggtttggccatggccccccaacccacccctgcagcttccataaatagggtgcttagatcacattttctgcttgggggtggagtgaatggtctttttcatgatgactgaacccttttgatgattatatttgaagttggtgtccacaagtgtgcctctaggtctagaggactccatcctgtaaattatctatcttttttttagctttaagtgtctaaaatcatctctctctctctctctctctctctctctctctgtgtgtctcacttggttgtcatgtggttttcttatgtcaatgaatgaagcattaaaatatgattatctattttatatggatttttattaattgtgatatgatggatgcagatattgcacagatactcttagaagcaaaacatcgctggctacgcccggctgaaatatgtgaaattcttcgaaattataaaaaatttcacatttcttcagagcctgcaagtatgccaccgggtatgatttttcagctgcattagatttggcaataaatattgttattgaagtcccttctttccgccacatgataatgtagcactttagaaaagttttgaaatgaagctagtctttcaattcaactgctagtaatctgtaaaaattttcatcaaacatggcttattgttatgtagaaattgtgtggtagttcctctgcattcacaatgatctatctgagattgtgcagctgtgctattactatatgtttgtgtacgtgataaagtattggataggcctggttttctattttgaaaaatcaaattctgaaacatggcatgggagttgtctcttttgcattgtcgtctggcacgggagttgtgttttgtattgtttttggtttgatttttgtaggtgttactggcatttattttttagcataaaggctaactgttgctttttttttaaggtcatatatattagcattgcatgaagttgtaattgtatttactttgcatatactgtacaaattttaaattttatgagatgtatgctgagatatggtgtgcgtcttgctttgattgtattgtttttagttttatttgggtatgtatgaaaacctactgtggcttgacacacataatttgttttaggtggatcactttttctttttgatcggaaggtgctt

SEQ ID NO: 8202 - DNA, 1216 bp, Prunus persica
  Intron number 1 from transcript ppa010129m (locus ppa01012 9m.g) derived from phytozome v7.0 (chr-ID scaffold_9; pos 898588 to 899803)
aaagaatagcaaaacccacttctcaaatactcctggtatgcacttgtctctcttcatatccttatgcatctgtctgttcattcgcatgtatgtgggtcttgttctttgaatggtttctcttcttgggtagcaaagtttgtttcttttcgagttgcttgtgtatggtgaatcgatttcaactcaagaatcttggattctgagaaatcgaagaggttcttgcctaacttgcataaaacattctcctcgttttggtttggtggctcccctgaagtatgaacttgtgtttctctgttcaaaatgggtcccctgcatattaaattttagaaatacccaccatggtgatggtttgtggtgtagctggttacatgctttgaaatttcccgggaatctgattctcaggattttgtttccctaatttaatggagatccatgaaatctgctgcaaatttccaaaatctactagatattaatcaggaacacaaggagaagttgtttccctgaaaaaaccgtgtcttttcaggtcaaccacaaccattgaaatattggtattcttggtctttctgttgattttctacagaagagtctctctggttgtcaatttgatgttagcttaagtccatgagtttcaacttgatgtgttcattggtgaaggtttggaagaaataatacttctgttaggtttcccaaccatagctggttggaagttgagcacagatttttaacaattgatgcaatttgttttgcctaattctcacctaatccaagttcggtcaagcctacctatatatttttcatgttttgtctacttgaaattcttagatcacatatttaattctcaagcatcttgaagagattgaaattattaatctttaatttaaaatgttaatcttgtttaagtctttctagaaggactgcatacaatagataaatctactcaatctgaacttatcatatgctctttgtagtcatctgattatttataaaatgataggattattttaattaattttttttaaaaaattttaaacatttggatctaatgatcttttaatcgtgtaatttttgatgctttcttgttgccaagatgtatctttctgtagccttttcattgatatcattaaacttcattaaaggcttgtttttagaccatattctaacgttcttgtttttccatttctcagatttcggcagctaagaaataccactttctcgatca

SEQ ID NO: 8203 - DNA, 725 bp, Prunus persica
  Intron number 1 from transcript ppa010408m (locus ppa01040 8m.g) derived from phytozome v7.0 (chr-ID scaffold_3; pos 21147203 to 21147927)
gaagctgaagaagctaaggtttttacccaagtccctgccttttcaatcacgagtatatatattatcttgatttcgctctcttggtattcgttttgctactgggtcgatctgggttttgtatataatggatcatttgagctttaattttcgattagtgatcgttgcctatttctaagttgtgggtctagtgcaacttccctggtttcttttttgtttctttttatttttattttttgcaactacaaggacaagaacaagattctgtgtaatcttatgcttgaggttctgtggcaataaatacttctcatcaacagactaaaaaggacaagagttgaatttggtgtggccaaggttttggtatttttggtttttgttggttcccattgcaattccgagcaagtgctttgtgtgctttttgtacttcaagtcttcaatgaagtcagtgcgtagtagctttgtaactaactacaaaatcacaagtacacattgtaatagctgtattagtatatactaatcattggtacaaaccaccgctattcactccgtcatatgagtgtggtgagtgaaagtaccaagtaccaattttggaattgagatgattctaatttgaacgttagatggatcattctttacctgatgttgtgatattacatttacttttgccttttcgttttgtcggggtaagttcaggccaagctcacagcagcaaaagaaaagttcgggag

SEQ ID NO: 8204 - DNA, 699 bp, Prunus persica
  Intron number 8 from transcript ppa005433m (locus ppa00543 3m.g) derived from phytozome v7.0 (chr-ID scaffold_1; pos 34437219 to 34437917)
caaatattctcacaattgccttgaaaagatttcaggtatcagctatactcttcttgtacatgtttcttggttaattgattgaactcatgttacaattaaagtagatctttctcaaataacttggaataaattaaaaacctgtatcatgaatgattctatccaccataatgaaagcattttatttacacgcttttagatttcagttggaaatacaatgtgttaataccattggatttgggtccagagccatgagttcttttgtggcccctaccaagtcttacttagtagtactttaaagaataaatcaatagtcaacagcattttttgtttgattctatactttatagatgaacttgggatttgtagttgctggttagatggtcaatttaggtttataataaccttttctgtcagatgggaatgtttgttgcgcaaactgtgtagcaactccttgtgttatttaaagattcgtatttattctggagactttaccttccataactgtgaacacatcatcttgagttggtgctctaagtgtttcaatgaccttggttgatgcttttaggcttatttatacgatttataaaatttgttgatcgaattcttgagtgattgattgatactctgttgattcctgaaattgttatgttgacaaacatttcagagtgggcggtttgggaaaattaacaagagagtaac

SEQ ID NO: 8205 - DNA, 3091 bp, Prunus persica
  Intron number 3 from transcript ppa013023m (locus ppa01302 3m.g) derived from phytozome v7.0 (chr-ID scaffold_5; pos 1002188 to 1005278 reverse strand)
tctgtgtgattgacgcctcaaggtactctttctatatttctgttcaaaattcgatatgctaaaccaagcaccctctcaagcatgtatgcatgtgtttgcattatgtttttatgttgtttgtcagtgtgcatgtattcatatgtgcaaattcaattcttacatatgatataagtattcagttttccataaatctaggatctgaaatcaaggtattcttcttaactgaatgttttcatcattgaaagtctgatgtttctgtttaagtttattatgcacaaggattcacttaatggttagtttggataaaataggaatatgtaagtgaaggttgaagcgatagattggatttgctaattgagcatctattttgtatttctttagatcacatagaaatataaatttatatggtaacgggctagtaaaatctacttgataactctatcaactaattcactaccagtctacctccaatggctgaatatagttatacttgtctttccaagttgattgcagtcttgttctgttatctttttccctttgtattaagttgaacattttcattagagcaagtataaagttgtccagagcccccgatcaaccaaaacctccatgataacacaatctgcatagtttttgcctgatgaagtttctttctagtaatgcacagtattagtgtatactcaatatctacatatacaatgaaccccagttctttcaggagataacaagaacgtgctacatcaaagagacttggcttttgcttttgattgagtaacatgttcttttctacttctctgcatctcaaaatatttgatggcatgttgacacaaaagttctaggtagaagttttattatagttgcaagagcccagtgtgcaatcaatatgtgcctcaattctaggataactacaaattggaataactaacatgctactcgggcccctaaaaagatacttgaatattctagtaagtatcatcatgccggttcttgatattccaatctattttgcccttggagttttactgactgatcgcagtgtttagtgggttagagtcaggtgaaccagcttttctaacacgcataagtagttaatgctcacaattcttcccaagggtgagtgtcttggctgagatccttgatttgaggacgcagttttaaagttgcatatgtgcaaaattctctgagaatatttcctgtaggtaaatgtggtgccgagaataaatttaggaaggatctgatgtcttataccttgtctttggaaagttatggtgtatgatggtcattgccatctatctgctgcgtttacactgagtgccacttgatatttccttttcttttattagtctttcttttatctgtgtttctttatttttaaatgtcaattcttttatttaatttttcagatgtcttcttattttatctattttaaattgaatttatttttcttcagttaccccaaagcatgataaatgttgttggcatttttgctttgagtatgtagaagttctatatggactgtcaatgcggaagttagatacttttaccatttaccttttcactgattatcatcttcatcgtcactatattggagattttaaaaatgaggttacaaaaagacctgaactatctttagttttaatactgcttagtgaaaactaatgctttcatatctaatattaggaactaaagcaagttagagaaagataggcggattccttagatattcaatttctcatttctcttgatttcttgattatttttctttctagcattagaagacaaatggtgatggttaccctcatacaatcttggagtaataatcaaatatgttgtgagtgacaaaagtagcttaaatcagtaaaaaaagtagtacttaagaaaaagtttcgttttgcgtatcttctctggtcaggctagtgatcactgctggacttcattaccccaaacgtgttgagtgtgagtgcatgcgtgggtgtggttgtgtgtgctcatttttattaatcagttaacacaaaaacaggtgacaacagtatgagtatgctggtattcgattatattcttattcttgacttccaaattaggttggtaagttgtgttaaaatatgaaggggcttgttgaggagggtttgcttagtttacaatcaacccatagtagtattccatggaaaaatgagaggctccagcgtgaacccaattttttttcagggcagtgctagacttggggtcagttcaatctgtgtgtaatgtttgtataaaaaaacaaaaaaaaaacgggggtcatagaggaaattgagcaagccagtgtatgaatattttaatttgttttatgagtttcaaacttaaatgggtatagatgaaattgatcaggccaatgcatgcaacatagttggtaattatgtatctttttaatacaaggaagttgtaaaaaaaatgtaattattttatagagatttttagtatatcagtttgtgaatttcactgaaaaactctcgtatttttaatcatttcataaacagaatttacgctgccctattttgctttattttattttattattgaacttttctttagttgcactttacagcagcaggatcttttgctttatcaagaataaatgacaaaagtactccgaattgtttattcatctttggagatggcttagaaaccaatagttcatcatctttcattgaatcaaatttctgttctagttctccatctgagagctatcagaagattaaaacacataatataaggtaagaaacagaaaatgtaaaaggagggtttatacaactcatctgaaaattctattggacttcttgtcttcttgataattttaagtggaaagtaggcattatttgtacttttcccttctttatgatcatgatcttgataatcaatctttcaaatttagcatcttgaatattttataaactctgagttctatattttctcagtttactagtttatgaattaaattttgcataagcatatatgtttttgtgtatatggtctgcacatgcaacagtgtaaaaaattggtatcacatttcttggtaggtgtcaagttggcattcaagagcttccaaaggatt

SEQ ID NO: 8206 - DNA, 769 bp, Prunus persica
  Intron number 1 from transcript ppa004577m (locus ppa00457 7m.g) derived from phytozome v7.0 (chr-ID scaffold_2; pos 22057784 to 22058552 reverse strand)
ctctgtagctgttgcttcgaggccttcctttattggtaacctacgaatatctctttgattttatctttttcttttgggaattttttttcgtagggctagggtttttttgcttgattttatccctttggatatttatattccgatatacatttttggtacattttatgagattctagggttttctctggttgtgtgttgccttatttggttgctaagaaggtgtaggaaaagaaaaatattgaaaattggatcttggaaaagtaatgatttgggtactggggattttaaataaaaattaagctttgatgcagctgagatgtatggttttctgaaagtaattgtgtaggaataagagaaattataactaaaatcatgttttatttttcttttcctcccagttttgtcttaaaccaaacaaggcataggctgttctgaagttaattgcttgcatataattgtattgattctgaaagtgatagtcctgattgagttgcactgatctgatatggctttcaggttgtccttgtttttagaatgataattgcacttcaatgtgcttggattgattgaggggtctgtaaatatttggaagatttatttgtaggtgtgaatcataaggattctgtgcatttgtggaatttttgatggatctgcaatctttgttggctcatttcgatatgttgagatgtttgtgaggtgactctgtttggaaggtggggtttacaacttgtaacccagaagcaggagaaggaatagattgtggaaaatc

SEQ ID NO: 8207 - DNA, 1688 bp, Prunus persica
  Intron number 3 from transcript ppa009076m (locus ppa00907 6m.g) derived from phytozome v7.0 (chr-ID scaffold_2; pos 16583765 to 16585452 reverse strand)
gggccttaaattacaagtattttctacttttcttggtaagtttgtttcactgtgtaaggtgaaatacttttcacaggagattatgtatgaatgagttgacacggttctatctactgaggattccattttcattttcttctactatggttaacttgttttctccatacctggcctgtgaatactgatctgatgatttgaagacattcttccaaggactgtttcagttgattttaactttagtttctcagattttatgacatgattacgagtagtgataatcatgcaggtactgtaaagatacctgcatataggtcatgagcatttgaaagaaaggtatcttaattagaagttaggtattggggcaagttttcattgttcctaaagaaaaagcttaaatatgttacatttccatccttttttaacaatttttaagctcaacgctggtgtacattccctggaatgccaataggccgcagacacaggccacagacaatgatctagattgacttcgcctttatatctttgtcacatagtgtgaccacttagggtctcctgaatgtaccactcagcttatttttccatggtggtagtatcactttaacagaattgttccatagttctcgtagggtaaattgatgtttttccttctggtagataactgaacaataggtcatctcaccttctagatcatattcttcaaacggaactccataatttaactttggaataattgctgggtttcaaggagtataaccttgcagagattgtttcatcaattaggctcatggacggtatataatgtgattagtggattatatataaagcaaaaaccaagcttttgtaatgagtttttcctagcattagtaaaatggtcctggactgcatgttctaagctggatagttgcaaatttgaagaggtggagaacataattttttgttgtattggctgggacttgcaactcaattcacatttcattatgaacttggttacctctcacacaaacactataattcttctactttactatcttatgctatgtcagtatggcaattatattatttaaaaatctcaaaatatcagcttacgatttgatgcatggcaatgataaatactcaatatactgtaaatatgtaatttagtaaagcaggaacattgcagtatgtgtcgagcattatagtatgcttagtgctggatattcaggggagttgattgctgttaaatatctgtaagttaggtgcagtacacttgtttgaaagctttaggttggtagaaatcatgagttttaaggtaattcaagggactcttatggtgctgttaaagaatgcagtcactctttgtttcaatgagttatttttcctcagtctggtttgtactggcagtggttgcttgttatatactgatactaaagtggagttccatgtataatttcgaaaatctgcttttaatagtgtttgtggctgcatagttaatcaattggagatgaattgtattgtactgtcctgtcagactatgatggagaagttcttgtgtatgctctacttgatttgtattatcttgtaaaagtttctattcttggatgaagtcatgaatacatatcaaatgaactttatatatttatactgatttcattcttttgttaaatctcaatgcagttttacacatttctggagacaagtgttgtaacttt

SEQ ID NO: 8208 - DNA, 3193 bp, Prunus persica
  Intron number 2 from transcript ppa008162m (locus ppa00816 2m.g) derived from phytozome v7.0 (chr-ID scaffold_7; pos 494886 to 498078)
ctgttgagacagtggggaagccctttgatccattggtaagtcattcaacccttttggtcatgcataggtgaatacttattagcatagaaatggcgcccttcctgacatctagtgttagacattttcatttgtctgctcagtttataatgaggagttaattttagttacaagtaggtgtataagagaagacaacagaattatacgatcaataaccataaccccaaattttatcctattactggaggggtgcaccaattacaataaattcctcctgatcaatactgacataggatatgggttgtaaattttggtagtttagcggaaccaaaaacaatggaaaacagaaaatagaacgaacaaggataggtctggaatcactccggggatttggcttcacaccaaggagtctccaatctctggaaaatgaacttttcttaatatctcaacaactgaattttaaagaactacatggggggtatttatagcaaactaaaacgtagagacaataggataaaaatcccttaccaaaaaagaaatcctaatccaccaaggaactaattcaaataatctaggaaactaaaataaactcctactaaaatctggaaactaaaatcctagtgaaatctggaaaactagagaatctaagaaactaactaatgatgtccgcatcaattccccctggctgaaaagatgtcgactccggtgagataaagttgtaataacactccaaaatgtcgggatcaatgtgcggcatcctcctttgtaatccgagtactacgagaatctggtttaacttccacttgatcaagcgtaatgatatgtagagctttggctttacctactttgtcttcctcctctttgtttcgtatagattgattcacgagcttgggttgaagtggcttcatcgtgatcttctttcctttatggatgaacgaacatatattttcttgacccaagatggtaacattgtgatcgtagatgaagagaaaatgactcacatccatatccaccacatcacaccaaacatgatctttgttagatgaaaactgtataggaatgtgacaccgttggctaatagggatagaagatgtattggcaatccatgctactctgtatggcacaggatgcttctcgggcgacaaaccaagacgcgaaatagttagctttgataccacattgatacaactcccattatctatgataccttccaatctttatctccagacttgatgtaagtgtggaaaattgaagtcctaagccaatcctcagtttccttcctaggttgagccaaagtaaaccttactactgctaatgttcgatgagggacttcaaaatcgattccacaatcttcatcaggttgttggggttcataaatatcttcctcgaatttgccttgattgtcagttggttcgttaatgcgtgcacacagatttcttgttgcctccttcgttgggcattggacagcaaagtgtccaaaaggcatctgtaacatctttgcgttcaaccaccacgtgtatcaactagtactcctttttctttggtagtttttactaaattagtcgtagatgttggagtcgtcgaacttggagtcacagatgtgccaacatgaaaatcagatctttgagaatcaatttgctagactacattggacgactttaaatacttatctaattcttgtaccatctgaaaacccctctccaaagtattcacgttatgaggagttatttctctttgaagctctggacgaagacctgatctaaaccgagaaagttatcctttgatcttcccttatgtcacatcgcaacatgaattcctcaaatttaatccagcttgacccaccaattttatcttagcaaatctcacccttcgagcttcagacatatcatgccacacaaaatagtgatccgtgatagctaaccagtcaaggaatgctttaggatttagctcaccatcaaaattaggagtgtttcactgatctcatcaccttttcatcagggtcttgctcatggccatgatgaaaattttgcctttcgtcgtctcaattatcctcctatcgttatgtctctctgtgtctcggtcattcattctatcacaatgttgtcgatcacgattcctctcttcggcattcacacttgcttcgtcatgttgattagctgctcctatgtctgcgtcgatcaatggctccaaatcgtccttcaaagtctgtgaaacgacaataaaaaagttccaatctggtggactgctctttgatgacagtggtcagttctgccatcatatatttgtcatattttctgtcatctgagcaatccgttcaaggtccatcactggctggtctgtcttaccagtctttttagttggagccttaactcgacacacgacgtaaacgaagattttgaacccaaggaaagacgaaaacctggatctgatgccaaatttgatgtaggatatgggtgaattgtaaatttaggtagtttagcagaagcgaaaacaatggaaaacagaaaatagaacgaataaggataggtctgaaatcactccaggggtttggcttcacaccaaggagtctcctatctctggaaaataaacttgtcttaatgtctcaacaactgaattttaaagaactacatgggggtatttatggcaaactaaaacatagagacaataggataaaaatcccttactaaaacagaaatcctaatctaccaaggaactaattcaaataatctaggaaactacatcaaacacacagtctgtcttgatggccaataactacatgtgcagaattttgccattttgttagttgacaaatgactcctatcttatgatttgctttatgcaggtaagataccaagttggctcgaaattcaatcaattacttgatgaatattatcaagtacttagtcaattttgttcaggtttgatgaagacctggatacggttttaagtcagaccaaatcatgattgaatcgagccaatttggtgagttcatgatagtgaaaactacatgtcacctcttttgcaatagcaggatgaacacctaattatagcatttaggttattaaatggttaaatcttatgaaaagcttgtctgacatgacacttggtatgcactctttatatcttttaggacataaacaatttatgcaattcctaatactgaaacttgaatttgcaattttcttatacaagttgc

SEQ ID NO: 8209 - DNA, 1069 bp, Prunus persica
  Intron number 1 from transcript ppa010474m (locus ppa01047 4m.g) derived from phytozome v7.0 (chr-ID scaffold_4; pos 2137618 to 2138686)
caaatacactgtaagtgatcatctgctccatttgttgacgattttcttctggttttgattctatgcttgtgttttttttgggtgaaaaattgcttctttttttgtgatcacttttttgtttatttttgtgcttgaattttagtgttaaaggtttaactccactttcatttgtagttcatgttcaaaatgtgagatttttttccctttcagtttggttgttttgatttatttatatctcgggttgtcaatttagttttttttttccttttaaaaattcagtgaacagcctaaagatcaatcctacctctgttttggttgtgcgaatgatggaagaatcacacaaagttttgtttttgttttccttcaagtagtggcaggatcacaaagttttcatttttgcctttttttcctttctttttcgctcatctattggtttcttgtttctgggtctctttcatgaaaacaaaaataaaatatctcggcctcgcggtttctatgggttcaattatttttcactgacgatatgattctgggaatgcgattgtttttttaacattaaagcgttagttcaagtggatatttatttgtgccttatccttatctggatggattgtcagaggaggaagaaagcaaaccaaaattgtcagtgagtaaataagttcacgtggccactgggttccacctgcttgggctgtttatttatttattttttacaaataaacctgcttgtggccttgtagtgagtgtcccattcttttggatgcttcatattacaataccacagtttggtcctatgcagtttttctgtagtctcattcttttgcatacttcattgtagatgatttatgaaaaaaaatgcttaatcataactttaatagactgttgcaattatgctccatagatattttattgagagataggcagagagggagagagggagttgttgggttggtacattgtatgatttgctgatatatttggtggcttaatctgataattagtcttccgtttatattcaaatccttatctagatgtgtgagctgcagggcctcggattatccaagggagt

SEQ ID NO: 8210 - DNA, 990 bp, Prunus persica
  Intron number 18 from transcript ppa002133m (locus ppa0021 33m.g) derived from phytozome v7.0 (chr-ID scaffold_8; pos 4870342 to 4871331 reverse strand)
ttgtgagggatatacttcttcaagaatttgcgaaggtaaaatcattgtgcttatgcttgttattttagttataacccatattaggaatggtgatagtagaaaagtacaattttaattaaccaacataatagaaatgtaaactgcagtctgtattttttaatatctgaaacatattttgttttgtttggaaggttttacctttacattagagccgttaataattgaaccttgagtagtttctttgtgttggggtttctccccccactaattcattaaaaaaaaaaaaaaaacagaattgaaccttgatggataaaatgtattaaataatagaattactagtttccccgtaaatatatttttctgatgagaaaaaaaaaaatcttaagacaataagagatggaattgttaattatttacatggagcgaagtttgttctacagaagattattgtttatccgggactatcaaatttcaacttataaattaatacagtgttcaatttaatatgcctttacagtgtggcataaaaccacttagaatgttaggggtaaaatgagtcttcaatgatatatttacgcatggacttcatagaatagatctctattgttacacagttataacccaacatctggattgtgaattaaaaatgtgtatcatatgttccctgtcaaggtccactggatttcaaaatttgaaaatggctgaatgattgcagtctacacaaactaagacgtttctgttgcccatcctatgacacatgtttaattcccctgaaacaattaaatgattggccttgatgaaagaggtaaactattttatcattgtaatccctgagtttcgcatatggcatctgagatatggttgaatttgtcaaaatgtcttgggcatgcggttattgtagttattattgtacttattattcttgctcttgttattattgtttttggtatttcttttctatttgattcctcaattgaactcagggattgg

SEQ ID NO: 8211 - DNA, 2156 bp, Prunus persica
  Intron number 1 from transcript ppa004165m (locus ppa00416 5m.g) derived from phytozome v7.0 (chr-ID scaffold_1; pos 20193181 to 20195336)
aggtacgtgcattgttctttggctgcatgtttaatcattttagtttattgtttttttcctgtaaatgaaaattctaatgttataccctggttgttccctatttagtttatattaagctgtgatttctatttataccttgctatgtatgcatgagaaacctatttcagtgaagctttggcactctttctattctgtgcaagtgtagcagatatacagcattacttgctttgtttcgattcttttagtagcaggataggaggatctatttgtattaatttggtctgagagttaagagggcacaagtaactgtgcttacactcaaacgaacagaagcatatctactttcattaaggattgatatctatgttgatgtacatcatcggaataaagatggaggcatttctaattattaaagttattgtttctcttctacttttgtaggattgttatcgctatctccatgcctaattaaattgattggtgtcacattgttgtagggaattgctttgtacagcagatggttattttattacaatataatgacagagttcttatgtgcaagatggcagagctagaagctaatgcttttgttgtgttttttttttggggggggtgtcggggtgggtggtgtttggggttttatatataagagagggagaggcgtagtggccttaaacagaaatctcttggaggagaaaatgacatttttctgtttccaattacttgggtgtagttttatggtttgatttttttgtcgtctagatatttatgttaagtttagacttaatcagacaaatctaaacatgcaacttttagcaataaataaggttaattattttggataatttttggaaagtaaatataaagagtcggtgtgatggaaaaccatcttgatttagtatgtttggttaacttttggaacaatctaaacttgaaacttttaccattaaaaacttgttatttcatcccttttaagtaacacttgcctcagtatcaaacaaaaaatctcgtttgagaacgcatgattattgtatcgatggccatactgagcagaatttgtactgtcaaacatacactaggtcctttggctgtgaattctttctttttctttttatttgttagttttgctcatgtatagttaacattcaaatatttaattattgttttttttttcttgggttgaagattattgtttgtaaatgtaaagaaagccaacaaggtactgttggacagtagaaaatttgttagtttcagatcagaatatatatctaatacttatacttttctggggtaccacattagaccaggaaactcttcagtttatgtacactgaaaattgatttgtgtatttctattggtgtccttatcatgaatagttttgtctttcttgtggtcagtaaaatgattcagatcatgtctggtctaaggtttcatttaccatttcataagaatgcaagaacagtgggtgaaggattttacagtcactctttcagaaatattcttcccaagtgagatatatgctctgtatgctactgtggaaagaaaaatttactaaaaaaatgtgaaaatatccaaacgtacaaacattatatacatatatattccccttctattgagggatccttcaaataattttatttgagggacaccctttagggtatcccacgaattgtttttcaacgatccaaaccatctattttttaggtcttcattcatagatcatccttgcaaaaaattagacaaatcggaaactgtttcgatatccaattgtgtcctacaaaatcaatgaacacgatgcttcaacaaagtactaaaatttcaataattcaattgagtggtcaaatgatatcggatttaagtgattttttgtagagatgatctttgaatgagtatctacaaaatagacggtttgaattagtgaaatacaatacggagtgggccctacaatggtgtcactcgaataagcttatttgagggatccctcaactaaaactccctgtatatatgtatataatttaaacagagtttatgattcttgtttgacatctttttttctggatgtgctcagaaatagtatttgagttcacttatatattccaactgcctttgtttctaattcaggaagaagaaattgacaaatcactggagggacttta

SEQ ID NO: 8212 - DNA, 1670 bp, Prunus persica
  Intron number 1 from transcript ppa1027127m (locus ppa1027 127m.g) derived from phytozome v7.0 (chr-ID scaffold_4; po s 23285429 to 23287098 reverse strand)
aaggtttgttttcttttttattttttcttctaaatttcctatatgattaatagaggatggaaatgttaaattaatcagttgttagttttctattgtttggagaaggatgtgagggtttctttcatagtttcgttgtgtgtttgtgattaatcaagtctactatctattatctcgggcgagtggagatattcttcttggaatctagtgtttttgataaatttgaatgattgggaatctagctagttgatacctttttcattcttgtagttgatcctgttctgtgcaagggggacaatacggttgatgggtcattgcgttcttattatgatgatttgttaggttttaggaatgctttctttcctttgaaagagatttggaagacttggtttacctgtgaaagtggtaatatttttatgggcagctgctcagagtaaaatatttttatttcattattctttcaaatttagtcaattggatttcatttaatatcatcttccttgagtttctatacaaaaaataaaaatcatcttctttgacttaagtgacccgagtttctgtcttattactacaatctagctgctattatgaagtcttttttagttgttactttcccctcagtatctcaggaagaaagtttctgttcttatttttacacaagagaagtaaagtcctttaaggtctttttttagattggtttggactctactattatatgagtgtatcttcttccatctttttaaggcgtcccccttcctaaaattgtttttctttttatcccaaagttggagtcacaattttcgtctttgtgaaccttggcaccataaaagcatattagttaaattggatgtgtgaatctggagccatcctttcatgtcaagtgcacttataatcgtgtacatgtgacctggatgtttgtgatctatactttgttgttataatttccatttgaatgctgacaaagacacataaatcttagaaaacagaggaaagaatggaagaagaaagcagtaaaagttgatgaagaaggaaggttctagtctgtagagggatatctttatacctgaaacctgaaatagaaaccttagaaatggttgaaccaccttcattgccagactttctatgacctttataatcaccatactttttgttgttgtttttaaaaattatttcttgttgccattagtttgttttcacaagaaaattaagaaaatggtaaatattctgaaggtaggaacttacagtcggttgtgacatggggcaagatctataagtcacatcgttaatgtaaattaatcagcaattaaactctttttgggtgtggtgggtcatctttgggaacctatcatgagatttgtgggcactatctaatagtaagaagtatgaaaagataaattatttgtacatatgtttgaaccacagttggtcatatttctctttattgagatatcaaagaagttatccaagggttttgccgagcctactcatatggtttggtcacagggattgaggacatcccatggccacccgcaccttgccactagtagcatcccttagctttaatccaatattggaccttggacatataatagttctgagtacgatctctttagattaaaatttcattgaatgagcttgcttgcttttactaacacattatgtttttcagatat

SEQ ID NO: 8213 - DNA, 2616 bp, Prunus persica
  Intron number 1 from transcript ppa026748m (locus ppa02674 8m.g) derived from phytozome v7.0 (chr-ID scaffold_6; pos 10412619 to 10415234 reverse strand)
ttgcctcttaaaatactcaaatcaatatttattaggtttgagtgacacaatttgacaggacccaatccaaattccgctttggaatcccagccagaccctgtacgtgttcgacacctggcgaatgtctggcacaaatgacctatttgcccttctacacaaaacatgataaaataataaggttaacgtctaccgaaaaatcagcagagtttcccttgtaactggctcaatattaaaacattttcacctgccaaacaagtatatatatatacaactaactgccagcatatgtatatatacattccaacagttcaattctcagtctagggcaaaacatcagagcaactactaagaatttacaaagaatcaatccttttacaaaacaaaaatcctacatcaaaagaaaggcgcggaaaatgggaaatggcccggtgctggattcctgtgcacgtctactgcctgggggtgcaaaacatgaaaaagggtgagtggacccaaaaacaaagtttagaaaaatagcatatgaacatacaaacctcactgtaaaaaatacagttatacaaactagcttattttctttatttctgaaatcaatgcatgtatataattatacatttgaaaacagtttaaaactatcacctaggtgtacccttatttccgtcaattccttgcatcaccatgggtgacacatactcgcaggtctcagtgacacgaggtcaatccgagttgcaactcgcaggattcaggggaccgtagtccacctttatccgcattactcgctccacacgagttcgagtaccaaggaactcgtggggcaactgtcaagcatgctgactaaaccgaaggcaacaaatagaatccgaaggcaacatttaatatctgggtacaaggtggtttaagaaaaaatataaagtttctgaagaaaatctgttgaataattaactttctgtaacctttaaaattctgctgccatttatttgataattaacgagcatatcttttcttatattctttaaaggagatttcattcggcagcatgcaacataaaatatttcacagaataaaacagcatataactgaaactgaactgcttaaattcattgataaaaacaaagagtccactcactgatagtccgagctcgctggacctcttgaaggtccctcctacgggtcaactggtgtccgggtgcctgattcaatgaccataatattctattaatataatatagtattaaattaaaaaccctacccccgactcctaaaagtacgtgcgtcaatttaaatttatccctatgcccataaaagctttccttccatgtgggatagtttagcggtatcttgggactcaaaaagcgctaaagtccaaaaagtcaatccgggaccccatgggtttttgacctcacaatattatccggaagccgctagaaggtccaatatatctaggacacatgtcccgagggtattggtgtcgatcggacggtcggattgatcacaatcgtgtaatcgcataattcataaaccctagccctaggggttcgcgatttcggagtatccggggctccgattcatgatccgtcgaatcctgcacatttctaacattatctagagtcacatatctaaaattgattacaatccaacggctcaacagtattgaacccgaaaatcgcacaacatggaaaatcgtttcgaggctcaaacggtatccaaattgagatccgcgaattcctacgctcttgtgacaacctaaggatcgcatcaatacacagtgccactgcactatcctcgcccatgcgccgccacacgcgccggcagcgctgggtgtccaaagcgattacgcattgccggaaaatctcaaaaccacggctccaaactcctaccctaggtataaaaccatatttggaaccacttttgttttggacctaccccaaaaactgaccggaagtggccgaacacggaggccgaaaacaggtagaattccaaattgaaaactgagctagttacggtcagaatcaatggaaacctacccaaccatcagctagagcatggaaaataagtagaaatccataccttactcgacaaatttggagaagaattgagggagaacgaacggttgcaaaactatgcaaaacctgctcgtttttggacggaattcggcgaaaacagcgacggctggcagcggagagtggtcgggacttgaagacagaaccgagctggtcctgttggcaccaacggcagggacaaaggtggtcggtggcggaagttttggtgatcagaaggtgacgggaaggaggacagcgggagagggagagagagagagaggaaaactgagggagaagagagagagagtgagggttttaatctgatttttcctaattaccattttgcccctcgtaatattttaatcgtattttcttcgttaaaactccgattcgatcccacttcgtgtctatgaactcatttcgtcgtactctacgcaacggtgtatgtgaaattgtcaaattccttttcggtcaaaaagtcaacttttctttaagaaatgattccaagggcaaaattgtcttttctcataataaattactaattaaataagaattttaggtttgggtcattacacaatta

SEQ ID NO: 8214 - DNA, 574 bp, Prunus persica
  Intron number 1 from transcript ppb018589m (locus ppb01858 9m.g) derived from phytozome v7.0 (chr-ID scaffold_1; pos 22115212 to 22115785)
tctgacagtgctctgacaaggaaaaaagacaaaaagttttccctgggagattgaaatttttaatcgggtttggaaacagcgcatgtgtaagtcaggtagacgaaaagttgcttatatataaaaccatttcaaaaaaataatacggcggttacatataactacgacgtataaattacaaaatacgacggtacatttaacttcggatgtggtaaataaatatgacagtagagttgtaggtaccatcgtagtaaactcaaaaattaaagtacataagtaataactcgcgtcatggtagattatttaacacgtcgtttttattaatgtaccgacgtggatttctgtaatatacgtcggtcatattgacgttgattttacaatttaaacggcggtttttttgtaaggaccgccgttggttttaaaaatttattctataaatttgtcgctttcattcattttcggtttacatttagggttccaagttcttcctctctcagagacactgtctctcacatctcaaagacaataatttggatgtctttctcaaagagaaattgagcttactcgcatcaaatct

SEQ ID NO: 8215 - DNA, 1073 bp, Prunus persica
  Intron number 1 from transcript ppa020008m (locus ppa02000 8m.g) derived from phytozome v7.0 (chr-ID scaffold_5; pos 5034348 to 5035420)
gcagtttattctggtgaaaattcagtggagaggtaccctgtgtgcacgctttgtgctctctttgatttttcttgcaaacattgactgaaattttgatctgggtagttcttatatttcacaatttgtttcctgttgaatggcattctcacaaattggagaagatgatttataggagtttatgttgcaatgacagtgtcaaacttttgttatatcatgtcgggttgtattttcatttttgttgaggtttgttgttgtgaaatgtgaattgtaaaggatttattttttttgtgtcaagtttccttttcattgtttaaatttgaagtggaatgttgaaccaatttatattctctcatgcatgaggaattaactatgtggtctgattgccatgtgcatccatgtttatgtatgtatatgtctgtatattcagcttagtttgacttgcatgtcattgttctctcctctaatattttagtttgcacagattgtgtatgttgattgttcttactttttagattgctaattcccgtcttttctaccagtgcttttgcttctctgccatcatttagctttcaccatttggggttctttcttccccatttgatcatttagctttcatcattatcaactttgcagtcaatactgaatcaataagtcagatagcccagttaattttgttggaaaagaaaataaaatgttaaaggactataccttacctgatccaaacataatgttgtcaattttgttttttttttaaatattttaaatctatgtactttacaccagtaggcagagagagtagaagcttttatattcacagaaagatggcaatgtggactaatttaattttacaatgcactgctacgcggaagaaatgattctgcgtgatcttttattttgtacgagtataagatttttggtgtgtaacttcttgttcattcgttctatactgcatgaaacaaaaacctttgtctttgacttgtaatcttttggttctgacaccttattggcttttcttttgtggtgtgtgtgtggaaccagcaaaagttcactctctggaattgctccacttgaag

SEQ ID NO: 8216 - DNA, 1120 bp, Prunus persica
  Intron number 1 from transcript ppa024272m (locus ppa02427 2m.g) derived from phytozome v7.0 (chr-ID scaffold_1; pos 32624322 to 32625441)
cttttgctaagctggcggtgagtttttgctcctcatcatcgtatttttttcgatttcaattttcgtttcggaattaatttcgtgttaggtattgattttttcaagtacgatcaccgcaatccatcatcatcgtcattatcttcttcttcttcttcttctatttcgttataaaacattcagtttctgattgataggatttcaaaagtttagaggctttacctgctttaatgatttctttacttctctgttgttgataattagttgtggattttattggcaggtggctttgatgtttccttataatttattgagtcgtatgtttggcattaacttcgcatcctgcttatagtggtcaattcgtgatttctttgcaataatttctcttaacaaatggtcatactatcttcccacattaactgcacaatctgcgtctttattacaatttacacgggtttttaaaatttaaatttttctttagtaataattttccgtacacgctcatggatgatacaaactaaagaatttcacaacttattcagaagaaaaagaagaaatgacagagaataaaaatcagttgtagtccaagagaattacattttagagttatgcaaagttggcattgtttctctttaatttattgtcttactaattcgctattagttaaattattcaagactaccaacaatgatggcagaagtcaggttgttttacaattgggatcatcagagttgattacacttgctggtgtgtctgaatgcggttttattagttttatgctgttgtaaatgtgtttcatcagcacaatttgaattgtgccacatgattttttttttcctctcctttttttttttaatataaaaattacggtacccaggaatggtgtaattcctagaaattaattacactacagattttagcatgcttgatatgttttctttttgcacatctctcatatttattataagcaataattgctgcagttgagaccaaagaaggaaatagatgatgtggctcagattggtgggcatgaagctgctgctggaccgagcaaggcacttcaggatccgtcgttatctgtaccacagtcctgcacgggtagaaaacataaccctaagtcaaa

SEQ ID NO: 8217 - DNA, 2511 bp, Prunus persica
  Intron number 2 from transcript ppa007078m (locus ppa00707 8m.g) derived from phytozome v7.0 (chr-ID scaffold_2; pos 1639543 to 1642053 reverse strand)
ccaaaacaagtggaagtgaaggcttaactatttgggtattttatgctaaaccttactagtcttacttaaatggagctccttctgaacatatatgactttttactttttattttctaaactattattcagctggctccggaagtgtaaatatttaatcatcaatagtcaagctggaaattggatcaatactaacattttggtattctttaatttgtgtttctgtagctgtttttgtttttcaacgtgaaacattagtgctttcactaagattggaaaatgttttttgcaagcaggggatatatgtatacaagttttgttttgtcatgttatacgtgtttcgactgtttattaaactctttagtgtgtttctacttttattgatgcattgttgatcactcatatcctgaatcattagaagtagctaccattagaagtagtacgataagaattcggatcgctatttattttggattataaattggtaatgaccaactatcaagagtaattctcattttttttttaaaagaactatcaatgtattgttgttttgttcccgacaaggaagattttacttgaatgctcttactcttttcagttgattttgtccacaattgtgttctgatcattgatgctggtaaaagtgagggatgtgattatggtctgatgaccacgagtagaatacacaatgacttatgagtgtgacgccaagtaggcatatataaaggtttgggcatcaagaatttggaatcttaagaaagacccataattttctgctttgaaagtgtttcgccattacaattgtaatgatatgtggatcgattgttggacaagtaatatattctctggatttttcccaatagtttgaaggaataactttggtggcatatgtattaaaaataatggatctagacacaattttgtgtttgattttaattttataggcagtttccagagacatggtcttgaaatagctggaatttttaagagtttgccttattgcagcttttgcttttcttgaatcagaatctggaaattgcaatggagaacatcatttctctgcgattcattttaaaaatgatctgtattgaaagttggattcaggagaactgattttctaacaatgcaagtacggggatttgggtttctatgcagttcttccagctatcaatatcactcttagcctcctttgtttcaaaaactgcctcaagctcaagctcgccagcactcctgctcaccaggtattagaaaataaaaagaaaagagtatagaactaatgagggccatagtacattgagttgagtttatgccaattcatgctatgcccttttaaattgaaatttgaacccaaatagtcctcactttagtcaaatacattaattcttccctgcagtcaaatacattaattcttccctgcagtcaaatctctgtttccttcattttcctgcagtagtactttttatttcaatttgggtgacttttaaatattttaatcattcaaagctttcaatattgttattgacttgttttgttgcatagtttggaatatcctgagagtagggtcctctgtgagcaccaaatctataaaagtatcctatagttcagctacttgaactgcacagatgctaaagtcgaaagtgaaaaataggccgacaaagagatctgaaattagagtgaaggacggataaatagtgccaactaagcataacatctgaaagtaaatactaattttttcattcttttcaaaacagatttcctgtctgttacatggtacaatataacttaaataactgctgttccatatccttaagttttataaattattcgataattgttatggagggggttatataatttgagttttggtacgatggagctcaacattgagctcaagaattcctctgatagttattgtaacctaacataggtatggttgaaattacagttcctttggaaaaagcctgcctttgatttggtttagttacaaatttacaatgcttttttatgaatttactcaaataggtggatcaataggagaccataatttctcgtctcaacatatgctttcttttggccttctctgttggatcaatgttgtccatcctggaggctttagttataagtgctgggagaagttcaaatacatggtcggaacttccttgctaatggatagaaggggctaagtaaatactgttgagatgactaccggaacttgcttttttctctgttatagttgaaatgcattctctgcttttaatatcaattaataatgtcagattgtcaactttgtagattgttttttgttagtaaattttttgtcttaagttgactgaacctttaccatttgtatcgcagcatgactgttactagattcatactccagtcatctccttgttcgacatgcattttgctgacagtcgtctgcatgtccatacacccacttgtctcttttattttccttctatattgtaggagccatcataaccatttcccattttccactttcttgatcag

SEQ ID NO: 8218 - DNA, 980 bp, Prunus persica
  Intron number 2 from transcript ppa012439m (locus ppa01164 8m.g) derived from phytozome v7.0 (chr-ID scaffold_4; pos 235043 to 236022 reverse strand)
ttgttgtcaaattgggaaatcaggtgaacttggtgtcctttttttataactgtttttataaaaatttcatggatatgcttttgataccacacgcatgtgtgcacagacacttatcttgttctgcacgcacacacacagctatctggcacttcactcttagctgaagtggattgcttcttcaggggattttgtagctgtcctcgtaagcttcctttctaagtccatgtgtttatattctaggaaggatgagtgataattccctcttatcccacattgaatcggatttcgtacaaaagatgttaaatgaaaggaaagttatgcaatctctcttcaacgcttattgaagctaaatcaaaagattctattgggacgataacgaaacgggcaccctagcttttttagtgtttattccttttaactggaaaggagttattctttgttagagaatcctcctaatacaccttatgtacagctgtagtcaactatgaccgcattggaaagttagaaaaccttcacattctcacattcttaatgagaacctttcatatctaactcactctttactttgccagaataatctatgacttgatgtgtgattccttcagctagtttatcacgagaccaaattactcaattgatggtactaaggagtttatacttcagagataagcacattttttacatacatacatgcaggttggatgtctatatatctgctaagaatgtagttgttctcaattgcacacacttcagggtatgcacaattggaatatcctttgtctgtacttcaaatttcatgtatcaggcataggtatatattaatatcattgagcgtttcttttaggcagctctaaaactgtttggagtatcacacattgtatgtgaatgaaattgtttttactacaatggtagtttgaagtgactcattagtataatctgtaccaggtggcgaaaaccaaggttatcaacagttgccttaa

SEQ ID NO: 8219 - DNA, 592 bp, Prunus persica
  Intron number 3 from transcript ppa008478m (locus ppa00847 8m.g) derived from phytozome v7.0 (chr-ID scaffold_8; pos 294486 to 295077 reverse strand)
acaggtacgttggttcacataatgttcataattttaccccttatctagtgattgtcatcttacactattcgactaccttattattaacaattactttcaaataacttttcttttatgaacaacaagaaatctacgatgaactttctgttatcattttattatgtaataacacactagatgaccgtcctagagtccaaaccacacagattattaatccatgtgatttcatgaacataagaaaaaatgaaattgagaagtttatgcaccttagtcatgaagtttcaaggttaaaatgcacacagtttttgcaccttagtaatcaaatgctcgtcattgatcatccagatgtttaaagtgtagttgtaactaagcaaaccaaagaaatgaagtttgtgtttgaatgttcacagccaactcgaattctgaggatttaggtattttggatctctgacatgacatcaaaatactttgtcaactaaaagtttgatcacattattttaggttctgttggagtatcattcgttagaattgtatttgtagatttgattctcaaattacacaggcagggatttgcagcggttaactggaaaca

SEQ ID NO: 8220 - DNA, 2318 bp, Prunus persica
  Intron number 1 from transcript ppa005316m (locus ppa00531 6m.g) derived from phytozome v7.0 (chr-ID scaffold_9; pos 906300 to 908617 reverse strand)
tccgcaaatatcgccgctacagccacgctcttcaggtaaaagaagaaacaagaatctttttttttttttactttatacaattttcttgtatgatttgttttatagaaaatatagtcaatgtgaaatggagtcaattgtagcataataaagttcatcacaaaatccgatgatattagacttgaaagaaaaaaattcacacggaagagattatggtggaaaatcattagccccaatttatgaaaatttagaagtataagctaacttttacatatacagtgcaggttgatgacatgaaaattaatttctataagaactgcatatgctaggagggttatgcagctaaaggtgctaatcattttgggaattttttaaaatcattttaagcaatagattatattctttccatggagaagtgaattgaatgaatgcagtttacatatttaaaatatgagcttcatgaaaacaacactttgtttccgcatcaaataaaatgactgcggtttagctagaggttgaattttcatatctatgcttgttctggtacgtatggttggggaaaatggatgaatatttattgggtgggttactcatttcacgaccttataagctctacatagatgcataacttatttcatgggaataagaccaagtctgttactcttctccgttgggacttagaaactttaaatggtttacactgctagattttttgttcttttctcatctctagggtgattgtcattaatatgtttttcaggtgctcatggattgtgtctcatagatgctttcttattgtgttatttacttatcaaataatatgcttaaaaacactctgtttttctttctatgattttcaactaccatcactcttttcttagactgctttagctagtagaacccacatgtttcagccaggggcggccctggggtggtgcaagtggcgccaccgcacagggcccccgattcttaagggcccccgaaaaaaaaaaaatatttatattatatatatattaatattatatgaatggtatatatagtatagcgtctggatatttgcacaacagcgtgttcaggggagttggatggagcgcatctctctttggcaaaagggcccgagttcgatgctccttgatgtcgttctactgcctagcctttaacaaacaggcaacatggaagcttaacttaaccacaccaaaggaggaatatatatgatatatcccccttcttaaaaataaaataaaaaaaggttttctctttcaagaaaagtactttcttcattcaaaacaccacgaaaaaagcttcatggcttcttctttctcttaaactctgattttctagtaagtaataatcattgttcatcaatttctctttggttcttttttcaatcctttgacaatttttgttattctttcaattttaggaatttgaacaccaaaaagagaaaaccctaattcctgaattcatagaccactcaaaatcgaatagtcatattcaaatctcaattcaaatttaggtatgtatctaaattccaatctattctatatattacatgacttattttattaaattattatcatgttgatgattggttgtatgagaatatagtttgtagaaatatttatctatttcttgttggggttttctttcaggttatagggttttagaatttttctttgtaatctaaacatgccacctactagaaaatacgtttctggatatacaaaacggcttagaaaaagaaaaatcaaggaattgactcaatctcaaagaggagctcttgatagattcattgttagagaatcacatgctacaattgatgaaaatatttaaatttttatgaatttgatttctgattatcattgcatatttattgatggtgaattttagttataaattttttttttatgacattaagttatggcaaatttttatagtattttcgtattagattatgcgaggccccaatttaagtttcgcacagggccctcaaaatctcaaggacggccctggtttcagcctgtaaagttccacaaaccaccattgagaacgtaataatgtataatacagattcataatagagttggtttattttatggatgctagtcactacttgtgtgttgatgaccatggtaaaagattcaggttatgtgctttggaattcttaagaaatgtttcgtaaagtgatcattaactcaagccattgctggttgatagtttatgttctgcatgttatttattaagactctgaaatcgtgaccgaaaaaccataaaagtgaaaattggaagaccctgaacggtgttatttttcagatttcaga

SEQ ID NO: 8221 - DNA, 425 bp, Prunus persica
  Intron number 12 from transcript ppa001834m (locus ppa0018 34m.g) derived from phytozome v7.0 (chr-ID scaffold_4; pos 3352392 to 3352816)
ccagacactataaacttagagcgtttgagattcctgtaagtataaccttgtgattcatttaattatggcgcattcagatttgaagtatggtaatttacttatccctttaattataaactacaaaggtccattgcttgtgattcttcttccctaaaagtttctgggaaatgctggacatattactggataaagaagggactaaatttctgtgacacaaacatgggcacgtgaatgcctatataatttaagattttttaattatattgggatcgaaatgcaagcttatatctttaggttggtgtgtgcttaattcccctcccctttttatttaataatctagtattgaatattgatgtagcattctgaaaaatcttatatttctttctataggattttaactggaaactctctgagtggaagtgtac

SEQ ID NO: 8222 - DNA, 1217 bp, Prunus persica
  Intron number 2 from transcript ppa007433m (locus ppa00743 3m.g) derived from phytozome v7.0 (chr-ID scaffold_3; pos 2246938 to 2248154 reverse strand)
atctcaagcgtattcggttcaggtactttctcttgtttggagttgatatgatggtgaagattctgattttggtggagtgtgaatgtgaatgtgtgaccacatgcttttgctatggtgctgccgtttgaaccactgtatctttttgtccattgtgttttgatctttttctgtttgttcttgatctggaagtatagcttctgattctttgaatgtgactacttgtttttagtatgggaatgttgattggggttggtctatcgtcacattgtccattgtagttggacttttaacaacataatgagagtgtgggattgtagcaggtaagttgcatgtgaactgtcatttctcactcatttgtgtggtaggtggccctagattaagaaccagctgatactcttcaacggtttgagctgtcaaagagttttattttgtttttaggatcttaacattctaccatattcccaagacctgacgtcctcatcatcagcccaccctattgacacttatctggtggtactctctcctttcatgggtagctttactcatggtgtattcaatgacttaacatcacgccaaacataataccagtgtatattaatccattctatgagatcgttccgtgctaacccgagtgttggatgtggtgtgtgtcaaagagagaaagacttcattgatgagactttagaattgtaacacactttgtatgggtcttaaatatgggggaggcctacatgtctatagcgttgtttaatttccattaagttttgctagtgattacaaagtggttaaaagcaactcatatgaatatctcgcctttataaagaaatagacgtacagtagctccacattatgtgaacttatgtcctgtacagatatactattaactatttgttaggggacaaacattatgtgaacttatgtcctgtacagatatactattaactatttgttaggtgacaagtaagagttccaaatcagcaaaagaatagtcccagtcttgaatcaatgtcctctaattatatgttgacatcttgatcagtcttgttccgcggtcataatcagcaggatttggtgcttatcccaaagttctgtttgcttgagtgaactcttattcaccctgtgatatatgccctacttgtttatcttgttcttgttgatcatgttgtgaatttactaaatctactaatcactgtcttgtaaatttgatcagtcgtgaa

SEQ ID NO: 8223 - DNA, 790 bp, Prunus persica
  Intron number 17 from transcript ppa002685m (locus ppa0026 85m.g) derived from phytozome v7.0 (chr-ID scaffold_4; pos 8735873 to 8736662)
ggaagcgacagttctttcactcacatagagcccaggtgacaattacttatgttatgaatgattttgtgttatcaccgaacaccaattatgtttttttttgttttgtttttgttttggagtgaactttcaatatcatttatagtgcagtttccatttttggaagcttttgttgagactattatggtgtgaccagccataaaattatttgtttccttagcacttgaacttgtatatcattgtaatcagatatctgtaactgttatggtatgaccatatactttttgtaaatagatcacttataactcataaaagatacagacctccaggtcatgcttttttttaggaggaaaaaaatgcttagtatgatactgggataaaaatgcttagtataatgtcgcgtaagtataaagccgtaacattctgtggaagagaaaatggaacagctgttcagatggttacatcttgtagttcgattttccatgtttggtatataccaaacattagactacgttttacaatctttgaagtcaagtacattgactaatctcttgcttgaataattagcaaaccttgttgtgaaactctagtcttaatggttatgagaaatagtggttggtggattgactatgctagctacagctcttcagctgccccaaaggaatctctctttaaaattttaaaaaattaacagtagattctttttggcccatatttttaaatgacaatattttcttagaatatatgcagcactgtattttaatttttttttattttgttatgcttgaagcca

SEQ ID NO: 8224 - DNA, 563 bp, Prunus persica
  Intron number 5 from transcript ppa018735m (locus ppa01873 5m.g) derived from phytozome v7.0 (chr-ID scaffold_7; pos 3952543 to 3953105)
gtggcagggattaagtggcaacaatctcacacaaggtaaatttgagagccttatctctctgatgtttcaaaagttgctcatcattatttaaaaaataattaagttcaattaatacggcgctaaccacttgtttgaactcactagacaatgtcatctcatgaccaggactgtttagtttttaggtcaacatgcaaggactgccctcaaaaaattaggcaattggaaatcggttaatcatttgatgattattgtgaatattttcattggttaaggacaaatttgccttgatcatgaggtgacattgttgagtggtcccaaacaataataacttaaaatcacttaaagtgatggagaagcacctctcacgtaagtgattctggcatatccataatcactcccaaatgagtcctaatgcttcaacttgctctaacaaaacctattttaaaagacaaagaatcgcggacatgtttccttacaaggcatgcgaactactaaaaatcttatatgaaacttatttttcctagacaggtaccactattctcactgccattaaaaacacagtg

SEQ ID NO: 8225 - DNA, 1152 bp, Prunus persica
  Intron number 4 from transcript ppa000429m (locus ppa00042 9m.g) derived from phytozome v7.0 (chr-ID scaffold_1; pos 13777913 to 13779064 reverse strand)
aaagaatttcctgtaggaaagatacttcaccccaggtggtctttcgtcatgtttgacatggatttggaccaaccattgattttggtggttttttttaaaaattttttagtaatgacaattgtgaaatgagttatatatgtttttttgttgaaatagacttctatgtaaaagataatctcatcagggctatgccaaatggaccctaacttgaatagtggataagattagttcttattcatgacgttgggagcctttcacttccagaatttaatttctaggaaatttcccaaacaatttaactctatcatgttagttcctttggtagcttagtgaatctttgttttatatgtctgattctgggaaccagaaaaacagttaagttttgtgtagagagaaaagaacgtgtctagtgcaatagatagtcctatagtttctctggttactcaaacttgtaaatagtgatagtagaatacattagtgctaggacttgattggttctaggacaaaaaaatattaacatttagatgtccattgaaaaattgtacctagcattaaaatttagaaattggaagaatatatgatgcagaaatgatcaagtgcaatagaaatttacatttctttatctttttaagcatggaaaaaggattttataggtgtaaactgaacaacagtgaacagcagtccaccaagaagatacaatcaaatcttatacaaccaacagggatgaccattaagatttcagaaatgacttaagatacagctgctccccaaaaccactcaagaaaaggcaatggagtatttttaaatttgaatcccacagcagcgcccaaagtctaaagtctatcccactagaaattcacttcctccccatcttttccctaacaaatcctactaactctttccagccaaagaaaccagatatttccatcacactataatacaaacaaaactttgcatttctccttcaaagcacaatgttttgttgataaataatgatgcagagacagaatcactaggagttcacatatctttgcatactcatatctgcaccttgtccttttgctttgtaacttcttattttggttactggttctcagttgaatattttatttctaatgtccaggaagtactggttgtccgcaaaattcatcc

SEQ ID NO: 8226 - DNA, 1350 bp, Prunus persica
  Intron number 15 from transcript ppa000540m (locus ppa0004 42m.g) derived from phytozome v7.0 (chr-ID scaffold_1; pos 16013702 to 16015051)
gcactctcaactctcttcaatgtatggtgatggtaactttcttgtgttatgatggttattctctttatgttactttccattgtgtgaccaacagctgggtctttcatgaagatggtgtgcgtggttggttgagtttgcgattcttggaatgtaattttggttatttatttattattatttacttgatttttgtatctacattttgcaatgcctttgtatttaaggctcatttgcatatgtagttttatttattgccttaggcgtttttatattcaggtcttgttatagaagaaacgtacacgtatatgctaaaagaaaaaaagaatcaacagactttttctaaaacaattttaaattactataatattcatttgggagttgctgtgtcgatcccctcatctttactatctatcccctgcctgtcgccccttataccactaactcatcatctaccaacccaaagccttgtggtaaagcctaactaaaccccatcccaacatctttcaatcctaatgttgtgtaaaaagattgcatgtgatactagattctcttttggaggtcctcaaatacgctgtgagtgtcattgttgggagtttaaagtctaacaatgtgttttcatgtttctttggatttcggaatcatgttctgtttagtaccatactatagtacccaatgaagaggtgatgttcaggctataactactgagcaacttcataatttttatgttttttccaattgtgaaaccaagatgttctgtaatattctgttgttaaccaatagagtgttcattctagttggagcaaagttgtaattaactcgaatgtacctttatatacctgtttgtttttggactgtaaaagtgtcaatggctctattaatattttcttatgaaaaaaagactcctagtttgtaattactcttcactaagaatcagaatgcttcatctgcaagcatagtgttgacttgttaaattctttttggtcatagtatcctccgtaactaatttctctctggaattactcctcctgtgctcttgttaagttgtaaattagtatatgtaagctatcatctactttttgtataactgtgttaagtatcagaaaattttctacctggcattcattttctcatctttctttctgcataccatggttataattcttatgagcatcattatcaataattattctctacatattgccttcaactatgacttagtttgttactattcagctcttgagatatgcactttagattcaccattaacctcagttgtttgtaactattcagttcttgagatatgacttagtgtgtattgtttattttgtgtttacaggtccttttagtgtc

SEQ ID NO: 8227 - DNA, 1218 bp, Prunus persica
  Intron number 1 from transcript ppa006687m (locus ppa00666 8m.g) derived from phytozome v7.0 (chr-ID scaffold_5; pos 1682640 to 1683857)
tttcttccacattcttcttcctatctttcgttcaggtacatacatgatacatagtggtgtttttgggttcttcataataatgggttattgtttctgttgtaaaggtcagctttttaattattttagatccactttttcttgtttgtacgattaacaaccatctacattctgtgtgtgtatatatatttattgcattcattgtatttcatcagttcatgcttttctcttctcttctccttttcttttttgactgtatttaagtgtggttggtaatgtttcttgtcaacttatacatttacaagataatgttgttgattattgtgcttttcagataaattggttaacgggggttttttttttttgggttgaacttggatttttcagtgaacgatgggtgagttgtgttgtgtagtttgatgcaatatgaaagatggggttgtttttggtcagactggattgacatgtctcaggaaaaagattgaatcaaattggttcttattcgaaaaatgtatcaatgattacttattttaggccatagattctgggatgataaggaatcacttttaccttctagatttggaaatgtttgaatgtcttacatacctgcaatgttccaatctatttggttattgtgtgataacttttgaatggtctgctgcactgctctgtttttgtttcctttataactttaccttttgcgtgtgcgtatgatgtatatatctatgaacaaacaaaagtaatcttaatctaaaaggagccgattttataagattaaccaactttacggaaccttgataccgtgcaaaggagcaaaagttggaaaagctctttgttgctcatccttgagcattaagcgataccaaggctgatatttagactgggttgcaggatggtttctagttgaatgcggtggaattttttgttttgatgataagccttcaaattagattgccctgcttttgttgaatcttctttctctttataaataagttctgctgaattatttatgtgtgtatatatatatgttacatatatgatagatctattatccatagattcttgacagaattttattagattttaaagtttcaagccacaagcaatattcaatcttcaagagattacttcaaaatgaaatgctctgtttcctttgtcttcttcgttttttacttcctttagaattgttggtatattaatttttatgtttgacagagacag

SEQ ID NO: 8228 - DNA, 1483 bp, Prunus persica
  Intron number 4 from transcript ppa008561m (locus ppa00856 1m.g) derived from phytozome v7.0 (chr-ID scaffold_4; pos 26976818 to 26978300)
ggaggaaacttcttctgaaaaagaatctgagccaggcaagttttttcttatttattttcccctcaacaaggatttattggaaaatttgtaatctcagtgttattcattcctgtttaccttttgtgtaaagctgcttatactttacatcggcgggatggttgcatagcctcatgttattcattttgcttccttaagtagtatcattgagtatgagagttaacagataatttaataaataaataaataaattttgcttcattcgtaaaacttacaatattggatttatatactttccatcagtttggacattaaaaaacctcaacagttgcatcatatatttatttatttttctgaaatataagaaatggtaactatgttgctttgaatgcaccgtttaagcagattacctctttgcaattagttcagttacattgtttggaatattatatcagaggcctttctggttaaaaagaaatagcctgtccaggtatatgtttaatgatgcataaggtgagctcatagaaggaaaaaaatacagagagaaaagctagcttttcttcaatctttagccagcatgttaattgtttgaatttcttgattcaaagaattgaataatttgagatgaacttttgatctaaatagcaaatgaaatttgcaaattgatccttgcacatcagaagcttttgttagtttgtgggcatcaattggggctatcgggtttgagaagattgacttcttgtccatattttattgtatttcatttttctataattaaaaaaagcttatcttttgtatccaaaaaagggctttctagtttgtggtatgtaggcacatgattgggataatggtgtatctttttataggcctaacatcaaagattgactttcatgactatcagccagttaagaacaaagcagtataattccttctgaagatgtattgttaagaaagtgttatgggagtattactacttactttgatagtgaagaataaaggagattctgtagattttgtacctgaatcctttcttaagcattagtactcagatttctctttaagtgcaatagctcctggctcaccttcaaatgggctactggttattttaaaattctaggatgttattcatgtctacttgatatggttgatgttctggagttcatagaaggtttattatgggtttcttggtgctgttgattttctttctacttagtttttgcatgcattttcatacatgtgattttgtacttacattcttggtatgtaaggagctatgcagataattaactggttaagaaactgtgagcgatgccttgtcacctccatatatcagtgattctggttgcaagttaatgattgatctgaacctttgttgctcagtgcccatgatttgtgcttttctccctttatatcccgggtcaaataaataattaagataaattttgttccaggtccacgtaagcaagcttcttctagttcttctgga

SEQ ID NO: 8229 - DNA, 1332 bp, Prunus persica
  Intron number 8 from transcript ppa025466m (locus ppa02546 6m.g) derived from phytozome v7.0 (chr-ID scaffold_4; pos 20868989 to 20870320 reverse strand)
cacaggtatcacaatagattgatgtgtcacattaaaatagatctcgaatatttttaaaccaactgctatttttgtgtttcattatttttggtataaatattttcattttgtaatggacttcatttatttctatgacactgtcatgttatctgccacatcatgtggtggttggcgactctagtattattgatcataataattggctttaagaaacaattggattatatttcttaatgggcggataccactgggtggggagtaacaactatctatgtgtaggaaagcttttggtgactagtattgttgatcacgatattttgtgatgagtagacactaccattgggtggtagttagtacattcagtcttgcatctggggttgggttaaattattaacaagctaactatagtgagcctttcctccaaacaaaatgaaattgagccactaaactagtaaagtgaataaatattattgattaactatcgtcataagaatgataaaatctttaagcattttgatattttccaccgagataggttaaagtatatgagcgctcctttatatgtaactgatatttttcaataaaagatacgttaatattatatgtctgaattttaaaatttcagatagtccttatggatgtatacatagaggagtaataattatttctttctagagaatgcgacattttagtgttagtagctgcacacacaaactcctagtcctgcgttagaaggatatgccgccaactgaatacaccttgtagagtctttcatctctaaatatcctaggagaaaagctgtcaaggccatgcaatttttgggttaatttttctacttattctggatcttattttttattttttattttttccaatttctgcttttcatgctcttggttttctagtagcaggtaaccttgttcactgcattaagtatttggttctattttttgtggctgttattctgatgagctaaaaatttgtttaacgatgagacgatgtcaggaagaagacaggatattgtttgagtaaaaagagaggaaaatgataaagaaagcatttccatgttgtgatattgtgattctattgatttcattttaagaagagtcaattgatcttgtgagagaatcaattggcttaattcttcctgtcagaaccgggttttgggaaaagaaaaagaaaagaaacattaaaaataataaataaaaaggattgccattcatttttggttactctctgatacaatgctgttctctccaacctggtatgttgaaatgaatcatcactgctgcctttctttacttccatcgttaactgcagtgttagagagat

SEQ ID NO: 8230 - DNA, 1252 bp, Prunus persica
  Intron number 15 from transcript ppa000178m (locus ppa0001 78m.g) derived from phytozome v7.0 (chr-ID scaffold_2; pos 20488547 to 20489798 reverse strand)
ctggaggggcatctggtgaaaggtaacattttggtcctgtgaattatgcactcaatctcttcatgcagatactataaattggcaattgcctaatacagcaatattggtcaggatttagttgaattttgatgtaatagaaagtggagttcctgtggtaaaacttttactgaagtatcgcaaaatttacaagttaatagaagtcgtgcaccatcttttcgcatacattcgcttacaacataacttaggtatcatgaaaaatctttttaaggatctcaatatatatttttaatatgcttgttaatttatcaagaaaaatctttttccatacaaatgtttacaaattaattaggtaggttgtaataactactggtggaggtggaggttgaccccctttttgacacttctactttgtattatttgtggcacaatgctcaacagatagaagtcataactcctcattgcttatcatactcttgagcacaattcatttatggttttataaatttatgttaattgcatgatcatattaatcattattgttttttttctctttgacatgtttattgaatggctcgtattgtgtacaatcacttgtaattttctcattatataatatatataatattgaaagtcaccttggaaaatggaaagctagtacatctgtatttttttttttgtaaatttttatttcatgtgtacaatgctctgcttactgcagtaattcttgtccagttattatttggtgtactttgtttgattgccttgactcgaaaatgattaaatgaatgcctcagtttggcgaggccttgattttcatcagataaatgaagtgacctaaccccacaaacattatatttttttgctgtttacaaaatgtacatttcctatttgtttatttgatccgttttccctccatgtgccattttgtataatcttattctgatgactgcattcttgcaggaattcttggcctagtttctctgccacaggcatttcggtaggtttttatccctcccacacccaaagaaagagaaaaaaaccgtctatatttgtgcatgtatttgattaacatcctaaccactgagttctctttatggtcccagattcagtcagagtccatttctggtcaggatggaaatgatgttaagaaaggtatgttcagttctgaagtttaaaagtagcaatgtctttgatgatagattttcccttagccgaagctgattcattcattttccttcataataacctgtag

SEQ ID NO: 8231 - DNA, 1199 bp, Prunus persica
  Intron number 4 from transcript ppa009444m (locus ppa00944 4m.g) derived from phytozome v7.0 (chr-ID scaffold_1; pos 14765371 to 14766569 reverse strand)
aaccgcgttaatatcgctagtggtacgccaaacaggtagtcatcataatcttctgtaaatccagtaaccatttctttacttacattacccttcaattgctgcttgtacttgtatgctatttttagggtatatcaattcaacaagcatggtgcaatgttattctgttctttaactaacatggggttgttttattattcggtgttagttgagtagtttgggctgtgtatataagttataaaataatttgttatatgatgacttctacatgttaattgataagatattatttggaacagaaaaaattaaagggccaagccactaagaggacatgatatagcatgaaaactttataatttaatcatgaattgtgaagtcaacataactgcctacgcagccaattagtaatgactgagatttcatttttaaacctattaatgtagcagccttagcttgtttaaaggaaaatatcccttatgagttatgggcaagattatgcatcatataagatttcttggtcccatggagtgtgcccttgatggttctaattatcttttagggtttctatagatgttttgactctaagagctatggttaattattttccaagggtttatcttttatttgtatagtgaacgaatattgttgattaaaaatgacgtcatactcacctttgagtcatggtagcctttgccctaatctgagtcccatagtttcctagaaaccatttcgtattctaccgactccctaaatcttcccattctgggtaaatgaagtttagagaaagacaattttaggattttaccgctaccctacattattatggggaaaaaattaggaaaaaagagtctacaattagtatggttctttatggcaggactgagactccttaacactggatttctgtactatatggttactttttttgaggttgttggatgctaaaattatattttgctttatcgtaaaaaaaaaaatgaggaaaatttaggacaaacttctagtttatttacgctcatgctttgtttcacttttaattcattttgagttcacaaggttgcagacttacagtgtcatatggctgtcctttatttttcctgtctgtgtaagtttgtttgtttgtttgaattgaataattttgttctgtatttaactcatctcttccaggataaagaagctaattgacattgaggcattggggc

SEQ ID NO: 8232 - DNA, 1204 bp, Prunus persica
  Intron number 3 from transcript ppa008459m (locus ppa00845 9m.g) derived from phytozome v7.0 (chr-ID scaffold_7; pos 14707467 to 14708670 reverse strand)
caggttacttttaccattccccttccatccaaatttctgatacattagattaatagtcatgatggtatggcgacttgccgctgtaatccgttcagcagaagtcaattttcatctgttgcttgatgtatgttatgtagatgtactgtgcaacatcacagttcagcgtgtgttgttttgcaaaatattattgaaactgtccaacgtagagttgagtttcattgaagactcggttggtttataatgcgcgaatctcccttttttcttttaacatgccatctatcaggtctggccttaggattcattcatattttgtttttatattgttagaagaccttatttagtagattttaagtcatttgaatgagttactcaaattccatcggtcattatatcaccatttcctatggtgatgcatgattttttcatggcttggcattaatgtaaacagtcttatttccatgggaaaacctgttgtgtgcatagtttttcagataattctgcctcttggtgatacactattatataaccgtctagatatatataagagaatggtcaatgaatacttgtgagctatatagatacatgggatttaataataaatctggtttaaggtctttgggatttgagattcaaggtttcaaaccagagctagtttagtccaagtgggttggcacgaccgaattgaaatttctgagccataagcatttgtagtttggctcatcttttactcatcttagattacgatctgatgaactacattttggtcaggtaactcacagttaagcaaggattagcatattgtctgcacaatttttttttaattggacaaaagcacacagatttagttcctcagtgacatgtaaaactgttaatcagtataaccatttacaggttaaggtaataaagctttattctttgaaatgaagtatgtgggtagaattccgtcttgtttcagggatttgtaattgtatttgttggaattgggagaaagcatgagttatgatcgttttgttagttggttgtggcatgtgttattgtggccacagctgtttctctcttatctttttttattatttcttcatcataatgatagtactcattgagtgttagattactgttttcatgaaatcaataacattttggcaatatgatgaatattaaaatactagggcgccccatcatcgttgacttttccccggtgacg

SEQ ID NO: 8233 - DNA, 1117 bp, Prunus persica
  Intron number 1 from transcript ppa005327m (locus ppa00532 7m.g) derived from phytozome v7.0 (chr-ID scaffold_7; pos 16699703 to 16700819)
gtgaggaagaggtgaggagtcccttgcaagaacattttttatatactaatatttggttgtctgcataaatatttattgtttactataatattatttgcttattattttgtagcagtgtttaactgtttatggctgatgttcttttagatcactggagaggagagacatggctgctgttggttttctgcatatgtctttgtgtgtatgttgattggttgtataggtttaggaggatgattctttggagtgtcttctgcagtactgtgaaataatgtttgtgcttttccgtggttacatgtggtgtatagtatgtcttgaaaattttgaacaattataggttaaggttgttgaaccttgttcttagctgattgttttagtttcgtagttttggaagctttttgaaaatcagatttctgttttggtaacagttgtgtagtgataaggtaaatgttagaatatgccttttaaaaccccgcactttattctattttgttgcaagacctttttgttgttgttgttgttagaaaacttttatttgatgcctttttctgatgtatcttataataccagtgttgctggaatgtgtattatttgctgtcgactcttcagtgtttatatttttgtgggaaaagaaattgaaggtgtcacgaaaaaatttgaaggtcttttttttctgattgctgttatctagtacctgaattttgttgatttgattgtcaattgccttcctaggtcagattacatgatttagagtgttcttgaaattctgtgagtgcacttaacttcaagctttttcctgtaatatttggtgctcatggttcttaaaagtagtattcttataggctggcactttcctgcaaaagactggttggtttttcaagggtggcggattgttggtctttgataaattggctgtttattcgaagcagtgtctgtttttagtgtgttataaatcaaagttgcattttttttaaatcgtgctgcaattgtatgatgatttgtttcctatcaatttggcccttttttcattactattactatcattactattgattttatcatgattacttaaatttatcaacttacggaaacatgattggatggcaggaagaggact

SEQ ID NO: 8234 - DNA, 2959 bp, Prunus persica
  Intron number 8 from transcript ppa001039m (locus ppa00103 9m.g) derived from phytozome v7.0 (chr-ID scaffold_7; pos 5059959 to 5062917 reverse strand)
tctgccaagtgagtatgtcattgaaaaaattatatgtcaaaaaattgttgttacactgctgcttcaagtattttttattgttattgtttgtttgaatttgaagttgattctgcttgttatcttttcttccattatgctttttcaatcaaaggcatactagataatgctagatagggtttgcaagacacaacgcttgtaaaatagtgtcaatctttgccatgatgtagtatatttgtaaagaaagagatatgcctttggttgtgctgggtatctctccatatggtggatgcggatacctggattcttgcaatacctggtgtgttgcaacttcaagtgctgttctaattgctgttttttatacactgttgggatttggtgctagatgtctatcttgcttcctacttgtattgcttgcaattctgtttcctttttgttaaatgatgcatgccctcccctcaacgtaggtaggtgatgcatgcctcccttgctaccattgtcattgaacaatgttattaatgtattaaaagtatattattatccaacatgtggataaagcttggtggtcaaccttaattttatttgatatgaaaatgttctttcaaggtgaggaacttaccattttgttctttcttacactcctaatgcaggagcatctacgaagctctctaagattacttaggtctgtgactcaattgggctaggattctatttactttaaattattagttacttcttttgttttcctactcttactaggatttggtttaatttcctgtttaggtttttaatttcctatgtcaattaggttttctgtattctagtataaataggctagttagagactcttgtattgagtttttgttgataaatataatttcagactttagtctatagagtttatattgggattttgccctagaactcaattatcttcgttccaacgtcgattctactgctttatccttatattctctgtattttggttatgtttgggtcactggacagcagcttatagcctctgccttgcatcaactcctcatcaccttatggatctcctagaacaactgctactcctgcaccttgcaccactgccccaatattctgtcaaccccacccttgtaccacctacaataacttgattgtatggtccatctaatccttccaatttgttctctctcctttctgtccagtttcgtcacaattccttcacctgcagtaaagaaacccaatgctaatctattccaaaagcagagacatattttaatattatccttgacaaggggaagatcaaagcaaatggcttttgtagccatacaaaacaagtaacacaattggcataacctttatgggcgttggttgtaaaggttgtcgctatatctgggtaagttagtactgctgtgagtctgacagttttgctagatttatgttttcagtctaaggaacttctgctttgagcaatgtggaggtttagtggtacttatatgtcatggagatttggttagttttgtacctttatcgttggatgctcaagcgaggctcgtttacttatgttttgtcatttgaacctcttatctccaactattggagcggttttgtcaaactttaaacatgttttactttttaaatagatttttgaggttggcttatgaaattttaggttgttcaaagttttaagacaatcttgtaggtttggggtatttggattcttatctggtttatatcttaaggtaattgattagagcttttatgtgcatttgggaaattagtatcttggggactcaagtgacggatttgtattggagcttgggtgggtccggaatccgaagaaatttagcatgatatcaagagtggtggcggtagcttcaagatgagttgcagtagagtggcttttgattggaaaaaaaaaaggcagcgacaaaagtcagggatgtggtagagtgcaaattgatgaccagtgacagctccttaacttctggaggttagcatcacatctgaaaagttcaaatgtggggcctgttatttgagcacttcgatagggaagcgtgtgctgtttaagcaaaccacagggaagtttatgttattgactgagttagacagaaacatagaagttatttttattttttgttaaataccccttgaattttcctctttaaagttctaagttgttgtctgttgacatactaattgttttgatttgctgccacagagtcacatgcaacacttagttaacattaggtgacacttccaggatgacatacaatcctaaggtttttgctcataaccttctgaggctcgtcaacctcaaaatctcatcatgagtaaacctcaaaccagtatatggcaacttgccactcatttggcttagctggtgcctgagtttaaatatgttggttgtaaatctaggtctgtactttgtaagtgtttccttacccttgtctgattcttctcctagtgggctaattctatggctatttgttctgacaatttttattcatggaataagcaaatgatggtttttgacttttctttgaatttatttttttgattacgttatacgatgcaccaattagaagcttcctgattttgtatctcatttatcaaaataaaatcctatttttactgtttgatgctatgaaggtcggtgagtcatggcttggcattttcaaatctagatatgtttttactgaatctggatcctaatcgaaatgcttgtcctggtagtttgtataaatgaaatttttggctatgcttataaggactaagaaaatattgtttgataagtgctaacaagattgtctttatatgtcagctcagcataaatcccctaatgaaacgctcctacagaatgtgtttttaaaacttcattacttcaatccatatataaatagtttttcctcacggttatgatgtttcctgttttacagggccagtataagtcaactttggtttgtcccatttg

SEQ ID NO: 8235 - DNA, 2235 bp, Prunus persica
  Intron number 3 from transcript ppa014690m (locus ppa01469 0m.g) derived from phytozome v7.0 (chr-ID scaffold_2; pos 22116887 to 22119121)
ctggtattagcgctagcctagaggtgatgcgcattatcaacgaaccaacagccgcagcaattgcttatggccttcacaagaagagcagtggttggtatagtaagcgaaatgtgctgatatttgatttgggggttggtactttagatgtgtcactacttaccatggggagatggtgtgtttgaagtgaaggctacagctggagacactcatcttggaggtgaagacttcacaaacagaatggtggatttctgcgttcaagagttcaagaggaagcacaacttggacatgagtaaaaattgcagatttcttaggacgttgagaaatacatgtgagaaggcaaagaggagactttcttttacatctgccactgacattgaaatggactgtgtggatcagagtaatgacttatatctaactattacttgtgccaaattcgaaagtctgaacatggatttattcaacaaatgcatcgaactggtggacaagtgtttgaaggatgctgaaatggacataagcagtgtgcatgatgttgttcttgtcggctgcttgtctagaattcccaaggtgcagcaactgttacagaatttcttccagaggaaggagttgtgcaaaggcattaatccagatgaagccgtggcatatggcgccgctgttcaagctgcagccttgagtgggaatagaaatggaaatgggaagcttcaagacctcgttctctgcaatgtcacccctctgtcacttggcatatcgaatggaaaagaaggttccatgggagtctttattcccagaaacccgagaattccaatcacagtgaatcgtatctccaccaccacctctgataacaaatgtagtggcagagtcgccatttatgaaggtgagagtgcaaccgctgcggataattactttttgggcgaactcatcttggatgactttcctccatgtccccagggtgttcctacaatcaatatttctttgatattgatgataatggtatcctcagtgtctctgctgaagaaaattccacccgtcagaggaaaaggattagaattaacagtgacagaagagctaattgtgaggggattgagaggtgatgtaagaagtgataattatggaaggccatactttaataactaaacttttgtatgtgcatgtgtgagcaagaaccatgattggaaattatcattgaaatatatattgaaagtttgagtcattctacaatgccaagggtgtaaattgctcatgaattcataatagagtatacatgaatcctatcaatcccccatgtgcacttgagtgatttttctcggttacttcacttgcatcaccggctcacaatcattcacaaccatacgcgcaactaatgtagcaattcaagaggaagcataatgtttccaactgatttgttaactactaattataactggggcttttgcataactaacatgttggggccaagatggagccaatgtgtgagttcatatgtggctcaaaatctcgtattcctatgtatccatcttacattggatttactgatatgctgaacttgtgaagatattgagacagtcatgtaaggcgcattaatttatgccatgctaatattgaaatagcatattaaatcagtttgatgttgtttaggggttgccttcactgctaacgagcggttggtcggtgaagcagcgactaaccaagtcatcagaaaccacaccaactccatctttggtaaagttatcttccctgcacatctatcaaccacatttcttttagtcatctgtatgtttcctcttcctgtgaggttgtgaatacatgttttctttgtttctagaaaacattctagcaaactggctcatcaaattttgttcaaagttcttcacttatttagaatataaaaagtagttgacataaatttgcagatagaaaacagttaattggcaggagattcagtgacacatctgttcaaagtgacatgaaactgtggccattcaaggaactggtgataagcctatgattgtggttacccacgaacgccaagagcagcagttttctgccgaagagatctcatccatggttctcttgaagatgcgagacattgctgaagcttacctcggatcaactgtgaagaatactgtcatcacagtccctgattacttcaatatctcccagcgtgaggctacaaaaaaatgcaggatttagtgctggcctaaaggtagtgcgtattatcaacgaaccaactgccgcagc

SEQ ID NO: 8236 - DNA, 1642 bp, Prunus persica
  Intron number 3 from transcript ppa010057m (locus ppa01005 7m.g) derived from phytozome v7.0 (chr-ID scaffold_5; pos 3761081 to 3762722)
cagccaaaacaaggagggtttttttagcatatttggtaagtgcttaagtttgcagatttgttatgctttattgatattctatgtagtttggactctaaaatcaagttaaaagaacaggtttttcttacctcaaaaatgaaaaaggaagaagaagtgggattcatgtattcaatcagtcataaatcatctcatgactgtttttcttgatgaaatagtacattctttgccctgaacataaactgccataggttggatgctgtgagggatagtgtaatattagctttccttttcataatgctgtattataccaagtaatggtagaaaagaaaacatcaaaattttccatttaaaatgtactgtttcttggagaagcagctgagtgggtgttgatggctcaaatgaagttgtagtatgataaccaaattgaatgctgcacccagattactttttaggaagagcaaactcttaagtcataatctctgcataacttatacaatacaatcatgatatttctctatgctcatatatcgtcagatatactgtaaattttgcaaaacaaggaaaaacaatctagattcagtctttaaaaaaaaaaaggtgtggcagtttaactgtgcaattaccatcttcatggttaagtcgggcttgtaatcaatggaatttggtgctaggatctatgactagtagttttagcgttcaactcgctgctttcacattttctcattattatgaaaaggtgaaggatataaacaatgatagaaagatgagattggcttgttttattagttatttagcctgaggtcttttatcttttaaattaaatgaaggttcgaagctacaatacaaaatgaaagtatgttgaattgttttattttattgtaaaaactaccaaaatcatattttataatagtgggataatagtatcattcataatgatacgtgaatccctttaaatatgaaaagttcaaaattcatcatttgataattgaaaaattgtaatagaattctgaattttgttttctgaatgttcttagtcactacaattacctaccattatccttatgatcatcaccatcaccaccgagctcactcactctaatcttgatatttactagagttttccgtaactcagacaacgacgttaaatgggttccataactaaactttggttgtgatgcaattaggttgcatttagttcatgatttaattcattggatgacctaattgtgggtattttggggtcaatgaacatctctgatatatctggagagaatgtcatgttctgctatgcattggaagaacaattccggttaacatgttaatacctttatttttagtgataatggatttggttaatcatatgtataggaggtgaactgctgaatactggacatgaacactacaaaaaccaattaggataaaactgatgaaagacagtatgaaaatccgaaaagttgagaactgaaatgatatggaagtaaatttaaacgatcacataacactgagaggaggctgaattataatcattcaagcatgtctttttgggttttgcttcttattgcttttgctattccttttgtaaagtatttgattgttttcattcccaggatattggggtttgtaccttgttggtgtccagtta

SEQ ID NO: 8237 - DNA, 2916 bp, Prunus persica
  Intron number 1 from transcript ppa011139m (locus ppa01113 9m.g) derived from phytozome v7.0 (chr-ID scaffold_5; pos 15497826 to 15500741)
ctgttatatttgggtatgttggaaaaatgaaatgcataaaaagaaattactatagtgttctctttgttatgcaacattaatattcatttttcgtttcttgtctggtttggattgcagtccagatgataccccttgggatggaggttagttaatccttgtactgaagcttttgattatgttaatgtttttcagacgtgggatattctaatgtttttcagacgtgggatattctgatctaagttttacattctaggatgaagatgaaccgcatgtacagtagttatgttatccctttcttttgtaaaggattttatgtcttcttcttgacgaaataattagattgcggtctgatggattccttatttcactaagttcctaaaattttcgtactttctaatactaaattctgaaaaccagaacctgaatattgagtaaataactaaaagctttcctcctttgtttctgtcatgtcttttgcccattgatgtgaccatggtatgcatgtttctgttaaataaccttaactttgttagtatctacatttaagaactctctgttggagtaatacaggcacgtttaagttgacccttcagtttacagaggattacccaaacaaaccaccgacagtccgatttgtttctcgaatgtttcatccaaatagtaagttggattatacatgtcttgacatcacaattttctgcatgttaagcatttctcctctggtttctgaattcaatttttctttcaaatttggtcagtttatgcagatggaagtatttgtttggatattttacagaatcagtggagtcctatatatgatgtggcagctatactcacatctattcaggtaggattgaattgtgtggataggatttttgttccttgcttatatttatgaattttcatagcatgtagcaaaggtgtgtcgcctatagcatacatttgacttagaacttaaagaaacatcgtattggggaggttaaagttttgcttctacaccttagggtcttaaggaaggctagtacgtttatctttattccagtacagtgtggagttttatatatctatacgacaaatgtagctgcacatgccaatgaaggcatgtaggtatttcgatgtagaccaactatgaatggaaatagtgatgtatgtgttgagaaacttttagtgtgctaaacaccaacaatctgagaagaccctaacatctaccattttcttattgcagtcactactatgtgatcccaacccaaactctcctgctaattcagaagctgctcgcatgtttagcgagaacaagcgtgagtacaaccgaagagtgagagaaatcgtggaacagagttggacagcagactaactccttcacatgggagcttgtaggacagtcggaatttgttcaaaggcattttataagtagcatttctagctactgcgagaatcgttatgccaacttatcaacatttatcctgtatttcaatgttttattcccaaattatgacgcttaggatttgttcttcgaagtatacagttgtgatggtatatgttgtaaattgtaatttccatcaaggacgttgatgtatgtggaaaggattgaccatggattagctgacataagctttgatgtttaagtatgctttaactcttaatcactttgttaacgtccataataaaaacactgcattgatcctgcagtggtcattttcagtgacactgaattgccgaccattttatattctttagctatagagacaaaatttatggacccaccccactccatattgtagtcaaagtacgtcaaatactactctctaaattattgttcgtaggctccgtctaaaatttaccatcctcatccaattattaggtcacaatataatcgatcaatatgctttgcgggccccaggatcaatgtatccacttgtaaaagccaaaccaagccccccttaagttcctttcctgatgctctgtatagttttttccagctagctcatgaaatatattctgtaaataaggagacaaaaagggagcatcatgaaatggcaacaagggctatatggttggtatgtcatgaatacactgtgattataatttgtaaagagtaaactatgaaaacgagtgattatcaattgttaatatgtaggtgttttgtaaataataaacaatcgttcatgcacgcacgcgtactgtaatatatgagatataacttcatttataagctcttataattctctttattctcaatattataaaaaatttaagagtattattaaagtcacccatttcaaggtcttatattttgtaatttgacaactcaaagatggacatggtagttttgaatctctcaagagaatgaaaaaccataaaaagaaaaaaaggacaaagaaaaaagaaaaaggtggagagaaaattccctccattcacttttgggagattttggaaaagaccaaaagggagtgaaattttttaaaagaagccaaaatggacaaaattgcccttctttatttttggatttcataaagaatcttttacatttgcatgtttttgttttgaaagttgagaggtttttttgtcttttttgaaaaaattttggcttttttcaaaagtaaaaaaaattttgtggctaaattctaaatttaggagaatatatttcagaaagagaaggcaagcaggcaagtagggagggtcagtgctgagtagaccgaccccaaccacatcgcaaaattcctacattcacattcacttgataattctgatacaagctaatttacaaaacaacctccgcccttctctctctctctctctctctctctctctctctcagtagttctgtgttcctctcctcccagacctaatggcttcgatctgattaaacccacctccaaagccccttccttcaacaacccaattctgaacctgttc

SEQ ID NO: 8238 - DNA, 912 bp, Prunus persica
  Intron number 1 from transcript ppa005473m (locus ppa00547 3m.g) derived from phytozome v7.0 (chr-ID scaffold_1; pos 28888933 to 28889844)
ccgtgcggtaccattggtggttcgtaattttcttttccctctgctttttccttttttttgtgtgtgttgtttttgtttggttgccgagaaactgaaagaaaaaaaatgaattttcataagcatttaattccgcgagggagagtgttacatactgtagtttctcttcttgtactgcattgttctgggaaactaaaggtgcctattttgcgagtttatgaagtttttacctttgtgggttcaaatttctgtatttctaggtgtcttatggagttaattgctaagaatcgcactcaattttcgagtaaaatttttgtgtgtgtgttctgtttggcaatttaatatttattgtattggatatgcattttcagtgatcatggagggttgctgcttcattgagcataaagtggagatctttgatttttatgtttttagttaggatttcttatgcttactgtttcaaattcttaaatgcactatatgattttggtttggagatttcataactcaatgaagccatttttgcaagataattcaaactgaccaatgcactaccaaacctttaaaaacagagttgaaaacatacctgttcaccacgaacttaccaaggtctaagccattcatttattcatggttgtagctgagcagtgaagattgtagaaagaaccatttaaggttatctcatgcaagaaagctgcctgatagtttaggttttgtagctgtaatcgtattgagggttccaaacctctttggtgaagcataactttccttaaaaagaaaaaagaaacccaatgcttccgaatgattcctctgatttgtctactacatcaactgatgttttcgatattggtttaatgtataatgttttgttgtcttaaaaccgcaggatcatattttcccctctgtggcttttcc

SEQ ID NO: 8239 - DNA, 1348 bp, Prunus persica
  Intron number 1 from transcript ppa026336m (locus ppa02633 6m.g) derived from phytozome v7.0 (chr-ID scaffold_7; pos 21605755 to 21607102)
ggaaggactatagtcattgtggagaaatgagaaatgatgggttgggttgggtcgggttgccttccaaaagctcatgtgcacgtgttcgcttttaccagttcatcagaaacgaactacccaaatttcacgaccaaaaacaaaacacacacacactccatctctctgtctctgtgtgtgtgtctctgacggtttggtttcgactttcgtttgctacatttcatttggtggcgaccgtacgttttgagtttgagaaaaaggcacgagtgtccgctgataccgcaaagccacagatcgaactaaaacctcaaagaatctttgtgctctctcttcatcaagctccgtcagattcaatatccatctttgcttactatgggcaagaggaagctgccctctgatcacagccagacccaccctccccctttctctcctcatccttcgggtacgcttcttttttctgttctttgaaaatgcgctgaaaccaaagaaaaatgaaagaaaccaacctttttcttgttcttgcatcatcatagcatattgtactcatcaattatgataaaaactcgacctttgctcttcttttaattaaataacgctaaaagaattgggggccttgctcaattgagccaattttgttgtggtaagaggtgaatgatgcttatcctttaatcaatgttacgaattttttctgggtttctttgttactctgtcatttgggttaatggggttttcttttttcttttagttttctagttgatcaattactaaatgaatggggctctgtgttggatttgctttattagatatttcagaaatgctgaaatcacaattttcaatttctgttttctaccaattcgtctggcctgatcccagcttcagaaaaaaaaattctaccaaaaaaatagtttcttgattatgttagagaactaaatgattttaagaaggatacattgccactttcattttatccaagtaagtgaaatgtgaatgatgttttccttttcttttaagatcttgcagacatcatgccatgttcttcgggaatggaattactgtcacaagaggttagctgtgcttttcctattcatgttaccaatatgatttctggtcaacattgcaacttttttattttatatttcttccttttcatgcattaggagagagagttatttttaatctttaatcttttttttttttctttccagaaacctttgcattctgttgattctggcgaacaactaaagtccctgtcatctgtactggactctacggatagttctttgaagctactaaacgcccacccttctgttgcacagcagcatcatccaagccttggccgatcaaccttctt

SEQ ID NO: 8240 - DNA, 474 bp, Prunus persica
  Intron number 8 from transcript ppa011267m (locus ppa01126 7m.g) derived from phytozome v7.0 (chr-ID scaffold_1; pos 42195273 to 42195746 reverse strand)
cagttgctcagaaagggttttgagcttgtaaataggtactaactgattcatgtgcataatttggttgtataccaattgttaaaaaatgcctaatactggaaaatgaacaaataaatatcagttaatgaattcatgttgataaatgttgagggactgaatatatcatagccttttccaaatcatattttgtataatcagctaatgttcccttaagaagctgatacttggagtgcccaaagcagaagctgatactactaaatcaattttatttataaaatatcatatcacaaattgactacatggtcactcacaatagtatgaaatgctgaccaaagaaagttagaatgtgtttgtgtgttatgtgagtgttgatgttcaattgaaactaatgttgtctatctttcacattaaaaatcattggtatacatattctgaacaattgtacgtaccacagagaaggccttgaagtgactg

SEQ ID NO: 8241 - DNA, 2858 bp, Prunus persica
  Intron number 1 from transcript ppb019671m (locus ppb01967 1m.g) derived from phytozome v7.0 (chr-ID scaffold_4; pos 8389408 to 8392265)
gtgtcagattctgggctgatttcattgataagaaggtagtaattaacatatgcaacatgttgctgtctggtttcccaaaaacgtctcttgtcctctctctggttatatcttcttcttttattttggtgaaattttttattaaaaagaaaaagaaaacaataagcagccaaaaaggaattttctcttgatgcttcttttcttttaatttttttgtatttttggaaaattgtaggtatttgatgctgggaagaaattatggagcacaaaaggagaagaacatgaagcagccaagaaggaattcatcgaaatccttacgcagttggaaggagagattggagacaagccttattttgggggtgagaggtttgggttcctagacattgctctcatcacattctacagctggttttatgcatttgagacctttggaaacttcagattagaggcagagtgccccaagctgattgaatgggccaaaagatgcacgcaccgggagagcgtatcgaaatctctggccgaccctaagaaggtgtatgactttcttcttggtaggatagcgggatagaataggctgctagccagcatattatcaccataggaggtcctgcaatcaaatgttaggctgtgtttcttctgttttttctttttcctttcagctttgtttttccagtgagagatcctttggttttgtgtctaaattatgtttttttagctgcttgttgatatttgaatggctcaaaatcctttgatataaaaagttcacagcaatttgataatttgactacacagccatatacaacaaagctcctccatatactgtagtgggcttggtcaagtgccgccttattgcaaatataaagaacacaaaacacaggttgaaacttgagacacagaaaaagcacaagctcaagtgcccatgcatctactgatcaatccccctcgctttcatgcgctgcagaaaaaagtcatagatcgctttctggtcagcaagagacttggacacactctccttctgcatgcacctctttgcccatgcataaaactttggctgctctgcctctatactgaagttgccaagtttctcatacgcataaaaccagctatagaacggaataagagccacatcgacgaacccgagggtctcaccgccaaagtaaggcttgtctccaagcttctcttccaacaatccaatgcactcaaggaactctttcttagctgcttcctgttcttctcctttggttgaccgtagcaccttcccaatctcatacacctgcatttaacatcaccaaaattgcagaaaattttatggttaaacaggaggtcaaagaccctttatccatatttcgagattttcacagtaattctttagaactccatgtaaaggttctgtactaatatttttcatgttgatataggacttacggtaaaaaattagtaagttagtaaaatgataccttcttgtcaacgaagtcagcccagaacctggcttgggctctaaggtaaggatcagagggcaacagaggagttttatccttccaaacctcatcaatgtactcaagggcaactagggactcggacaccggtttgccattgtgaatgagaaccgggatcttcttgtgaaccgggttcgactggagcaacagtgcactcttgttactcaagtcctcctctttgtactcgtactgaatgcccttctcagccagtgcaactctcaccctcatcccaaatgggcttggccagaagtccaacaacaacacctcatccgccattgaagactcaaatttgaacttagcttaattaagatatggagctgtggagggtggtgatgtgtgtcagtgtgagtatttatggacaaacattcaaagcagcagcaatcagattacgtcattgcatgcgttcgatatattttcattgaatactgttcctaataatataattgagaaagtaggactaacgtatggattttattattttattattttttgggtcaaggaccccattggttttaggtagacgaacttgaacacgcaacacaaataccaaagaataaactgaaaatatacaatttttaatgactttttaggcatataaaatatttgaaggagataagcgatagctttttttcttttcttttttgggtcaagggaggtgatatatatatagcttcttgagcctgcacagaatatatcataatgcagttgacaagaaaacatttagtagaagttgagaacttgataatttgactacaaaggcaaaccaccaaaaacatatgaccagagagtttgacggaaacaagtccatttgtttttgtattgttttttattgtatgtatttcggaaacgagtcgggtaggggccgggtatgacagtatcatcctcgtcctcgctctccatccccgcctctgttctcgaacccatccccatctccgttctcatcgggggactattcctcatacctgccccgaatccctgaatttgtttgcataaaaaatatttatcatatattttaacattaaatttcatattaaattatcattcaacacatccaaattaactataaagtttaactcaactattcagaatcacatcaatatgaaattccaaagaagattagaaagaattaggagagagaggttaacttagggttaaacataaatattgtaattatatatgtatttatttaaatataaacatatatattttcggatcgggtttggggatggggacaccaataccatcccctccccatatccgtaggggatttttcaagttcggaaattcccgtacccgatacccgtttgaccccgaaatctcctcccattagggtcggggacccgtccccgtgggaatttctgtcat

SEQ ID NO: 8242 - DNA, 702 bp, Prunus persica
  Intron number 16 from transcript ppa001070m (locus ppa0010 70m.g) derived from phytozome v7.0 (chr-ID scaffold_5; pos 9562630 to 9563331 reverse strand)
ggttgctggagccattgctaatctctgtggaagtaaacttgctgacctcttcaatgttcaattccttaatcatatccttaatcacaaaccccatcaagttgctgaaagtaggatcttcatcgttctccatcacggtggttctttatatactttcttctaattgtaatattggggtttaggaagatgctatttcattttctttctgatttgtcaataacaaacaggccggttatttaatcatatttacctgaaatgaaaacttatggaacagttgtagtaatttacactcttgtggtgcggctattagtaagttgtgcttgtagttgaattatcaagtgtttgtgaagttcttgatttagtcagatttaactaaaaaggtaaactactcatggaagggttgatgtagtagttgttaaggctcttccatattctgtttttattagtctcttaacttttaaagtttacaattcaatcatatactttattcaaactgggtttttggcaatagtggtgaaaccatctctaatgacagacataattagttaggaaatggtttagacaattgcactaattcctttctggagtgcctgcatttgcattaaccaacgaaagataatttgagtagtctatcttgctgtcactaacaacaatgaaattgcttgttcagataaattacagagtaagctaaggggtgaaggtggc

SEQ ID NO: 8243 - DNA, 1168 bp, Prunus persica
  Intron number 2 from transcript ppa001257m (locus ppa00125 7m.g) derived from phytozome v7.0 (chr-ID scaffold_6; pos 8226752 to 8227919)
ttattgaggcaaagacacacagtctctggtctaaggtaatattttccctgctttaattaataagaatgatatctttaatttatgctctaatttgttttcttaagtatcgtgtgaccttccattttatatacacctgagatgtctttgtaagttttacgcaatgaataggtggaattgcatcatctcgtaatgatgaattaacccatccttgtgatcctcttttgttttctgtataatttgtatcatatttacatttattgaagtacaaatgatttgggacatctcaagtctaagttttctaattattcttcttccaagagttgttgatgcacgatttttgataatcattgaatttagccaaaaagtgatatacaaaaatggtatgcagtaaacccattcttccaacccctttctaatcgtgaaagtgtttttggtataatatgtgtgagtttatggggcttgaagggtggtccaccatagaaagatgattaagtctaaattacaatgggcagattgtagattttatattttgattgttggaaagatgacaaactatagctattagcttgcactggcgagtttgtttgatagttaaacaaacagattaattccttggtacaattttaagtagtggggttgtcaagatgttgttatttgtgtttcctttcttgattactagttttgtagaatttgaagtgttaaaacaatatataaatcacttttgacatggtgaaattgagtttgagttctttttgaaaacctctatcactgttccggtatgatgttgccctgcaatggacccttatggtgctgtttctgactggttggaaaaaattacggttcatggactttgttttatgtaattttttgcttttgatgctacactcatgttcatgtatgtatgcatatagactttcacctttagagcatcttaatcttctatatttttatcaattatagattgtggtcatgtaaatccattaacttttttcttcttttattcttgaagctgtctggattatttcattgactaatactgaattaatttcttcattaattttttgtttcttatgtagaaaaattgcttttatttattttctcattgatatttgggcatctgttctttggagtagggaaggtttttgctccagattggataatactgcat

SEQ ID NO: 8244 - DNA, 4785 bp, Prunus persica
  Intron number 2 from transcript ppa013644m (locus ppa01364 4m.g) derived from phytozome v7.0 (chr-ID scaffold_5; pos 1878926 to 1883710)
ccgttgctctcaaaatcacttgtcctatttgcaaggtctataccgctcctacctacctatcatatcatatcatttgcaccttggtattatcatcatcatgatcttcttggtcttttttttctgcattttttctgttatgttccaatttagttatgatgattgatgatgaattcttagtggtacgaaaccaatccatcaacccaatttctttttttgttttgttttgtgatatttatattttggagccctcttgaattttgtgtttctataaacaatcataggtcttaaagttgtttttttgatagattataccagaaaggccaaatcaatggtgagtattgtttcaggtgtcaatttgcttggtatatatgggttgatcagttttccccttactttgttctacttattattctttctttttgtgtgaaaaaagaaagcgcttgaagtgacatggtgctaattgccgtgcacagagtacgaaagtagagaaacttttgtatgaaggttcatgttgagattttatgttcatagaagtgactctagttgttaatttgatctagatgtctaagtgggacgaagcaaatagagatttatgttttttactttgtggtcattctagttttacggaccctatggagttcgctagttttcttccggatccaatttgtatgatagttttattattattttttagaacgaaaatttattacagaaagaaaagggagtacatgacatgatggacaagaggcccaccaaagatagctacaaagtgaggacaaagaaacagagaaaaccaaacaaacagggccacacaacctaaagaaccccacaaagctaagagaccaaacaccccagagctcaatgagctgaccaatccagaataatcatattaaggggaacatccttgagaaatttagacttaaggtgttttttatacagattaagaaagaagtaatttagaggccaggaaaacagataagttatattttaagggattttggcttatacagcacaatgatagcggaccaagactgttctttgcaatattcttgtgttttttgtatacatcaaggatggctccatctggagtttatatttcttttagatcaacttactgttgtgaactacgacaccccttgtgatatatcactttgctagcttgtggttttgtttctatgctactttagtgattgctgctgataaattttttttgtgctttgttcaatctaaaacatcagcattagcttgtggatgctatattttattgatcccatcaagataaggaactaaaatcagaagaccatttccacaatttgtgttgattatctgttactgttgtagccttaccttgatatcaatttgaataatttatctttgcattggattagggacatttataggttttggataggtttgttcattgttgtgattgggttggatggtgactgggttgaggtggtgagtggtggtgacaggtgtagcagatatgatgcttggtttttggttttaatgggacaatagagaaagacaatggtgttgcgtaagaataagaagaggtgggctgtggtcttggaggaccacaacctcctccccccttccctttccacactttctttttttcaatataatatattttttttcaatttcaaggattgagcatgtgtgtttcatttgtgtttttgttctagcaatgctagtggagggaacttatgggagtaaagttgacatgagagatgagtggaaacatagggtggaaaaaaatcttcatacgatagaggagcccaaaacgttctgatgtccattaactttttactttcaaaaaatgacatagcgtgttttttggcaatattttgaaaacctttgagaaactttgattagctgatggtcgtataccatgctcgtcaaccaatgaatggaagagtaataaacactcccctgtgaatacatcaagaagttgccgtcctgtcttcacaaaaggagtgtagattacagaaaagtgtagtttctctttggagtgtgaatccacctcaatgtgtttagcttgttcatgtttgattggattatttttaatgttgatgacaaccttgttgccataatatgattttacaggtcccttgtgcactaggattttagccaaattaactcaaaccctactggctattggtcatggctcaaaactgacctcctggtgtcaaattggcaaccattaacttctcttttctgtgtcatgttaccaaagttccacctacaaaagaggagtagtgcgatattggcctcctatttgtgactgagccagccaatatatgtttatataggattccacctgttgatgatcatctctggaaaaagaaaccccttttctggtgctaattttaagtcctcagaatcctgtaaacatcttacatatgggtcactcaaggtaaattgatcacactgaaaggggctagcgtatatctggttgagtatgagacaagtgcactagcttccttacaagtcttttttaacgacctccgatcagtggcagtgttttctatggtatcctccaacttatggttttgctatctcagtaggagtttcatctgtttacattgcaacaatcttgtcacttcaagtaggaaaagggccttttcgaatgaagttgccccctgatttgttgcaacttcaatatctaggaactgccctaagttacccaagtctttgattccaaattcctttcctaagtgagactttagtttccctatttcttcaactcttcaccagtagctacaatgctattgacatatgcaatcagttaagtcaatttaccttggtggtgataatgttttgagaataaggtatgatccttttgactgtggtagccaaattctgctataaatattgagaacctttcaaatcaagctctcggtgattacttcagctcgcaaatccgggagaatatccaaatacacctcgtcttttaaatatccagtggaaacatatttttttggactgtaagttggaaacaaaggataccaaaacctagatggaatccatcttggctacatgagaaaaatgtttctctacgaatccctctgccctatgtttcatgagccacatgcagccaacaatctctttgtctgggtaacagtcaactcccaagtgcaaccatgatgaagtgctttgattgtcttcctccattgtctcgatccacttgggatcattcaaatcatcctgtagagtttggggagtaaactgaagttaatctagaggagctgggatgatatggagagtgagagaaaatctgggaaataaaattagagactaattggtgcaagtcctaatcccgttttggaaagaaataggaactgtagaaaatggccaaatacttgaaaggttgggaattgttggacaagcattgactggacattgcatgcaaggaccccagagggcatcctactgatcggttatgtgcagttagtacagcacccctagtattaaactgatgaatccgtagtaaacaagagagatcttataacatgtaaaaggcaacaattcttaccatcagcaaccgcatattatttatgagtataagatagttttatggataatggacaatatcttcatatattctgcccattatcatattggggacttggattctagaatttaactgggtgaggattgtggaccatgttatgatagacttgaaagagagaaaacctcacttttgtttgtaagcacataaattcaaatttttttgagaatagccataaataaatgtcacagggcattgttagacccatataaattaacaggaggaccccacagaccccacacattagaattaactaagagaaagggaactgaattttgatcaatagtaagcattcgagctttgcaacttgacagatatcacagtgaagttaggtacctccaatttaaaggtcaataaaggaaatattttatttaaaagcgagtaagcagggtgtcctgcaatgtcactaccagatctctttgaaggaaatgcaattctttgacttatgcaattgaaaaagtatcattgggtttccattttggaagaggtgttgccttagagttagtgacccgtatatcattgaaagaggtttgggatgcacttaagatagtgggtctgtacctaactgaatgaaaggatgtggaaatagtggatgtcccttgataagacatacaatgttggatctgtctcaattggtcttgatagtttatatgtggaaactttggcggaaatggacgaggagcaacctaagacggtatatcaaccatagtggtatggtgagctcaagttcataccaagactaaagaatcccctctacttccgtatgaaggtttcgcagggagcttcctacatgtctcttgagtatatcatcagattgtctttcacgtgcttttcagcatcattagcaatatgattctcttgagggtgcacacaatagaagctagagtggaatgccagctgtctatcctgtttctgtatagaattgcaactatgttatgtcatgtcacgtcatatgtgggaatggcctgtgatttaaaagtctgaatgtgactgggtttgtcacaatcttttgtctacgccgtactacaagtgtttttgatgatctgttaggacttggaatgtgtatagttatggtatggagacaatgcatgtttagcaaaaattatctgggttctttatttatatatattttgacagtttactaagcgccacatctgacgaaatgtgtattttcaggtgcaacttgcaaatccaaagcagcttggtgatca

SEQ ID NO: 8245 - DNA, 1785 bp, Prunus persica
  Intron number 1 from transcript ppa019930m (locus ppa01993 0m.g) derived from phytozome v7.0 (chr-ID scaffold_4; pos 16594902 to 16596686 reverse strand)
atactgtgtgtgcacttccttatggataatgatactcgtagcagactcatagtcacgggttcaattgctagtagagatttctttatgcagaatatttaatgaccgtttgtttcatgaatgacctgttgtatgtaataataatgcaggctttgtttttcttctagagagaaaaaaagaaaaagaaaaaagaaaggagtgaagttgtaaaaaactatgagttttgaagtatgaaacgtatggggatgaaatctctttcccattgggccgtggaggattcagcatacaacataagatctcaacgtctccgtcgttgaagaaagggacaatatagactcgagtaatgaccttatagtaatggataatgctctaaactactcttatcgataaaagaaaatcggggctatataggcacagctatactatttgttttataaaacaaaatactgtggtaaggccaggcggctatactattttgaaaaatatcagtgagtatagccggctaaaaaaagggacccacttagcattagatgaggtgtcaaaacaagtatagccgctcggctatactatttgttcttaaaaaatatcataataatgacgcgcggctacactcttcaaatattaaatttaaatagtttagctgcgtagcttgctatttataaaaattaaattggaaaaaaaaaaggacctgcttaggcgtacgaatattcccatgaaatattaaatttaaatagtatagccgcgctgctatactatctcttaaaaaaaattaaaaaaggacaaccggtattgccacgcagctatagtatttattatttttttaaaaatttaaaaaggtacctctacctaaggattaggcgcccgaatcttctcttttccctagcgtgatcccaaggcctctttccatccacaaatctatcttcaatctgagagttcaattttttctctcttttttcgagggaattgcatcttgtgttggagtggtcttggtaaccctttgatctatctcgttttctcgagtgctactaaattatgttactgcacacattatttgtcgcagagaattgcatcctgagttggggtggacttggtaattgcttcacttttcaaacaccactttacatggcttcatctgttatgatctctgataccgagccttggaaggtaattgagacagtacctctttgcaatgtgcagtatatatgaaaattttcccatctctgttctaaatgcggataattttcattgcccaggcccatgttgcggacataattttcattgtccagctctatgtggggtttcttattgttcattcatattctttttgatatttgcagttgtggtagtttcaaagacctttacaacagctgaaactatgttgaatgcttgaatccgtaaggaatggatttcatcttctctcgggttagtccactgctagcacttcttcaattatatgaacaggttgaatcatttttggaatagcttagtaattttataattgaatagtttagtactcaagatggtatgatggagtgatggtttattatgtctttgtagttaatcattgattttgttatctgttcaagctctgacctgtttttcaagctattaattctccaaaattttgtctctctttcccagtacttgacttgtattttgaagtcctttcatgtttaagcaggaaaacaacttacagcttcgtactttcttacagtatcaatggctgatacaactgtgaagaatatattataagcttgaaggctgtggtggacaaggggagcaacaaaa

SEQ ID NO: 8246 - DNA, 1161 bp, Prunus persica
  Intron number 3 from transcript ppa004501m (locus ppa00450 1m.g) derived from phytozome v7.0 (chr-ID scaffold_8; pos 10438441 to 10439601)
ttggcttctcctatatttgcatcattagcaaagaggtaacaatcacctattattgcattaggctaccatggaatagcattttttagccaggtgtatgactttgaagctgagatttcaatacatttgaacagaatcatttttttgtttttggtgattagtagtatatatttatcaaaaaagtatgtatagatttttttcttttctggctaagtgactaaggggcataaccaatgtacaaaagatataataaaatgccagagtgtattagtgaagataaaatctacgggaagagaagaataggaatccttcctactccactcaaataaagccgataataatttatagaatccttagataagatcttgttttcactgaacctgggtgttaggttggattctgatcttggtccattgattaggtgcattattatgaatgtacttaggtacaaattctttgtatattaatatttgtaggtacatttggaatattaatgtacatacacatattccaaataatgtaccggatcaaaggatcacaacaaaaattcaatataacaatcaggcttaatgaattatatttttttttttccaaggatgaatatctatttaccccaatattttttcctggagctccgtaacaatttgtcaaaaaatggggcacttcctcgctaatagacacacagtgcagctaggtgtacggacaagagaatgcgatacatattagaatattaactcaaatttgataaataagattttgtatctctagaataaaattggtgaaagattaatactgaatacagttgaatttgaagttaatgcaagtgcagataaaatgccaaataccaatggttccttgatgatcatgaacgtgcaagaaattatttgcagagttatttttggaagaattttacagggaactttggttgtagagaaatgttaaagtttctctaaggtgattactagagaaccttgatagaaatattgcaaatatccctagtgctataaccttagctattactactaaattgttttaaccctttgatgccaggtgactactgcttgttttaagcctttttctctgcgatttctcatctatctattaaattttgtagtgtaagtccgtttaggctcattggagttggattatcagtttggacctttg

SEQ ID NO: 8247 - DNA, 2079 bp, Prunus persica
  Intron number 1 from transcript ppa010857m (locus ppa01085 7m.g) derived from phytozome v7.0 (chr-ID scaffold_4; pos 1566919 to 1568997 reverse strand)
ctttggagaaaggttgaatctctatctctctgcagtttcttctttgatttctcagctccatttcactttttctctttctaattcttaatttattaaaatgcatagaatattaactctgcttctgttaaattcattgttgctctgtttttttttttagtgcaaataaattcctcataatacagttttagttagtatcagacaataattatgcattggattcagaatccatgtgtttggagattattgtcagtttttctttgtttagttttaactaaaattggattgatgtctggtttaagattcgtgcttaaaaagtagctttgttagtagtataccttcatttgccatatgattgtaaattgcgagattaagagatagcattcaggtcattcttgcagagaaggtataccatttgcttccctcaccttcttttccacccgggtatgtttactggaaatatgctctagtatgttaaagtttttgctttctgatttttgttttgctcatgtgttccaattctttaatgctctatctaagccactgcaatctaaatcaaaaagttgacagagttgtatgtttcctttcttttgatcttttgtgccaaaaacactgcattcaagaacgagatacgtcattaaagccttatattttgcgtctggttaattagacggtttctcttttttcgtcacctcttctgaagtaacgtattactatttgtttgttacctaatgcacgtaagcagatgttgttctgttttctcctggtgataagttgaagtagctaaacacctgggttgatgtgtggcgggtggtgatccacttgcttgtctcctttcattcttttcctcctcattaaatgcaatcctcaaatcatggattcttcatatacattcatatttagattttgagactaattcagcatcaatgcatttgatttctaagaaccaaatataacaattaggtgttgggatttcagtttctttcatttactttgatagtgtgtaaaatataaattgcaggaatgcttaggacttctctagtattccatctatattcttagaggtttaatttttccttggtttaatgaaaagaagtccttttattaggaaaagttataatggtggaattttgattcccatgttgaattatgttcgtcacgcaggaggttctttcaagcacttataaatgttttctcttggcatcaatgtgtgagttttttcctttttccattgatcttttgaatgtaaatgttggttgcacaaaaagtagttttgatggtgcttataacaaacgtttttgccaccaacatttcccactatcaagataccaggaagaaaggaaaaaaaaaacttgtgtattaataggagcaaccaatggtgtgaatagtagcagccttgctagtgctccatgtctacaatgaggacatctactaccagtagatacatttttgtttaacgatcctaaggcaaatagaaatggcagattgaaactactatatgtgctgttgcattgcgggtatacattgcactagacctgtcttatgagaggagaattttgtttcaattcatttgtgctgttgtgtgggtggtatccattgtatatctgaaacctgttttatagaagtttgttctgctagaaactaacgattcaaaaacacaacaaggggttgatggtgattaggtaagggtttgatgagtgattgaatcttacctggcgcattgtatgcgtggtattatgacaatgctgtttgcatgatagtgtgatacaaacccattgaacccaaaatgtaggtatgaatagcctatgattataatggataatcatcttgtaagggctgaaatcaaatgcttacttgtagagttcctcctcaagaaaggaggacctagagggcatgggcagggtatttaagtaaataagttcatcttgttaggttaggttaggtcttttggaatagcttttctatgattttatcttccacaaatcatcattagaggtgctgaatctctctctatcaatgattcagttgaaaattcacactgaatttcatggcttgcagattcagacaaggcacgttgaacag

SEQ ID NO: 8248 - DNA, 2052 bp, Prunus persica
  Intron number 3 from transcript ppa012840m (locus ppa01284 0m.g) derived from phytozome v7.0 (chr-ID scaffold_6; pos 27765635 to 27767686 reverse strand)
gcattgatcaagaagctgcgcaaagctgtaagaactcttaatctgtgtgtgctgtcttgtgttttcatttgtttttagcttgaattctgactgtctggacctttttcccttaccgttttgctatttgaataatgggtttatcaacttatcaatcaagaagatgtctattatcaacttatcaatcattttttgctcccggtgactgaaaaagttgatataggaatacatgaatatagattctttgtagtttgggtgtcatagtatatgcctgtgtttcctatctaggaatgtaggatgcagaatgtgtagatgcccgacagaaaattcctcatgtttacttggttttccattatatctgaattcaactatatttgaagtaaataatgttctagaacacattataaaccaattcaatatctgtggtgataattgaaggttggcatatttgttccgtgtgagtaattttttgagttctactaaacgaaccctaaaattaactgagtacaccctaatatttaaatcaaaatgtaaaattaactaagtacatcctatttaactaccaaaaatacccatggtacaccttaatacactctacctcgccaaaaaaaaaaaacccaacaacattcatcgatctccctatgatccccttttctccatactttgattctcaaacatttaaactgtaaaatctggacgatattgttcttttttatatatcctaaatctaactaatgatacaaaaacgttcaacataattctttgatttcattcctcttgatgctaaaacgttcaaattatgattttgcctgtgaaaacttcaaagtcttctttagttctttaatgtttgagtctttaactccaaatggtagagcaaataaacaaagactcaaagaaataattaattaggattgcagacaaggacttcactgtatagatcaatcagccttgtatttatatatgccttcaattttcttcggagaatgctagccattgattgatgtgtgtctcacagcgagtccatccgtcaatggctaacacaaacaagcactgcactgtattgaatcagcccctgcatatttcttttaattccttcaagtaaatttattcttggcaaaacgaaaatttcaacaactgtattgctgaaatacactttgctttgcaaacataagagcagtttttaatatgtcttcatgtaaaattgcattttcaagatctcatgttcagagactgtacattcatcatgaaaatttgtagagagctaagaagaaacaactacattgtgtggtttattatagcaatcagtcaagtctttgcagttctttttttttttcctttttttttctttttttgaaactgctgctcggtattggccaaaagaaaactgctctttattcttccagtttggtattttgtatgttttataatgagtataagagtgattgaaagaagaagaggttctactgagcttggttttgagagatacaagagttcggctgtccaaatgctaaaatggagaagaagagaagtgtagggaaaaatatgcggtgtcatgttttagatggtttttaaagagtgctgctaaacgaatcctaaaattatctgagtacaccctaaaaatatgtggtgttatgtttcacaattgaatatatcctttttagtcatttaatattagggtaaattagtaattcaataaatactttgatagtagggtgtacttagttaattttagggttcgtttagtagcactcaatttttttcatcattttatcttcttttcctatgaataattattgctatttaataaatggggaagggggaaggaacctttcaagtattttatgaaaaattgagttgtcttttgttctttatttgtgggtattttgtgtctggactttcgttggcttggttgatgccaaggaaagtgaatatagcaaatgcatctttgtatttacaaccagtgcttatattcattttgtgatctttgtatttatgttgggtttccggtgatttggaacagaaaagggaggcaccaccaggtgagaaaccggagcc

SEQ ID NO: 8249 - DNA, 637 bp, Prunus persica
  Intron number 4 from transcript ppa008557m (locus ppa00855 7m.g) derived from phytozome v7.0 (chr-ID scaffold_1; pos 12655899 to 12656535 reverse strand)
ctacgcagccaggtagttgcagatttactgtattctcttaattcaaatttattttggaacttaagatttgctcttgatttgtcattcacactgaaactacatgggttcttttttcttcttttttgtggcacggtaatatatgtaaacttgttagcattagatttcttttgccatgttagactttgctttaacattatagattgattgtctataaggggtggttgagcttctttatctgctactcctatattatagaacagctagataggagatgagtgtgatctggcaacccgaatgtgaagataccacagaaaagcatttgtttagaaattctaatatttgtgttgtatggagaaatatgaaatgctgggaatgttggtgttgcagtagactcaatgaggcatgttggcttcttttgaaactacgaatgttaaaataaaatacaatttttttactgaaatggtgtgcatgaggaaaaatgaggagcactataagagtaagtcaaaggacactgcttgaatgtagtatgcatagttccttggacacactctatgcaaacatcctagacatggttagtaccaagctaatttttttattcacaggtttcatcatctacacctttttagtattgattgtg

SEQ ID NO: 8250 - DNA, 1834 bp, Prunus persica
  Intron number 1 from transcript ppa018796m (locus ppa01879 6m.g) derived from phytozome v7.0 (chr-ID scaffold_7; pos 486440 to 488273)
gaaattggttttagtaaggataatttctgttgtgagtaggggtgggcacggtccggtttggaccggttttttcataaaattagaacctgaactgaaaatgaagaccggttcggtccggtccggttttgacaaaaatccacaagtaagcccgaaccaatccgaacctacccggttccggttcggacggttttgggcttgttgtaaaacccattttattttcttgggtatttaagctttaagaccatctgatttttaatatttttgggcttcaacatcacaattggcccaattcccatattgaaacaaccactattctttgtcgaaaataataaaacaatccaatattcaatttaaaattacaatccaacaaaaaaatacacaataaaacaaaataaattacctataaaaaaaattaaattacaatcaaatttaaaattacaactccattcttttgctcttttgttgctgcatctccgaacaccaagtgaacctaccaaatccatgtattgccatcaataatctaaatttgtggaaaataaaaacaaaactccggaaacccagaagtgaaaatggatcaagaaatgcaacagcaaaaaaaaattatcagaaaactagaccattttcatgatcaaagacagccaaatgagttacctgcttgcccattttgataacaacatacactgcttctcaagtctctaacatgttctcagaatacccagaatacccatcatgttctccattggatccagatttatgtttattttttcttcacagattgagacaaccacacgtacataatcagacaaccacaacccaatccaatttgatatatatttgatatactggaacttcaatttgatatagtttcaatctgccttatttcaattcatttcttcttttgacagcataatatcaagataggcatataaaatatttttcatatcactaagtgctaatcaatttgataaaatacaagcagttggcatttggaggttttttggcacatcacagtgacatacctgagagagagagagagagagagagagagagagagagagagagagagagagagagataagatgaagaggtggactgctggatctgcaaactgctggaggacaaaggaagctgcgaactgctggtgctggatctgcaaattgttggaggacagaggaagttacgaattgcaggcagagagagttggtcagagaatcgaagggggaaaaggaaaaaaaagaaaaaaaagatagagaatctaacctgtgtgacgacggcgactgagaaaggtggcgactgagaagagcagcggctgagagaggtgtggttgagagagaggtttggctgagagtgaggtttgcctgagagagaggaggatggctgagagagagcttcggcggcgcgacggctgaaggatgaagaggatggctgagagagaggaaggctgagagagaggtttggcgcagacagaggtttcggcggctgaaggagagaggaaacgaaatgggaggatgaaggaagaaagaaaaccctaatcgcgttataatttttgtgatgaatgtgtgtgcgcgcgcctacggtaacatcatacacaaccaataaaaaagggacacatgttaaaaatatatataatataaaataattatattggaccggttcggattggactggttctgtgtggtggaaaaccgaaattggaatcggtttgaaccggttcggtttggatttgtctcggtttttgacttttttggtcaatacagttttttttggattttttcggttcgatttggttcgattttgcggttttgcggttccaatgcccacccctagttgtgag

SEQ ID NO: 8251 - DNA, 2113 bp, Prunus persica
  Intron number 12 from transcript ppa003985m (locus ppa0039 85m.g) derived from phytozome v7.0 (chr-ID scaffold_4; pos 23066504 to 23068616)
gagagggaaggtaatatttgtcacacaaaggattttatttttccataagatagtatgttattactttagaattaggaagctactgctccctctttggggagaccttggtggctatgatctactgacatggatacgtgtgtcaagtgttgacttggatttgtggtatctgatctgagcaagaaacaaaaatgagatgaggtgtctgaaatggcatatattatatgtgtgtgtattaaatgcattcccagataatggatactattaaatgcaatttgaaacaaattgtttgatgtcaaacccatatgtgatacaacgaatttgatattgaactgattctgtatctagcagcctaaatggcctttaaaattagacttggtcattttggaattagttttatctgggattgtggattttaatttaatacttccttttagtagccaaaaaactattttttaacataagttctccttcattaaaaagattcatgtaggtagaattgaaaagagcattattaaaattttgaagtcccattgttgggtcaaaataagtaaaacaattgctgtaggagtttgatatctcgtgtaaaattcctgcaatcatgacaattgactagactaagtaacactaaagtgcaattatagctttcaaaatctacatggtaatcataatatattgaagaaaattatctatttagataatagtaaatatgtcaaagttcaaatccctcttttatttatttattatttatgtttgaataatgaaatgtatatgtggattttattaacatatcgaattaatatttttttttctaaagttaaattaaacaatttacactaaaagctccgatccaattcacttcattcagatttacattacacctaagctgcttgacttagtagttaatatagttaggctgtttttagccaaaatttagacagcctcgtattcatcaaaataagaagagaatacaatgttaatttcaagaattggctggttaacttatgcaaagcagcacgtgtttattctgtttatatttctaattttcagtctatttgaggcatataagaattatcggtggcattaatgcacttttattttacattttaatgcattatatgattggacatgaccatgacagcctacttttctctttgtcttctattttattctatcactgcaaataacaaccacttcaaaaagatattgaatattaagaacgttggtcttctcaaatgcaacattttgatgtagcaggaatagatacttcctaaggtttttccaattcgactagaattttgctattttctttttacgaaattctatgtttcctttagcctaaggatttttcgcttatttatgccccttttttctcaaaaaaggatgtttagcgtatttaaatggtgttctaaagatagatttgtttcttttctgctaccattattcttggtattttattggtgaatcaacaaggttggtaccatagttttgacctcactttattccttgaggacgtccaaaaggggagagcccattatcttccatatataatggccatcctcaccctctcatcggaactctcttggattcactctctcaaaagtctctcatgcctcaatgtaaatataacactcattacatagtgaaaactgacatggatgtagcacgaattcggtgagccatgataaatctcgtgtgttcttggtgtgattatgtgattcacggtttttaagttctattcacagtattttcatgggaaaatcaacaggttccaaggaagattgtggattgttatatcttttttattgtagttatatgcttccctgtattatccttctattctttgcccccgtgtgtggtattttcccctcaaacttttctccagtttgtacatacacaacaaaatatacttgcattcataaagtttcattcttatacgtgtgtgtgtggattgagcttgtacaaagcctgtgtaatactgtgcgtgcattcatgtggcatttttatggtatgccagacattaaaagttcatattacattttttctgggaaggttgaagtgacaatgttctattttcgcagggaaaggttgaagtgaccatttctggtggaagggt

SEQ ID NO: 8252 - DNA, 1561 bp, Prunus persica
  Intron number 1 from transcript ppa008942m (locus ppa00894 2m.g) derived from phytozome v7.0 (chr-ID scaffold_3; pos 4029612 to 4031172)
agtggaagaagggtgactacaagttgaccaccaaggttgtgtcttttctctgtttttggacttaatttgcattggttatgcttcttttttttttcatctacttaccgtagagttggtttgtttttctttttttcttttggtctcaagtaatattgattatggtttttgtgatttgtgtctaggtttaaagtgaaattttgaaattgtgttttgttatttgttgcttttggtggaatacccagtttgagtttatggtaaaaatttaccccaaaaaaagaaaacccaattgtttgaaagaaataagaaacgtgatactggtatcgaccagttgaattgatgataaagctttgttgttaagcacaagatgtgaagtcctggatttgatgttctttactgagtttagaatttaaaggcatgaaatagtagtgcttctgcagattagcagtcagtttaagtacaggctgaaagatgtcttcaagtgctgttgtctgtactgaaagcaactcttgtactgatgtatttaggatgacatcaacccatacccgttaaagggaaagagggtgagatggtattcagtattgattgtttgtttctgattcttttttgaataggttcttctgtagatgtaatgaggaaagcttgcggccgttgttgattgtttgtttctcattattgtgtgtttatgcgtatctgtgaaccctttgtggttatggagtgttcatcgcattctatttctttggttgaaaaatgcttgcttactagctgctttgctcttcgggcttggtgtatttttcgtattgtttccaattttacagtaatgcatttgaaaatttagtaacaaaattcacgtccattctgtacaatactttcaaactaacacggttattttttatctgttttgtgtgcaaatgtcaatgcctgttgaattacgcatttttcgatttattgttttcctgtgtgtggttcttttgtcatctcattggcaatatcgtggactttgctatttctcaatattctgtgtaattgcttttgctcctctgtctttcacgtataaactgcttccctgtaggtttcaaagagttttgccacttttgtataagctgcttatgtgctatgcacatgatagcataagatatgaagtcctttcatgaaatcaagattctcaagatgttttgttattatggtagttcgaatgtaataattttgtgacatgttgatatttttgggttctttaccgcttttaattatgtctaccattttaaagttggagacagatgtagctctaatttgaaatgtcgagtttatcaattgatagaacaagtagttttttttatatacttatttataggaatgtagaacaaatagcttttttcccctttctctttccctttcttgggtcctgaaatagagttagtagtgaattagtaactacgagctagggaaaaatctgcctaaaacatttctttcttgatttcaacttccattcatatagtatctttgttttaatagttgtcctttctttacagttcactggaaaaacagttggcatcatcggtctggg

SEQ ID NO: 8253 - DNA, 1245 bp, Prunus persica
  Intron number 17 from transcript ppa022714m (locus ppa0227 14m.g) derived from phytozome v7.0 (chr-ID scaffold_3; pos 10392433 to 10393677 reverse strand)
caggaggtttgttcttttaactcgggattttgctaatagttaaacttgttatgcttgtctttttgcaatgctataccattaagctctttctgccagctacgatgtctgaaaatggcagtagtatgatgagtataagagatgaccatcttaatcaataacagtaaaagatgactctgttttacagcttgaataccaaacagtttgagtctataagatgtttgtatttaacttgtctcagtctaaaactgatctaaatcgttcaaatttaaaattacatgtaaatatgtagccctgatattcctgaggttgtttagttgaacctcaatgagattattttgtcattaaccctctcctagcccagtggtgtcaggttcaaacctccatggcaccttggtagtttgtgtgtgagaaatcccccttcccttgtagtttagactatcgctcgtttttaatacattgttggctaatggcaccatctatacatttgcttggtccttccactttgcttgtgtcacttttggcatgaaatgcattcctcaccatgtattcattgagtttcatcatacatggccaaatccttctaatcggctttatctaatatcattcatagatgggacatctttaccttcagagcagtttcctttccacttttccctgtaatcatctatcttgatagttctaaactacattcctttttctcccctttgatatgccgggaacggtatatggaaccctgcaataattactgaagttccattcacagggttgaactagcaagttgagggatctgtttgtgattgtacatatctgatgtaatttagaacagatttgttcatatctgcatacttgcatcttctgtacactttgtggttgcttgcagcccttgaagtctctggtggtctacctttgtcttttagtaccaccagtaaattccagatggaatttgacatggtgttcagttaaatgtgaatgtaatgactatatatatggctatgtcttcaaaatttgaatattcaatgataacataatctatcagtcagaaaatcctgattaccattcaatgttcccttctctcaataggatgctgtcatttgtcttttagctaatctaagtgctgtgagagagtttctgaccttattgaaaacaaaaatggtagtccatgctattctaattattttaatttcagacttttgctatactgacctgatccaaccatgaacacagggtagccttgcattatcatca

SEQ ID NO: 8254 - DNA, 543 bp, Prunus persica
  Intron number 5 from transcript ppa000733m (locus ppa00073 3m.g) derived from phytozome v7.0 (chr-ID scaffold_5; pos 17589234 to 17589776 reverse strand)
ctctaataggttagttttctatgaatgtttcttattcaaattttgaagctgtatattgctgacttgggaagttcattacatattattcttttgatattgaagaaagagcatggtaattcccgttgaggagatatgcaagttgagttactttctgaatagacattgaatattctgtaatatagatggctaaatgtttcggtgttagattgaagttttattgttgcaccaccaaggattatatacttcacttgatagttcatgctctattcttttttctgacacaagttttctgagatggaaaagtttatgtttggtagatttaaaaaatttactttgtagaacattattttctatattatattttgcttatggcttcaactcaacacaaacactggaaaagtcttcttgtctttcctcctggaaaatcttataaaattaatccattctttgcattcttagtttccctcgattagaatctggttttattctggcagcattttctgagcctcattaatggtaatgataatttttcgtactgtacag

SEQ ID NO: 8255 - DNA, 4200 bp, Prunus persica
  Intron number 6 from transcript ppa008899m (locus ppa00889 9m.g) derived from phytozome v7.0 (chr-ID scaffold_6; pos 23363074 to 23367273)
aggacttgtttcccaagttttctgaaattgagcaggtaagttttttacaggaattgatcctctattctccttgcaatcagtaccttgatgtctttgtatggtcagttgtgccatagcaccattaaatacattccaacattattccatgtatggttcttcaaatgtgcctttctggagccggggattacgtcttgagatttcatcttgttgataatgttgatacaagcactgatgtcatgcagtcttttctcctaactacattgatttccaattgtgcaggcaaggctgatcagagggggctcgtatgttcatgatacttttggtccctacaggagcatagaggagttctgggatggtgaaatctagaaaatcacatgaatgtttttgtgaaagagagtctaggagcatttgttacgcgaaaaaaatgaacttttatgatttgtatggatcgtttatgtcctaaaaaacgatttgcttgattatggtatttgcacttctccgtgttttgtttacatgaagaatacgaccaccacttactactatacccataaatctttgtttgaaattgttgttctggttggcaaagagattgcaaaatcatggtcatgcaattttgttacaacaagtcagaaataatcttagcctctcacattctttcaaaattagtaaaatacgaaacgggaaaaatgcgaataaaatatgcagtgttttatttgacaaattttttgcaagttacaactgaaaagttcagccactatataatattttaatatatattatttttattcaataatatgtgaaaattatgtgtataatacatgaatgttgcctgtattattgacaattttgtaaaaaaacacatgtattaaacatgaaaaatatacacgtatcgtacgtttgtttttaaaaaaacatgtatgttactgagtctttaagatgtgtatggaaaatggaagtattattaaaaaatatgtatgtacgtgtataatataagtattaaacaagaaaaatgaaaaaaattctttatgcgggtaataactctggaaaactaaaaaagcaaaagggaataatggagactctgatctaatagtaatggataacgctcaaaactattcttatccataaatgaaaatatggaaattttaaaataaatataaatataaatataaataaacacgaaggaccccagtatagttaaatagtatattaggccattacttgagtctttattggccccttttaaaagaaatagtatagccgagcggctatactcggttttgtactttttttaaaataaaagaaattgtatggccaagcggctatactccattttttctaatattttttaaagaaatagtatagccgtttggctatagtcggttttttccaatttttttagaagaaatagtattaccgcatggctatcctatgtttaaaaaaaaaaaaattaaaataaacagtatagccgtgctactattctcggtttctttcctaatttttcaaaaataaatagtacagccgagcgcctagactttttttttataagttttaaaaaaatcgtatagccgttcagctatactcggtttttctattttttataaaagaaatagtatagccgagcggctatactcggtttattccaattttttaaaagatatagtctagccgtgcggctatacaagggtttttaaaaattgttttttgaataaatactatagtcaaacggctacacggggttttcccaagtttttgaaaagtatagccgaacggcgattctgggtttttttttttttttcaaaaagaaatagtatggccgcccggctagactcggtttgttcaattttttaaaataaatagtatacctgggtttttccccctttaggagtatagccgatcggctagcgcgcaggcggccgatttcttttggatcatttttcggttgaagagcgccaataacatttttcattgctctgtctacttcttcaccgtcgctctgagagattgataatggcggacgatattggttcgtttgagttaaacaccggagcgaggatcccttcgttagggttagggacctggcaatcaagccctggcctcgtcggcgacgccgtcgccaccgctgtcaaggtcttcgtcgttgatcactcccagctttgaattttttgtaatctttaccgttgatttggtagacttagcatctaacactcagctgaaaaatggggttctactaattgcaggcaggatatcgccatattgattgtgctcaacgctatggcaatgagaaggaggtaattgcagttgccttttgctaaattattaaataaatttgaagttttaatatcatttcccttcattacagttgaagttttaattttgcttttacccttttattttacaatacttgtttggaaaaaaataataaaaatttgtgtttggctcatttgttttaagatgctgagtagttactacgatttaaatgtgacaaagatttggtttttatttcttgtagattggtttggttctgaagaagctgtttgaagacggtgtggtgaatcgcgaggatttgtggatcacatccaaactctggtttgtttcaatttcaatgccaatttcattgaggcagtacaatgagttataattgatcatgccgaagtgatggtgccgtgagccttgttctattatgctttggccttaaatatcttagccttagagtcttttacattttgtactttctaaaagcaagctggttcgcaggtgtaccgatcatgcgccagaagatgtgttagaggcattggacaggactctgcgagacttgcagcttgattatgttgacttgtatcttgtaagtattacctgttcaaagctcattctccagttatgcttgttagaatttggtgcaagagagtatgaaataccagacctttcaaaggggatcattataaatatagtgattgcctagttgaaggtgaaatctgcacttttttttagaagttcactaaaatagagtcctttagaagactggaattacattctttttgccatctttgtgcttgttgataggaattacttacaaaattcccgatccctttcagtctggccatgttgcctacatctagctattaaggtccgaattgtggataattagcattatcgtcttgaatttgttaataccattatattggggttattactcggctataagtaatgaccaattgaaatattgaagatacattggccagttcggttgaagaaggggtcagtaagttttgctcctgaaaaccttgttgaaccagatatcccttgcacttggagagccatggaaactctctatgattcgggtaaggctcgagctattggtgtgagcaatttttcaacaaagaagctctctgacttgctggatgtggcacgtgttcctcctgctgttgtccaagtggagtgtcatccttcatggcagcaagccaagctgcattctttctgcaaatccaagggaattcacgtttcggtgagtatgcacatattgaattacatttcctatgtcgattttcttatttggttgaaatagttacctgtgtataactgggcaagaagtttctttccttagcagctgagatatctagaaattaaataattgctatgtatttttcttttagggctattcaccactgggttctcctggcacaacatggatcaaaggtgatgtccttcagaatccgattcttcacatggtcgcagagaaactaaggaaaacccctgcacaagttgctcttcgatggggactgcaaatgggtcatagtgctcttcctaagagtactaatgaagcaaggatcaaggagaactctgacgtctttggctggtctatcccggaggacttgttagctaagctttcggaaattgagcaggcaagtggttactgatgttcctgtattccccttgccaagatcttattattgtcagctgtcaaaatcttgaaacacattccaccattattacatgtgaatgctgctaaaactttctagaatcacttagaggtgttcttccttgggatgaatcttcaagctggagttctcttttggggggttggtttgggattaggtccagggattttgttacaagaacttgtcttttttgtgtttactcctaacctactgcgttggttttcaactgtgcaggcaagactggtcagagggacgaactttgttc

SEQ ID NO: 8256 - DNA, 674 bp, Prunus persica
  Intron number 1 from transcript ppa006357m (locus ppa00635 7m.g) derived from phytozome v7.0 (chr-ID scaffold_8; pos 16024747 to 16025420 reverse strand)
ggcatgtaagtgccccactgcctatgcgatttgggtttttcaagttattgtgttttgagttttttttcttttccatcttgttcctttagagtgtgaattcttcatatattaagatttcaaattccaaatctttaagaactgggatttgcaaatcatctcaaagtaataggatttacattttgtaaatgagctatgctattgtaaagtgtgccttcttcttgttattgtagcttgatggtttgccctcttgagacttgttgtatgttttaaaactttgttgaaactgtcaactggcaaggtctgttggtggaggtacctcgtattggttaaggttttcatgtgaggtccaacactgattcatgctcactctgaccctcttgttctcctatgctgacttaacacctacatgttccaggtgaaaaggaaaaaaagaaactttaatttttcttctcatttctgggcctacccaaatttccttgtctgttttatcgaatgaataaaatgttccatagtaagaatatgtggctacatattagatgggtgttgtttaaagaagatgtagtgtactaattttatattgtatttctgaaagttccatgttggctggtgattttgatactaattttttgtttaaaatgttatgaattttatcctgcagcctgtagtctttcttc

SEQ ID NO: 8257 - DNA, 877 bp, Prunus persica
  Intron number 11 from transcript ppa016685m (locus ppa0166 85m.g) derived from phytozome v7.0 (chr-ID scaffold_1; pos 25412176 to 25413052 reverse strand)
agggcaggcaagttcagaactccggttacttataaatattttccttgttttaaagcaaatgttcatcaatttcataatttttccagttcttgatatttccactggtttattcacaagtagggagtatcaaattttgaatcgattatgtatatgcagtctttgcactgtcttgcatcaactaatatatgtggatgattgtggtgtaacttctaagaaagtgtattgaacaatactttgccaaggatctccttatccactggttaagggttactagattttaagtgcacatatgttggggtgcacaggacaaattatttttctattacctattggatttgaagtgacatttttgttgtgtgtaattctcaatgggtttagctgattttttttataattaaaaagatcattgctgtatgcataagatctttatttgttaagttttttaatgcaatctcatgtgaatacaacttctttcaaatgcttttaggaaatctcacataccataatttttttctccctttacctagatgtgtgctgtttccgtcgtgtttagaagtttattcatttctaatttgattatttcttttacttcctagaaaactgatttgatattaaaggctagtgcaatattctgattttgttaaccgagggatttctcaaatatgcttatccatcttgtgcagtgatcacgtgacacgtcatcagaagagatatgatagtagttctttacatggtatgcatattttgctatctatatcattagttcacatcccttcttgtttaacttgaatgtttctatttcgtagcctaaaatctttgtaactttctttttttggtagcagagactgcatataaggggcgattcaaattcacagtg

SEQ ID NO: 8258 - DNA, 764 bp, Prunus persica
  Intron number 1 from transcript ppa004229m (locus ppa00422 9m.g) derived from phytozome v7.0 (chr-ID scaffold_8; pos 882621 to 883384 reverse strand)
ggctttgattctctttcgatactgggttttgacaggtacgcctttttcctgagatcctgaccccaagtcttcgagatttacttatcttcttcgttttgatccttttgtcaactggggttttaaggtttctttgtgggtctctcgtgtttatggcataggaccattatttgtggcaaattcaaattttgattttgatttgtaggtactgatattattttgggctttgcttatttgtttcaaaattttgtgagtttcttgtatgtagttgatgttaagggttggtgttaatgatactttgttgacgatccgattgctaattcttctaattttggttgtgtattctgatggggcttttgttgatgagcagatattggaatttgattagaccccttttgcttgcagtttgtattttggatacttctggataaactttctagtggaaattccagttacgcgcaattatgattattgttcattcccttatatttgttttctgaattctcatagaatgagtgctatatgtttggattgggattctcataagttttatcttgatgggttaatgaaaataatttatatagttattggaattaaataaaattactgatattcagctaattagtgattggtgccttatgattttctgtttcttgcgtttaattagctctcgtacaatcacaaatgtcaggactgtacataattgaacttttgtttggcttatgatcttaggaaattttgaggataaaggacttgagtgaaggggg

SEQ ID NO: 8259 - DNA, 1043 bp, Prunus persica
  Intron number 2 from transcript ppa014947m (locus ppa01494 7m.g) derived from phytozome v7.0 (chr-ID scaffold_1; pos 391819 to 392861 reverse strand)
ctgcacttgaccgacattcaattccaagagtaaaggtctgggttatgaatttactatgtgttatgctatttggtgattaattacattctcagttattttttatcaaatattttttccatacagtcatcatgattgtgtaacctcattgctatatctctctaatcattttttataggcaaagttcctctgtgattttttattttttattttttattttctgttaagctcccatcctggtaattattttttcctgagcttaaaacctttaaagatgatggtttagaagttatggtgacaggggatggattaatgatggtttcctttttcgtagatggctatattttaggcatttggtgattatgtgttgattttttcagaggtagacatgcttttatgtatcgttaggattgcagtttaaataggattaatttgtgtttgagaaaggatcctttgatctatatatttttttccagtaacactcctctctctctctctctctctctctctctctctctctctctctctctctctcttattctttgccagtaacactcatctctttttcattattaattttgacatgttaatagtacagttatattttatagttataatagtccaaagtatttgcaattatgatactgtatctttgcacttttggtcatcatactaagcaaagtatgaatcttttcgtttctgtctcaacattatccattcagagcagtcttccattgtgtattgacaagcagcgcaggtttacttgttggaagaggagatagtttaatattcaaaataaaaataaaaatcttgatcaagtatttcttttttaaaatcttcctgcaatctgcctttttttttttttatcttctgttactcatttggttcttgaacattgaaatccatccacactttcttcctcctttttatattttgaaatgccccattagttatttgctggcaggcaaacagctagaactgactgattttaatccctttgtttgcattcaggaacaagctgcctcagcaatactacacttgataaa

SEQ ID NO: 8260 - DNA, 4284 bp, Prunus persica
  Intron number 4 from transcript ppa013503m (locus ppa01350 3m.g) derived from phytozome v7.0 (chr-ID scaffold_2; pos 9201649 to 9205932 reverse strand)
atcagcagaacaacatcgtcggcaacaatacagaggtttggtttttttcttcacttaacttggattattattaattttttttggcaaagcttcactcggattttggtcatcctggtagatgagttttgtattttattttttaaacgtaattttacttttcttctttatgcaattacagtttttttatagatctttttgtactccgtagaaaaaagtttcttggtacacataggagtgtgcccctaggggggctggttattatttagttgtagttcagcttgcagatggagttagaacgaggttacatagtagctgaggtagagcaaataatccagccatactttttatatgctaactatctttgtatctatcagctttttctatgataagaggatattatctctttgcaagatttgcctcatgtatgggcttcaaaattaactttcaatgaaaaaattaaaagattagttagtgatgcagggcagaggctataagctgctgtccagcgacccaaacataccaaaaatacagagaatagaaggattagcagtagaatcgaagttggaacgaagataattgagttctagggcaaaatcccaatagaaactctatagactaatgtctgaaattatattcatcaacaaaaactaaatacaagagtcccttaatagcctatttatactagaatatagaaaacctaattgacataggaaattaaaccaaatcctagtaagaataggaaaacaagtaaagtaactaataatttaaagtaaatagaacccttgcccaattgagtcacaggcctaagtaatcttagagagctttgttgatgctcctgcatcaaactccccaggttggaagagactcgtcctcgagtctaagctgttatcaactaagactccatgagaaacttgaaactgagttcgtcctttccacacagagctattttggatatactccatgagaagcttgaaactgaattcttcctttccaaacaaagagatattttgaatatcgaaccactcttgaatacttatgtttattttcttgcatcaattccaccggattgggaagaattcgtcctcgaattccaaccttttgctgaaaactgtccaagcacaatttccacttgcacaaagtgtctatagaactttggccttgaaattgaaccttcccactccaaagaaatagatacttagaatatttgatctttttggaccaattccagttatctttagtaaacaatcttgcagcccaaaaaacctttaatccaaaagatagtagattgactagatcaatgaagctcttggcaatctgcaaattaaaagcatcaaccccaagaaaatcaacatactcagaattatcagtttctaaaccatccacttggtctaaaaattttagtgtttctttatcatcttcaaagatgccttcaagagccccttgcttcaacaaattttcagatgatactctctttactctcactaaatactttaacaaaaaatttctccaccccaaaacaaatttcacaatcgtcttctagggaactaacagaagaattagagcgaaccgctccttccaatccgcctctatcaccatcatcatggtttccagcttcgtaaaagggttttaccttttcttcaaagtcatccttacgaccacgtatgtctaagggtttgcggttgcattccggaatctccatataggcatccgtgcattcctgttgttggagggcttgcaccactctcgacaactcttccatcatacaccacacctcagccatctctatttgttgggcttggttccctcgtccataacctcgagcacgtccgaccatggtgtgaaacaaggattaacctggctctgatgccaatttgatggagggcagcagctataagctgctgtccagcgacccaaacatacccataatacagagaatagaaggataaagcagtagaatcgaagttggtacgaagataattgagttctagggaaaaatcccaatagaaactctatagactaatgtctgaaattatattcctcaacaaaaactaaatacaagagtcccttaatagcctattatactagaatatataaaacctaattgacataggaaattaaaaacctaaacaggaaattaaaccaaatcctggtaagaatgggaaaacaagtaaagtaattaataatttaaagtaaatagaacctagcccaattgagtcacaggcctaagtaatcttagagagctttgtagatgctcctgcatcagttaggtgtgaaagacgcataaatgcaaagacacattaaacagtaacagatacttataaaaactaaaaagatacagtaattctaaaacaaatgaactgtgatgcaagagcatctacaaggattttccaagactaagcaggcttgctatccagcttggcttgggtcgtagctagttagtattttaattgttttcttatcttatgtttgttttgtttaatttcttatgtgctatgttttttccgtacaatattgctttgcttctattcttttaaagtattcatgtgagttttaagtattttgagggatagccatttaagtaaatcaagggctaggattctaggactagtgtatcccaagtataaatactgtttgaagaggctttacatgaagttttgtttatcagtttattccagaaaatcagattatcgagtttctcttggactctttgccctagaactcaattgtcttcattccaacttcggtactattgctttatctgtcaatttttctgttcattgttttgaatcatttgtaatgttacagcgattggacatcagctttacacttctgccctgcatgttaattagaatgaataaaccatgcataaatccatagtttgtttaaacattggattacaatttagataagtgtccatctacaaaaatgaagagctcctatgaggttcaaacaatgaggaacaaccatctagattcatacaatagtcataccaaatcatgtaacccaagcagtttgtaagccacgtttgaacatggtgcacataggtctctcttgagctccctattgtcctcccatatatgggatagttaggattaaccaactagtaggtccataatcttttttatcatcttgagctccataactagttccactataatcagacatgacataaccatagccatcataagattcacttgagttagtactaggtctagttcatatgctcatagatccaaaactgattgccatgtcctcttcagatggattggaggtatgtgggcagtggattgtgcatagattcttcatattaataaattatagggttctggacaaggattagctatttttgggtttcaatttgcttcaattgtcttcaaaacttctaaattttttttgggttctgttatgggtatctagaaatatcggggatatatcgtcgatacaggggaagatatggccttaccccccaatattggtgtcgacagttgaaaataccgatatattggcagatatatcggtgtatcggccgatatatcggtgtatcggccgatatttcaatccttggttgagtctgattggagggactgatctaagcatgtttccctctgctatgtttgtcgtacaatgctcttctaaagtgggtgttcaagtgtaattggctctcagccctcttatattacttgaatagcttatgctaatagtgtgcattgcattatgtttaaagaagcattatatttgctaattaattagtttctgtccatactagatatagatgagagagattgtggtacacttttaggttgtgattcttgcatgaagtggggagtagattcaaagtagtcgtgaggctatcagtaggtatttctaattctgttttatgttaagatgttacaaagctatcttttgaaggtgtcgaacccttacctaacacttgcactgataagagatgaaaatggtttaaggtaatctcatattaaactaagtttgattaatatacgtttatttataatgagcctgatgcctagtgtttatatattttgtccaaatttagtttaattgcccctctttgcactctttaactttgccaaagtagaggctgctaactaataactttgccagtcaccagaagctgtttcagaagtaaatgttttattttattttatttatatccatggaaaagcttgctcggacactatttgtggttgtgtggttttagttccttggtcttaacataacatggccatcgttttttattttttatataattgttttctgtttaaatag

SEQ ID NO: 8261 - DNA, 3078 bp, Prunus persica
  Intron number 11 from transcript ppa001667m (locus ppa0016 67m.g) derived from phytozome v7.0 (chr-ID scaffold_6; pos 26978951 to 26982028)
ggtcactctcctctatcaagttgttgaattgtgaggtcaattgaacattgctcatctcaagcactgcaagagcccttacatccattttgtacagtttgtgccagaatttgaattccaccttatttggagagagtttctaagcttcctgttgtgggttgctttacatgctttctagcttggcgcacacacacgaggccaagttccacgaatttatcttaaactgagtaaaatttgtgatttttaacacgtcctagcttagctatataaattttttgctagaggagtttgtgccatcaaatatcccatgtctttgatctttggccaggggggcttttttctttgtttggtcaatgctatgagaggtttgactttgactcctatttgggctacggaaaaggagatatctgggttggtcttgactctcctatttgggctataatagtgttatgtctagttgggatttgactatgtcaaatgtgctgtttctttgcaattgggtttgaaatggaggtgtttcggataaaaaggcccatttcttctttttgggtagaagaaacactacttctttaaatattggtctacgtggaaatcgttcgctgaatcactagtgacaggaaactgaaacagtaattggcggactttctataatcgaaccaaaaaaaaaaaaaagggaaagtattgttagacgtgtggtgtggatatgcaaacgtataaaaaagccaagattcgtctaaggaaaattttgagtgctctctggtgcttcatcttcatgtatttcttactttaagaagtaaatttctgcaatcccgaatatgccccttcaaattgcatacactaagcagaaattttttttttggggtcaatacactaagcagaatataagatggtgtttgttgggatctatattgttgatgtatattttataagtacattagttgtggatataatttcccttcaactaattaaagtatctgatagtgaatagttaaaggataaacgttaattgaacaaacaaaactttgcttttatgaaatcattcaacctttcgaaatctcaaagcaaacttttttttttttgggtaagaaaagcaaaatttggcatttcaccaaaacttataaaataaataaataaaaaaataaaataaaaaaatagaaagaaatggaaacttggctccaaggacggaaccacaaccacgactaaggtggactgtggcccaggtagcttttgaaggaaaaacctatatctatattggccaacaataagaagtctgcttccttttggggagtttttgttagcgaaatcctagtttaattatgagatttattttatagtctattaagaatttttttttttttgtacagatattgtgttattatgattttatcatattttcttgtataatcctactaaggttacaaccttatgtcatatatacctccttttggatatataaatatatttaaaaatattctatctatattgtttgactgtttttaaagaaaaaaaatatatatggcccatcatatgtgattcttgaaggcttttttaattttgttttctgttattttaaaccaatgactggcatccacgtgtagatcataaacgtgtaaactacagttttgattttttgcttcctttttttgtttaaaaaaaattattagattttaaactaaaaattttagttaaatcactcattaaaaaaattccagattccaccttgctttagctccgtaacctgaattctgatgtacaatttaccccaaaaaagtgatgatgcatcagcggtttggtcacctgttataaatagagggtaaacttatatatactcgtttattgcttaactttttgtcagtgttcaatagatcaataaaatttgcagctaattctctctctctctctctctctctctctctcttgtgattctatgaagatttagctttcatccatggctaccaagaattccgttctccaaataattgtcaccttacttgcgatttttttacctgtcggaaagtcaattaaattcaactatcctgcagttttcaactttggtgattcaaactcagacacaggtgagatgactgctgggcgtggctggcaacttccactgccttatggacaaacctacttcaaacctccatcatcatctgggaggttttctgatggtcgtctgctcatagattttctcagtaagttcattctcatcctcactcatcacatgccctatcggaaatcaatattaaatcgtgaatgaatgcaaacatgtgtgcaataaaattttaaaatatgcacttatttctaagtacttaaatattaaaatactaaaccatgcatatagagagctcatattttgtagttttattttcaaatcattaaactatatagagagctcatattttgtagtttggaaaaatatatatatataagcgggcttttgcagagacgagtaatagtaattagataagatagtgtgttcaactatttattctcgaatttgatctccgtcttcatatattaaagtaatttagaatatcactttatcaaaaaaaatataaatgaaatcctaaaattcgcatcacaagtaaattagaaatccttgtttgctctatggtgcttcatgttttagcttaaataacaccgtcgattttttctacaattcctatgatgggattaaaataatattcaacacaatggatactaccgctatcttggtcttatgtacttgttagggtttctacttttgtagttgtaaatttacttttggctaaacttgggtattgagcgtgttcaacaatcgaagggtaaaacagtaattgaacaaataaactttgctttttggcttcattgagcctttccaagactcaaagcaaactttcaccgtgtcctcatataagaacttccaaacttggcaccatgtgacacatgatattcggtggttgctacataacgcatccgtgaagattaagctttcatatccatggctaccaagaattccatcctccaaattttctccttactttccatttttctacctatttcaaagtcaaagttctactaccctgccgttttcaacttcgg

SEQ ID NO: 8262 - DNA, 999 bp, Prunus persica
  Intron number 7 from transcript ppa001568m (locus ppa00156 8m.g) derived from phytozome v7.0 (chr-ID scaffold_7; pos 12190196 to 12191194)
tggttgtacaacaggtaaattttgtgatcaaactgtctattagaatcttttgatccaccttaagttgaaattgttgaagaatgtaaaaacattagaaacttgacaaaataaaatacaatatttaagtgagtggttccactactaataacacagaggtcttttgtgataaaaacccacacctgctgggctttgcaggtggttaagttgggaacaaaatcggtgttggtagtagtgggccgctggtccctttccctgaaatcttaacagaaatgtcaaccaattggccacaggctatgtagcatggatatgttatccgagggtctttaattcatattgtactgatacatctcagatactccaagatatcttggaccttttccattttgtttttcttgataagtattttagtgtctattttattggtatttgaattaaggatgcttgcatgactaaattacttgaggaacatgcatgggtacgaatttaaattgatgaagagacaaattacatgagtgtagactgtcaatcctaaaaaatcctgctttatattatttcccattggttatcttcatgtttatgcttcttgtatacttggggttggcctccttgtcaatatatatttttttactcacacttctcaactatcagcgtaaataaataaaaggggcctatagctcttggattgatggatttgaaaagatttttcttgctaattttggatctcattgttgggttattggagttaactcctgtaaaatatggggggattgatgtttgtgacagagaattttggtggttttatgagtaaatcatggcttcgtgtgatcactacagtttcagtgcatttatgtgtacaccttggcttcatgcggtcactttacaccttggcttcatgcggtcacttttcacatttactcaggtgtatacttattctatgcaaatgatgtttgtatatactttgcagggttctttgccaatttattcaagcaaggttgctgt

SEQ ID NO: 8263 - DNA, 2852 bp, Prunus persica
  Intron number 1 from transcript ppa009929m (locus ppa00992 9m.g) derived from phytozome v7.0 (chr-ID scaffold_5; pos 2462506 to 2465357 reverse strand)
tttggcgttgtcagtctgctctcagagaagacaaggtatgcttgtagtcaattgattcatcatgttaatttcctttttcattatcttttatggcatgctgtgtaactatctgtttgattcttgggaaagttataggatacagaaagagataaaattatggactgttagatctttagtacttgagaccagtgttttaccttaaggcctaaaacgaggcgtttgatccagagccttgtattgaaaggcgcggctattaaatcactgcttgagactgatgaagtaaatgtttcagtcaattgagagcattacattttctatttactcaagtgaaagttttcactgcaccaaacacaaattaacagaaatgacacacatccaaaaactatttttttttctgtttttttttgtttgtttttgtttcaggttggaggcatttgtatctgtgtttcctctgtttctttagcagtgttaagattttaattgattgtaattatagaaacttactaagcaaaactgttgaaataatagtacttgcacatgtagatggctgtgtcacctggtgtgtattaggtgggaataataatttacaattagatattccagaatccagtgcaagtgaatagggcatggggtggtttacattgagttcggcctaagcttccttcaggcattctccatctgcatcatctgtttgttgtctctaggttgttttcatttagtggttttattatcgtgttgatattggtttgacattatttctcatgattattaccggtttctagtgaatctgtatactgaaactaagaagataacaaattaataatttcctcatttaggacatctgtaaaacttggggtttcgctctgttctgggcaactcaacaatttggcttgttgtgcacagtgtttggtattagtcaacccagtttttaagagtcaatgaaatggcaatttgttattttatttctgttctgtgatagcctaaaatattgtatgtccgcacagtttgtaatgtgactggaagcaaatggatgtcagcaagaccctcctttcaaacagcacaccctctccccttcaccacttcccttcctcccctaaaacctttgaaccctgcagtagatttcccttaattccttagcccaagaaatatctggtagggcccctatatttatggaacctaggcactaaacaagtcagctgagaggtatacatttatgtcctactcaagtcagctctagtcatgcaggagcaaacttccaaccagctccattgtttgaccatggaggaagagtagataattgtttgaacttttatcagctctcaagatgacagattgactcctttgcagcccatacaacctggtgctacccattttgtacgtgtgcatgctgacattggaggggcttcttccacttccaattttgagccaggcctgctgacttgtgaaacagacccccctgatgccttccctttttctgaaacacagtagcttctagatgctacacatcaaccaaaaaccgttaatttttttttttgggttgctatagaaaagaagtcaattttcctttggaggagtcttcaatgacaatgcatttgaacctccacctcccctctagaggtcagaaagtggtgacaccacctcagcaggtggtggaagaaggcagctggtcccaaacttcaggggactagctcttatgctcagaattttgagccattttctgaaccacctgaaatttatggtctggtcctcctaacgttgcctttgctactgtttaagttcctccctttgataggtgaggtaagggctcttactcctgtttttcctaaccaagttgacattcatgtcaccagtacctgtcaagcccttgcgtgttgaagatgaattaacaatgattctgaccatttgaataatctacttgtcctagtaaactcaaaataaaagcattgatgggatgtcaatgatctagtctggtagttcatctagcaaaaagagcaaatagaagtagaatagggttgcgggttagggcatcaaaatgttagtgcttgtgcaagttctgtctttctttccatgatccaattttcttgtgggaacatttacgaagttccagtcttggaatactaaggtttaaggcacctccaattctgagtttctattagctcatgcctattgagcaggacctgaagaagcccaatagaaccgaagtccatgataatttgcagcagcctgcagaatgcagattaaatccatttctgcaaaaatatcttagaattacttgcgaaactaattttataaaataataggatccaagtccttatgaaaactgattaaatttttatgggggttttcttgagttctgactagttagtatgcagacctgaaaattaaattatgagatggcggcagcaacttcatcaatcttctcctctgactcagttcatttattgctgcacagtatatagggttcaggtagtttaaacacctcattagatggttcaggatgttctcattgccacataggccttaagccatttgttgttggattcccttttcttatttgatttgtagttggaattttaacattagagactacagttaaacatggataggtggtgaaagctattttcgcattgttatgggtgcttcaacaatattacagtactcatccgatcataacccctaattgttaattaactgctaattttttcatccatcacttcatctaagcaataacctctcttactttttttggcctgttgtgtatgtgataaccttgtaagtatgtctaattctttttttcttttaatttcttgcatttagatttcttccgttgcctgaaggagctctttgtctga

SEQ ID NO: 8264 - DNA, 2740 bp, Prunus persica
  Intron number 4 from transcript ppa001510m (locus ppa00151 0m.g) derived from phytozome v7.0 (chr-ID scaffold_5; pos 18449017 to 18451756)
gctagagcataaggaagagtgtgacccaaaacctggtgagataaaatttagatcaataatttttttgtgcattctgcaattttccatatatacctttgaaacccttaattgttgctcgcatatatgcagcctctgggctcataatacattgagggttgtatagtagtggtgtttcctagtaaacagttaatgaatggtggcgctcaaaactttaacccatggggtataaatataatcttgttacctttaatgctgattgctataggtacatcactcaccttgaaacatagttcattgagcattggatgattaaagcagccatggactttgggttgcctatgagcaagggagcaggactttgggatttagacttcaaacatcaaggtttaaatggtagtctaaaggctagggatggaataaatgtcaaacggaaggatattcagttaaattacatacccctaaatgatgaaaatccgaataagatagatacctaatctatatactattataatgtatgatctatggagtagtttacctagccttgcccagaaaagggtggagggtataagggcaggaaaaataggtaatcccttgtttggtagaagtggaaaagtggagagtgaggcatccaccttcccgacgttttttatgcttgaaccgttaagcagattgaacaaaggaaagtatacagaaaagaacagttcttttctattatattagcattttcaacggtgcaactcgatgatttgtgggcttgggactggagttccttcgcagggtacacctttcctttattgtataccaaatagaagaaaagacagtatacaaggttggggtttaggggttggtaaatagatggtttgtatataaacttttaagtgtgatgagcaggaagaaaatgaagggtggtgaagaaggaaacaaacaatagagattggggagggaggtcctaagggatgacatttgttgttatgagacttgacttagaaatggcatttaaatccctaaaattaagtgttagtgtcgacatctgagaaaaatgcattcccaaataaaaaattaaagaggctcatctcttacttttagtgagaccaaaacctctcacctcgacatcttgtgttctataaggcttgtaattaatgatgaagtgcttttactgttttatcccgccatcttttcccacctccctttagttttgtatttattttgatagtcactttgctctttcccaccaatatttccaagttttaaaattaaaatctttcaaatcatattgctctatcagccctggttgttttttgttcctcttaagaattcaagcttttccttttaggtaatgctattgctggaaaaaattgtaattaaatcttttaaagggggtggggtaagcattttgacggatgataatagaagcactcttaattttatttgcatctatcacaaatagtagagatgatatattagagttgatgttttcttcccttaaaaaaacacttatgtacatgtatgatcattctcttatccgtatctaaatgatgcaccctttgaatggcactggtggagctttaaaaattgccaaaatgcgcttgttcgttggttaggttttagttcggtgttgggcccataccgctcactgtattgacaagttcggtgagcactgtcgccggacgaacaccgacagaagatgggtgttcgcgaacaaattggtccaccgaaattgcagtccgggtgggttggtttgggcgagaggtggagcagcggtctgcaaggtggaggtgaattgcgaaactgcgattgtgatagaggtagcatggtggaactgagatggagattctaagactgcaattgactagaggtcagagagagagagagagagagagagagagagagagagagagagagagagagagagagagagagagagagagagagagagagagagagtgtgtgtgtgtgcgtgtgtgtgtgtggcggaggcaggttgatgaagatagaggaatattattactccagattttgaagatctaatctagtgtacggatctgatagggcaggacctagtgaagtgaatgccagccaatggaatggagccatgtggaaaagtaagttttgaataagaagaataaaatatagtcatattgcttcggttggaaataacattgattcaggagttttaagatcgattttttgacccattcaaccggttcagtttggccagttctcttgattttgctgtagaagtgcccaccctcaactgcccagaacttgagagttaaaacctaaactttaaactctaaatggcaatttcacaccttaagataaccaatcatgtgggaaaccgcatctaaaactacaataataacaataattgaggcgttgtttgaccctccaaatgatgcattttgaatggcacaacgtccggatacggacataactacccaaaaaaaatttctatatgcatggacaggtgatctaatgagggccactcagtaatgtggttccaatagttccaatcgtgcactttttaggttcatttagaatatcattcttgcaaaaggtctgctatctataggcttgtagtagagaatgaaagaaaccttcaagcatattcacaggaacttaaagcatgcaattatttccaatttgacattagctaaatattatttccaattcaatttcacaccacagtaaaagcttcaagttatataatggcagttcaacctgaaacgttccgttgcag

SEQ ID NO: 8265 - DNA, 4026 bp, Prunus persica
  Intron number 2 from transcript ppa009326m (locus ppa00932 6m.g) derived from phytozome v7.0 (chr-ID scaffold_8; pos 8942664 to 8946689 reverse strand)
tgctttgcttttgggtgccacccagtatttgtcaagtaagattcttgccttttctgcttcaaaactgttaattctatcaaatgcaaatgcctttcgttgcttttcatatgactgatactgagattgaacaagctgcaaaatggcttggtagaagcatgttaatgatttacaatgtaggttccatttcagccataatcttattacttgaattgtcaaaagaagtaataatatttctgtattattcagtgtgctacaaagtgtgcttgatgataggttagacgcagaatcctttaatctgctcactttcaaccaacaatgtgtcgtttaatttcctaactttgatgtattacaatacatattattctttaatgagtaaatttaaattttgttaacagaagctttgaagataaaagggactctttcttgcttaaaatgacatatcctcaagtgttgaatatttgttgttgataactagttgtgaatggcagtcttgaactggacatgagattttaatgggaaagtagacatttaggacatgatgcacaattgagctaattagtttacaaatgaggggagtggaactggtcatgcccacggtttgctctcatatggtccaaggttcgaaatccctgaacgtatctatgtagctatttgctagtgtttcctgcctccaaaagattgtagggtttgactgggggccccagtttcgaatctgatccgatagtgtattagggcatttctgggtatataaaagaatgcacattcgaggtaattagttttgcgcttgttagtcatagttcatccaccaaatgttttggaacaaaattatgagatcttcaagaaaagaaaaatcaattgtaggtattatcattgcattggaaatttatctagtgatttttattctcagtggttcataattattttagcattatgtatagggtttcatctcttgattcttgtagttgaaatctctgtattacatctttggcctttgctgaccaatattaggtatagcaaccatggatattccttttgtaaatctggatggaaccatcagctgaaacatgcattcttaaattcttaatggcataagaagtttgtcaaacttgtaggcaaggacacaaatatcagcctatattggctggtatatcttgattttcaagtgtcgacaccgatactggggggtaaggccatatcttcccctttattggcgatatatccccgataaatgtgatatccctgatattttgccgacattgtcgatatttcccgatacccataatagaacccagaaaattttcaaaatttttgaagccaattgatgcaaattgaaacccaaaaatctctgatcattattaaaatatgcaaagaagttaaatatgaggtaattaaagcttaattggaacacctatgaactaacccagccattaaatcatacccagaaccctataatcatgtttgattaaagtggaactagttatggagcttaagatgatgaaacagattatggacctactagttgggtgaatcctaactatcccatatatgggagaacggtagggagctcaagagagacatatgtgcaccatgttcaaacatagcttacaaattgctcaggttatatgacttggtatgactattgtgtggatatatatggttgttcctcattgtttgaaccacataggagctcttcatttatgtagatggacacttatctaaattgtaatccaatgttgaaacaaactatggatttatgcatggtttattcattctaatcaatgttttattttcaaacttttcattaacgcgtattccataccacttatatttcatcatatgtatatcttatacttaataaattttgagttttgtttgttcaatacattcattgataatgtacataacatctatgaaagctttactccaaaattctgtgtttcaaagccttcatctgtcatttttgttgactttttcgcgatgcctaaaacgataaggatatatcccccgaaatatccataaattggaggcccgatattatctgcacagccgatattttaatccttgcttgtaggactactctccttatgattaatggccatgttttgagaattttgtaaatttcagaacttgaataaattttcttacccttttcgtttaatttttgttatttttgctcccgctctgaatgtccttaattaaaaggttcccttctttgtggattggatgctaaccttcaaatcttttaggtccgacatgtactaataatgcaagcgagaggtatatattttacagttcgaatgacatacggagccatgcgttgagcaaacaattttatgaatatgaagtttttaagtacagtagcaatccacaagtaggccacggaaggtaggaacaaagacatctctaacatccagctacttacttatcactaacataacaaatacataacacaaaacaattatacaacagtctcaataaaatgcagccaccaatctgcaaaaatgaatcaatttctctaaactgtttcacaaaagcgcacaatgaagcacaccaatgaacactatcccataaaagacatctatcttctccccacattttccttcaaaatcctaacatccctttataccaaagaatagtcattacttaatttggcttttccctcaaccaaaagcacaatgtctcaagtaaagagacacaagaaatttgaaaccaccccaacttaacattgttgtcctaaataacttttccatgacccatgtgcaactggacaaggaagaaatgaatgagcaatactggcaactgcctcattgcacttgtgctttttcagagaagtgatgattgagtattgttttggtataaaacatataaaattcaatctctattctgtgaagattaaaaaaatagcataaaaacagttcagataggaagaggtatgaactccgttataattcaagttatcattagaaagaagtgaagaaaatgaacaatttacattccttaatgatttgagtgcgtcgttgctcatgcttggcttgttttatcgtcaagcttaaatatttaaatttgatttaggtgtaagataggctgattgtaattaattggtgtcattttaagtttaagctgctcataagcaacgtgttgatctatcaatcttcattttcatttttcttgttttgttttattgaacgttgttttaaaatcttcttcccacctccattcaactgatcaataaagcagggatgaggacttgttattctttttttccaaagggatatttttatttttattgatttctattctttgtttccgatgaggagggataatctgtttattttttattaaggattctgtgattaaatttttatgtcatttcttaacgtattcattttctaccttccagaaatgtttgaaattataattacgtgactggagaagagcctatggttgatcttcttttttctgaatcttacatagtttcaaagtatctgatttagttgtcatcatggggctgaacattttttcttgattttccctaaacttataggacaggttgacatttatccgtttctaaggttgagtttacttttcaggagttgcttgcccccctcccttccctttgtgaaaagaggaaagaaattaatgttgtcccttttttcagtacaaaaaatggaagcagcccttggaagtttactgaaaccgtaacagacaacgtcattctacatattattcctctttgacctggttcaagtttatatctagaaattcacatgcacagacacatccgacacacatacttatgtacaatgtgatatttcaaaatgctctctgatccaagcgttgacaaaaaatttggatgttaactaacacagcatttgtatggctctagattgacaattttataagaatcattgtgccatcaaacttataatcaaaagtccttgtatgttaaattctaataccgagagttatctgtttgggttttctaattctgaatatgtgttgaccgaaaaatttctgaatatgcag

SEQ ID NO: 8266 - DNA, 594 bp, Prunus persica
  Intron number 7 from transcript ppa004778m (locus ppa00477 8m.g) derived from phytozome v7.0 (chr-ID scaffold_4; pos 10749145 to 10749738)
ttttggattgtgagaggcgcaattttgtaattcaggtattaatttcttttaggaatatctacggtgataggaaaattattcagtgtattttattcgaaatgatttgtttgttttttggaatattgttagggcttgtcaggttgttgtatgagtcacagggttctgttgacacgttgaccagatctactaattataagtggcttgctctgccttgtctgagtcactaagtctttttttgggtaccacagaagcttgcatctgtattttgcagtcatggagattttgatgcatgatttatttggttgttgtctagatttagatgcattgttgacgtataaattcaagatctctgtaggttaacggtgctcttttgagaggctgggaattacttggataatggctcatttgccaaatatcaatcttatgctgtgtaaactgttctttttggcttcatagcataatatgccggactaagttatgaggtccttttgtctctctttcaatttcttcctttcaatatataaggtttacatgttattatattttcattgtgattgcaatgtacaggcataccaccgagagttactggagcac

SEQ ID NO: 8267 - DNA, 1098 bp, Prunus persica
  Intron number 8 from transcript ppa005440m (locus ppa00544 0m.g) derived from phytozome v7.0 (chr-ID scaffold_1; pos 39180163 to 39181260 reverse strand)
aggagcctccacctcctaaggtggagctaaagaaggtattctttttctttttaaaatcataaatggcatagtgcattttctattgttcatgtgtaagtggcagttttctggtgaatttgatttggttgctatagtttggagaattcatttttcaatcatgtatatattagtcgcagggtgtgcaaatatgttatttgagaaagttctgaatggtgatttgtaatgcaagcgtgttcttcagtgaccattcccctgttggactcatgctggttgcattgctagttttcttacattatagttatcttacgggcattggtatggattccttaggtagatcttcccatggattcttgtttatatttcttagtttagtagcatgtgtatccgtggacaatgttcccttagtgtgtagatttactagtcttaagttaattgcctattctttagtattgtaccctttcttttatttcaggcatgatatgaacagaatgcatctattatcagttaaacttttaagttcatacctccttcatccttggcaatttgcaaatgttaaccatgccaatcctacaagttataaatcacttaattataacacatcatcttaccccattcaatttgctggtgggaacaactggtcatatctggtttttgttaacaagtttctttgtacccaatactgcaccatgctattactgttttcattttgatagtcgactggaagtatatgaagaagtatgtgtccagacatggattctcagttctttgttaacctccttgcaatgagaaaaaggaatctgtgtcagttttcttgactaatataaaatctgaacatgaattcctacttatgtttagattatatagttcctaagttgcatctgagggtttctctaatgggttcctataggcctacttttggttaaagcgagcatgacatcatgataatcctgcttcactgtactttgctgttatttgacagcattcagggttaatttatttattggatatgggattgttagtgaagtttgttttggccttgacgtctttattacaatggatgcagataccaacaacaagggccaagtctcccaagctcgg

SEQ ID NO: 8268 - DNA, 1292 bp, Prunus persica
  Intron number 1 from transcript ppa003801m (locus ppa00380 1m.g) derived from phytozome v7.0 (chr-ID scaffold_8; pos 18178500 to 18179791)
caaaacggtgtcgctgcaactctcgttccccaaaggtattagctttgattttctttttcttttataaataaattttgtatttttcttagttcatgggaagttcaatgaaagtgaatactgggttttgtgctgatttgtttttggaacagtggaaaaccaacctgctaagtcttctgcaatgtattagttttacattaggtgggctttatttacttaattttcgtgggtcccatatgatataaattgaaagtttgagtagtttgattatgatgtttctaacattttcttatccatcaatagaagtgattagtgtttattgaatagttggttgtgtcctctgtgtttgtatttgtgagatttgatttggtcaaaagttctaatgtgaaatggtatttgggaattaatttatgagtgcagctgtgctgctaagtaatttaattgacttgtgtccaacttttggtgattgtgaagatgttggatctgagtggatcgtattcatacattcccacaagtgaactattgattaggagaacaaagtgtcatctaataactattctattcaaattagtaatagttgaatgtggaagtctttaatgtaggggatgtcgactggggagttaggagtagtgataatgcagtatattagatgaaataaaagtagtacggtggagggaaggcatggcttggcagagatagaaagggcaagaatttggaggcaatagccagtgacgagaaaatggaagaaagttcttggtagtttagtttgacgttggcaaatattggtcattttctctgaaaaagttaaaggaaaatttttgaaattgctttcacaaactctctagaactgatttggccagtccttccctaggtcatagaatttttttttttttttcttaaaccctcaagttgggttcctaaggcttctttgtacaattcacttgtaattatgttgttttctcgtggattgcctctgcgcattgatggttttgtgacacaatcaaataagttaataaggaaagaatggtaatggaaaattggagtacctagcatcatgatcacgatttccattttaatatatgtaattattgaacacaaattctgttgaatctgatatacttgctgttttatacttgtagactaatggggaaaggaaaatttggtgacattcttctcaaaaaccatcaatgtatcatggtttctggtagcctttgcataataggcatgtaaagtttttctcattctttcattgaattgcagatttttcatcaccagctccattttagatcttacaa

SEQ ID NO: 8269 - DNA, 1514 bp, Prunus persica
  Intron number 8 from transcript ppa006077m (locus ppa00607 7m.g) derived from phytozome v7.0 (chr-ID scaffold_3; pos 5346218 to 5347731 reverse strand)
cctcaggaagaaaggtgtgcatttcatccctttgaaatacaataaatgggagaaagtaccagtctattctttgcatatagtattgataatgtattctgacagttgttacccttcattgtgcttgcttgtgtcctgtgagaatttcatcaacttttgttttcaatattttttttatattgttttagtggagtattatgagagtgttgcattgatttgggttggtatcttatgttacatttcgggtgggagtaaggtgtttgtgtttgcttcctgatttcccattgtctgataagctaaatgtactacaatgtgaactgtcagattttggcctcctaatagatgcagatttgatttgttagtctgaagcaggtttatttgtgcagtttataatttattgcacctgggctatttttttctctgtttttgaaaatactagggttgctgcgaatgcaatatgatttataaatatagatatgttgattatttttgaatctattttttctttagtgatctgatgtttctgtagtatttacaataactggtgggaaatggagttttagatatggttgaagttattataagagcgtgagttcttgtaagagagtttagttcatgttaacatgcgtataacaaatttgatatcatattctagttctttagaactccaactgtagtttatagttaaaaaaacactcattaatgtcctgcatttactttctgtcacctacaactaccaagaatggatcagtcaggaacattcttttcaaagatgttgcaatgatcaactctcttcaaataacagccttgtccggctgacatcaatacttaatcaatctccatccaattctgaactcacctgcctattaggatccatctttgtttacagtgattatctgcgaaatttctgcaagatgcatttggctcccaaggatgttatctgtcaatgaaaagcacatgaatgaaaaaaatggaacggttcagaaaatacacttggagcacctcatctttttggcatttctccagtatgaggttgttgcatatgggcagtttagcactcagcaatgccaatgtgcagatgatccttgtttggaacaagagtgggtagctggttttagaaattcaaaatagaaagaaaatggcctttgttttctgcctttttgctgacaattatctcaccaaaggtaggttgtctggtttcgttagtttgcctgtactactaaactcggggaagaatggactaactatagcatagcagctgaagtccctcaatctagatgattccttttttgtcttctgtgagaagtcttatttgtattgcctaggttatctagccctaagtgactctttgtttcttcttcttctcctcttgacttgcgagttatttagcctcttattttacactgtatgatcttgcttttccgcattttaatgtcaggaatgcatagtatcaactgatttggcatggttttccatttgcaggttgaaacgttacaagaatttcaaggaggggcttt

SEQ ID NO: 8270 - DNA, 837 bp, Prunus persica
  Intron number 8 from transcript ppa000087m (locus ppa00008 7m.g) derived from phytozome v7.0 (chr-ID scaffold_1; pos 41045316 to 41046152)
gactcatcaatatacactctgagcaggtacttaactgttttaatctctatatagagaaagttactccattgatactctaatttgtgcaactatttagcatcagcatgcttatgttagcttatacacgttctggatatttcactcttctcgattaagattctggaaaagtgaacaagaattcctttttcatactgccctcagcgaaaaaggtgcttttagtttgctatacttttgtgctttttcccatcatagagagtttgatggtgctcctaaagggtatagttcctatactagttgacaacttgacagtaccttactgagttgctgctccaaatattaccaaacttattagcatatctatttcatagtgctagcctttgcttacgcaataccgacccccctgctatcacgttaaacaagtttcctgggaagtaccaccactagagtgaaactcaaagcagtagacagtggctaatatatttggttggtactaccagttactggggtttaaactccttgttcaccattaatgttgtcaacttttccatgaaaaactgctgaaatctaagtacagaagaaatcctataataagtcaatcaaaataatataagtttgatctatggagtatgaccacacaagtggtggtgaatgcgttatcttttgtagcttgtattttcaaaacttgaaagttcatcctattcctttagcaggggaataggattgttcacaattgtcaaagaaaaggtttactttatttcatttttccaaggtatgtactcttttattctccatcttgaaattttggtatctgacaatcaatgtgcttcattggacagg

SEQ ID NO: 8271 - DNA, 1012 bp, Prunus persica
  Intron number 1 from transcript ppa019489m (locus ppa01948 9m.g) derived from phytozome v7.0 (chr-ID scaffold_1; pos 43170932 to 43171943)
aagtggtccggtactccattgctcctagaagctgggtaggttgcatatgcatttaagaatgtgaatgcttgctcattattctcatcttttaagtctgttaaagtttgcgtaagtttttctttccatgatttaatgcaaagcgcatgctttgacgaataggaatctgcttgcctttattcaaaagaaagggaaaatgatggttgaataggagtgcgttttggcaaccatggaatgagcaatgcctcaacagatataattccaacatggtaaaaggaagttaaaatggcgagagttaggcgtcgaaatgttagaaagcagaaaagtaaatgatatctaacagttttttttgtatggagatagtcaatcttaaactgatttggacacttttctttattctttctagtatatgtagaaatttaaagaattcattaattttatgtagtttagacggtaattgttgtgacattattcaaaaatcaatttttttccctatagatgaccaaaagtatgagtcctttaatggagaaactagcattggggctgtgaaatttgtcccatgagttttccacaatctttccaaacagaaggagtcactgaatcttgaaggggatcatggtcttgaatgtaagtttaggtcagaataaacgtgtcataaacacaagcgctttgctccctctggaaattctaaaagggacgagacttttgaggtggttttgagttttgggatataattttgtcttggaacttggaaatgcatgcatgttcaagtaggattcatcataatattgtgctcatatgatggtcagaacagaatcatatctttcagatgattatttgttagataagttaaaatttggtgttgaaatgtaattgaaatcagtaaattaaatttcccctgaattttgtaagtacagtttattttcctatgttgtgcctttcttaagctattgttagcttccgtcttttgtcttatgcagtgaattactatcaaaagaacagaaagacctttttt

SEQ ID NO: 8272 - DNA, 2123 bp, Prunus persica
  Intron number 2 from transcript ppa002867m (locus ppa00286 7m.g) derived from phytozome v7.0 (chr-ID scaffold_7; pos 22620699 to 22622821 reverse strand)
ttgggagtacagagcttgtgcggatcttattgcaggtgactttaatattttgtttagatgccatgatgatgtttatttgccttcctagcttttggatattattttttgcctgagtacttttttattagtagtttatgtggaaaattagtcatgtggtttatttttgggtaaaatctagaaagctgtaaaatatattactataccaagctacaaaataaccttagagaaagagcagcctggcatcatgaagtttattagaatgctttctgacttcaccaattccacgatgggacactaggagctgataaaagaaattaaaggaacagaaaaaaaaaaaaggaatctatacttgattcattcattcatgcctgccatgattctaacattccacaaaagccaaaaatggaagaaaggcaccctaagaacatcagatgagtaagatttcattatggaatttttttttcacaagaaactaaacaaaagcaagctatattttaacaagtatagttgtatatatgtagttatgtatttttctgatacttagggcctgttcggtggtgttttcggaggctgttttccgttttcattctcagaaaacattgagatttgcgttcggtggtttgagaaaatgcagaatgttttctgaaatcgttttcaaccttttagttataattcactgaaaatgcagaaaacgtgaaaatgatgttttcattttcagagaatatggattcattggcaaaaaaacagagcataagccaccatcgtaaccaccatcgtcaaataccacccaacagccactacaggccaattgaaccttagtcaccacaacagaccagccacctgctaattgcaccaccacccagtcaaacccaatcaaccctaccatcaataccacctgtctcaaatcgaagtaccaccacccacttagcaaattgcagagagagagagagaggcaaaaccctttacaatataaataatgtataaaataaatttgaaagtcaagtaaaactaaataaacaaataataggtaaataaaagtaaaaaaaataagattatgaaagcaagcttggtatggtgaatcacgttaaagatgttgtcctaaagcctttgtagcctccctacatgtaggtactagttgttattcatctgaaagacagatgtgtcatggttgcttgttcatgtatgatgtatcaatgttgtatcactgcttggtcattttactaatctttttgttttttgttttttgaaaggaagtcattttactaatcataatgaagcaaaatccgaatatcaaacagttggaaaaaaaaaaaagggcttttccaaaaaatgttcattaactctctggattcgaagagagaatgaggttgattgtcctttatgcatttactacaaaaataaacaaaaaattaaaaaatatgtatcttttttcttttaggataaattcataaccctaatatctattataatttagttatgtttaactgttgttagttattttatttttatataaaagtacctaggtaatactcaacataatataagtactaattatataataatggtaattagtattatagttattaagccaaagtttttagttcttctaatgactataatcgtcattttttttaaaatgttgttataagatggttttataaattgatattcaagctcatgtgtgttggtcgtgtgtattgttttttgcttacatgtttaatgataaatttataaaaattctaaagtaatgtctatcctttcttactttttactattacttctgaaaatctggaaaatcaaaaatattttttctgacattgacattattcattgttgcttctttaatgctgaagcatacttgaataaataatttacttatgtatcagttctaggagaattttgagaagaagattgtgaaccaagatttgcttttatgatatatggttctactggcagcttttcttctcaattttgtttggcatctgggtttaggagaattttgagaagaagatcgagacccaaaatttgctgttatgatatatggtttgtctggaattttttcatcttacttatatttggcatctgggttttgtgttgttagattgcccaaaggaacagcttgg

SEQ ID NO: 8273 - DNA, 2875 bp, Prunus persica
  Intron number 1 from transcript ppa006674m (locus ppa00667 4m.g) derived from phytozome v7.0 (chr-ID scaffold_1; pos 7755592 to 7758466)
tcactcaggtaagtaccattttgactttgtctctgggaaatacgaattgggttgggtttctgcgtttgatttgaagattaatatggttctagatctacaagtttgattaatttaagctgcttaggtacatggatattggtagattcttctcatttatattgatgttgttggtcgattgttctggagttgtgattgattcttcttttaattatatggaaatttattttcaacgtgtgaatactgaagatgcaatattaagtcttgttttaaatttcctttgtaaatgatccagattatgaactggtttttttttttttttttttttttttgggttttggtcgaaactatatatagctaggctaaattatacaacattaatagctcagaatcaggaagctaggagtgtccactttatttaaactggttttattatttttttgtggtgctctgtttgatgcttgtgtactgttactattgaatatgcttggggttagatttattgggggagaaaatacaagagaacgatgtatttgatgacttcaagtcactcttatggtgtattatatatttaccatttaacaagaaaacttgaccttttctaagacaatttgagaggaagagataagtggccttcgcccttttgtttttttatttttatttttatgtacttgatattgtgaattcttagtgctctcagtttgatacagatggccaacaattgtatctgtcctattttgtttttgttttttttattcttttgacgcatcggttaggtggcataattttgtaaactttaaacaaatttataaataaatatgaagcaggttatcttaagtgaatccaagttattggtaattgtctatatcaagatctttctgggagactgggacttgtatgattactcacacaatataaaaagagggatgaattctacataactttgaatcagttttgcactattttatgaaggtatctatatttcctgataacgatataaaattatctttaaagcaccaatgggatgctacccatttccattactttaatttcaatgccattaggtgttacttgatcagcaaataaatagttttctcaaactataaatggacactattgagttgtttatttaatcagaaaatccttaaaattatgaaattgagaagttgaattaataggagaacaaaaatatttgtttctaccacgaggatgaaaatttaagaattctagtcaaaaatttgaaaagtgagcagttgttgtcattagggcaacgtttgtgtttttcttttggtgaggggccaaaaggccttcacaaaaacgacaaaacagctaaacgagatctagtactccaaacatatcatcctgtaggagatgcacccaacaatcaggaggaaaagtgaaaactgataagcataagtaaagaaagtctgaacctagccatcagcctcattcctttcatgataaacatgattgagatggcaaactttgtgtttttattgaataaagggtggctgtatttgaccccaacttgtccataagttaactaagcttaatatctacacccaactctcttcaaagaaaaatctaattatttgcaagtataaaccacattccaaaattaccctcactagaacccaaattgagttacgtattgaatattgtaagtaaactcaaacaatttatccatgatcacacccacctactgaacataagactactaaatcactggaagcatccatgaagttctccactgaaattgaagcatccactctattgggcttttcagtcttttttttattggggttaatatttgaaaagagaatgatcatatggaccgaatttgagtgttgttaggtttagggcttcaaaagttgtttaattttagcaatgattttgagttatgtttagggtatttggaaggaagaagatgagtgatggtggattatagacgaaagtatgagtgggtacactcatgaagccggatgtggtttattgtttgtattctaattcaattatgtcttttttcttcactttattcaagagtaaaattggaagtacaatattcattagacacttaacttaacttaagtggtttattgttgttgttatccggaagttctggaataaatgaaagtcagagtattgtagtgtagctgcgtggaaatttatgattatttctctttataatcaaatgctacattgtataactttcattaagattgacttatgtagcaaaattggagttcattgtggatgctgggaaaattaaactgtatttatctacgtgattgtgtcgttttgaattactttgttgcgggagtagaataactttaatcattttatgggatgcttcaagttgctttttgcactgaaattctatgttttcaaaagcagattttaatatttatagtatactaaagaaattatattctcgcctttatggggcctattccaaatctaccctacaaattaatgtgagaatttttagtttttatgttgtacaaaaccacacatctgatttttctgtattttctatcaggattcaaaataaagcctgccatttttttgtgcctgatttcgtataaaataaaagtagctaagactgaagaaaacctttgatgctgtgttgagtactgaaaatatagtgaaatttggttgagttgaaatgttgttctaagtaatggtgctatcccctccgttacctagtgatgtagtattaaatttgccattttctgttccatagtactagtaactagaaaccatgtgaccgaaacatttgcgactttttttctttgataaacttgaagtgcgtaggtttcttgttaattcatatgttacactggcaactttggtgatgcagcttattggaaaaacaccg

SEQ ID NO: 8274 - DNA, 1510 bp, Prunus persica
  Intron number 3 from transcript ppa014129m (locus ppa01412 9m.g) derived from phytozome v7.0 (chr-ID scaffold_7; pos 15239821 to 15241330 reverse strand)
gtccttacaagcctgtagctaaacaggacagcaaagtgagacgaattttcagttctcttcagttttttttttttgttgttgaaaaagtataaatgtttatattttttacctgctttgattgacccacagttataatctgttcaatttggatgtttgttgggttttcttcaatagattgatgtggtactgaatgggatgcaggatttctagaacactagttatatgcaatttatgttattgttttgttgtgtagaatggtttaatggtgattttttacattttgagatatccacttgtagcagcctttcatcctatacttgaaaaaacaaacagaaataaaatgccatatcaaacataactgctgcgttggttgcagtccactatattagttcaggtggattgaaactgggtttggtcctattcatccattgtttttaccctgttcttggtttgtgtaagtcaatcactcagcacataatgccatctcatataaatacgaggaccgtgataatggtagctccatatgtgatgaataacttaatctttttatggataaatgttgccccaagaaaagtagtggagaactggtgacaatgaagtttgcttaattttgagattatttagggtgttaattacttcggattcatacctgctgggttatgtttctctgtgacaaggaattcaataattaattgaccttgcctattgccccttctagtcagacgaagtatatatatcgatggttggtatatgagttgtgcaggaaaatgatatgtagctcttcaggtactaagatcttagttcgtatttgttttctatgtgttggtagattacagtttattactctgttttttagggatttgaggtaatggtgagatctttatccagttgaaagaaaagagatataatttaatgagagctagtgggagtgaagggaggtatggataatgtgtaaaattaacatttcaagaaaagaaattccctcctgcagctaaagagaaaaagaaatttgaagttgctcatttactactgaaatgaatatagttgttggaatcccaatcagttgcatgttgatttatagacattcatttgccttcttcgttttaagagggagttacttgtttccagctgtgttagaatatctgtaacctaatgagagctcatattatctaactaattttgatttgattgtttgcattattaatctgtgaatgcattactcttttctggttattctttgtgcttgattccttcttagttatgaaatttacagaaaactaaacattttgaaatgtaattgttgctccgacaccactcattgctggctggtacaatcattacgtgtgccatgctcagcagagctggcctcactacaggaacaccatccattattgaccctgtactgctgctgctgatatttttcttgcatcgtcggttgctatgattgctttaatattttcaaggctgctttgagtgttgctaaattttcatttccgtttatttcaggtaa

SEQ ID NO: 8275 - DNA, 1891 bp, Prunus persica
  Intron number 1 from transcript ppa018298m (locus ppa01829 8m.g) derived from phytozome v7.0 (chr-ID scaffold_2; pos 14764744 to 14766634 reverse strand)
tttgaaacggaagatacaagtatgttctcacacaaaccttttatctctacttttctcgtttaccaattcaatattatagaaagagtgctgctattttcacccacctgtcatatttcctcacccacctgtcatatttcctcacccaccttatattaaaaaaaaatttaagacaaattagcccattttgcactgcatttttctttttcaaaaagctactcttaaatttatatcaatttcaaagtgtcaactaactttttctctactctaacaacgtcaagaaattccgccataagatattcaaaacttttcccctataaatctattgaaatcacaaggcctctacatgaagatagtagttttattatcacaatttttattttcaggaaatatactccttaaaatctatactgtagaaaatctacacttaagatacatataatatacctaaacaaaaggtcaaaatgaagaacgcaagtgcataaatgaaacaaaaaggaatgagcagaaatagaaaattgtgttaccttaacaataaaacaaaaattagtatacctacatatatgtagaaaactataataaatcgtattccactttgttaggtagcctacgacactcgaacctatttgataggtagataaacaccttccacttaggtacccatataacataccaacaaaggtgaaaaacttagcacataatacacctacaatattgggtgaaaatattaattaaactaacaaacatagactgaaaacaaaaacaaaaacaaaacaaaatttatatgcaaacatgtataatcaacaaagtcaaagaatccaccgataacgaaaataatcaaacaccaaacattgcctttgtattagacaactactacctactattgcagcaaacataatcaaagtgaatccatgtaagatgtaggttaggactcatcatcaattggatggcttatgtagattagtaatcacataccactctataacgtatagacaacaaacacaaatatctctcacaatcaaggtatccatatccatgtccatagagggttttggtgttgagaaagaagaagaagaaaaataatgagacttttacgaaaagaataatatggcatgattttctcatttactatttcgatttttacttaattaattaggcatacctagaataatatggcgttgacaaaattaacatttgtagaaaatggataaagttttttatttattttactttaaattcaaaattggaaccaaaaaaaggaaatggttattgtgagataaattgtgtaagttatatgtcattaattcattaaaaaaatggataaagttttttatttattttattttaaatttggtaagaagagataaccaagagtattattgcgggtaaaatgggtctaaattgattctaaataaatttttcccaatgaatacttgacattttgggtttatagctatttttctttttcgttttttaacaaactgatttacttcaaattatatattgttttctaatagatatctttatttttctataagaaactctgtagttcatgttcatacgttttattggtagagatttctataagaaactaatttaatctaatggtattttactttattttatttattttgattatcagatctggtttcgagaatttaccatataccccagactcggggtatgacattcttcaataaaataaactcatacagttgtagccaaaagaaaaatcagaaacacatatatatgtgtgtgtgttctagagtgaaaataatttaagcaagggaatgatagactggcatatataatttgttttgtatacttttcgtacaattgaacatgtgaggttaattaatctggtcttaatattgttcttcagaccataaaattt

SEQ ID NO: 8276 - DNA, 648 bp, Prunus persica
  Intron number 1 from transcript ppa024348m (locus ppa02434 8m.g) derived from phytozome v7.0 (chr-ID scaffold_2; pos 13429377 to 13430024)
ctctatcagctggtgagccattctttatataacaagtttcatatatatatatatatatatatctaatttgctttcttaattggattttatttattatttatttttggttacattggcttgtttctgtaggactttttggttcaagtatttattctttaacaactctggtggttcaaattaattcaatatagtacgtttttttttttggtagatttgaattccatggaaagcgatagtctgataaattttagtcatcaaatttttcctgaacttttgtgtgccagcttatgtggaagtatcttatttatttatatatatgtacgcccattccaaactttatttatttcaagaaataaggcaatgccgattatattgttacactaagtttgccttaaatgtagagaggtatatgctcttggctacttgatttacaaacttgcaccaaaattttcttctttaccaccttttagaggcctgatcatagtgttaattgaacaagagttggtgcctctgggattattcttaatcatatatgactaatgtatctaaagttttaatagatcagaatgtatatggaaaagcgattgtgattcatatctattaaagttgtggtttacttgttacccaatacagctcttaatcttttga

SEQ ID NO: 8277 - DNA, 4015 bp, Prunus persica
  Intron number 1 from transcript ppa003948m (locus ppa00394 8m.g) derived from phytozome v7.0 (chr-ID scaffold_1; pos 1022414 to 1026428)
ggcgtctgcattgtcttgcttgtgccaggtctggtgcaaattatttgctttctctacgttgctgcttttaaaacatgtttgttgttgatagaataatgtttcattgatttcggcatcttcggtttatagtgcatacttaggctacgggctgttctaactgtttaagtgtaggataagtggacgtggatgaattttgagaactgtgtcatttacattcttcccctttgccattggatgaaatcaatggcatttctctggaaacgttatataggttacgctgtttttataagttaggaacagctgtttgttttttgttgcttaccaatgcattgctagaatcatctattgcatgggctgatgatgaagttgtaatgtatacattttgaaggagtaggggggggaataaaggtaagggtggaagctttgatgttgtaagtgataaggatgcataataaaattacagcatagattttaatattgtctaagtcttgactcacagtgtggtcaaatatgttatgcatagataactatagtgagagtttttcgtggagatataagttatatgtatgtattgaggttttttttaaaatacaagtaggatttattgattatgctgtccttcttgttgttgacactactttttgcattagctatttggtgaaatttcaggacaactgtgttggtcaattccaatagaccttggtacacatttctctgcttgtgtgtgtaatttatctgtgatcctctaggatatggtggccttccatccaatgtgccagacatgtgtgaacaaggacatgtgctttgtgttatgtggtggatatgaagtttttaaatttatatttattggtctgggtggatgtgaatctaacttgctttatttgtcaataatcaaagggccatctctaaacgtatttatgaaagttttactttgttcaggaagtcttagttatctcccctcttttatcttatcgactaaatgggatcaggaagttctatttccatactggttaagctttccagcaaatgtattagattttaggaacaatcgaaaaagacatttcacttttggtggagaatgaagactggttatctccttggagagaaaatctcccgcttacctttctctaataataaggcttccactatgttttttttaatgagagttcattgtaggtttctgaaagcttgtttactgctttagtggaagcagcagctttgttatatggtagctgctgttatagtgtaacttcagggaggttttcatttcatatgtcttggtttgttctttctgtatgcagctgatagttctactatcatctcttagattggaactttacctaactaacttattttgattcaggtggtcgcagttgttttgataagttaggctatctcccaggatgtaatgtttgttttctttgaatattatgcttttcttagatttccctttagaaatctagaccctgaaggtgtttggagtatcatctgtcctttacttattgggtaagaaaggctgtattattttctatttacgtcattactttcagtctatgtcagttttcctatattcttatatagtaaaggtggttgctgattatgcctatacctttgtacatatttggggccattatttttatgttttaggactcttagttagatggtagctcaaaatacctggttagtttagcctaaagatgattgagatgagctttctggccaggctaagattcagattgggtttgctggcttatcagaaatatatttgacttgagtaagccttaggtcatcccagcttacatccctgattattcagtgcaattgaatggaagttggatttgagcatttaatttgatccttgcttcatttccataagtgtaggttgtgtctctatgcttcttttagattgttaccagtgctgtctaacttgttgcaaaatgggcactgctcctcgtttctaaacttgtgaggtctagaggctaaattaattcgattggatctttggttttgttttttgttttggtagtttgaaaccattggaatccaatttgtttgatggggaatatgtatatgcataagaaaggaacctcatgacttgtgcttgttgtttagtaggatttcggtggtttagaagagcttagatttcaacctgtattcatggcacgtcggtgtacaaacttgtattcttgccattccaggatgaatccattgcaaatatttaatattatctttctttctctgctctaggacttctaaactatcagtagatttttgtttccaaatggctatctttacttgttcttcattgatcttgtattgtgatggataggagccgagcgcatgtaaagactcatttttactgcttttttaatacttgtttgggccatgtggtttcgtagatgttatatggttccatattctggttagtggattggtattggttatacagtgtacgcaataatttccattttctgttttcctgaatcctatcccgtcattgctagatatatagagtatggaaatgtgcgagacatagatttagtagaaaatgtgttttgagcttattttattggtaaggactccatatgtggatatttcctttcgtttttttccttcaaaaaaatcagacacctctgtatactttgttgctgactggttctgattggttgatgcccttgttgtcttctgagttatgtctggaatgtgagtcatgaaccattccatttgtaatggttggccttgaatttgtgaactttcactcataggcagcggacaattgaagctgattagcatgttgactttaattgtaaaaacatacgaggctgactctcacaacggaagtaatttcctacagagtctttctaggatttttatactaattttccttttttatagatacttgttcaggactttgatgggtgacgtctttgtggctacatttttctttccatgctttttgttcccctccaataagttgggattctgttggctttgtgttctcgtggtttgaattatttgctgtggcatgtttctgtatgaactaagtttacaagaacctcttccgaattgcctttcatcacgattggaagtaataggactacctctgtcttctttgttcctttataattttcaaaacctagaccacttgccatcacatttgcttgaatcatttgacatggttcattagaatactaggaatttctccatgtatgagtcaaagggacaaattattgtttgttgaaataatatttatgcaaagactcggaaaagtcaataacctatgcaggtatgtgtggttcagctgacctagtttgtgtgattgtaattagtggtaactttaaaaggtgttgcggcaaaggtttagaagccaactttgcttaactaagaattatatgagagacttcaggattggtgttttgatgtttgactaggagagcatgaaacataagccctcctatggtgctgagtttaccgctttcccctgtaaatttctgtgtgtgttgtggaaattatccgccattgtggtaaaactgaccttttgctgctgtgtaagagaatttagtttgcatgagttacagttagatgcatttgttggcttcttatgtgcagtaattactccaatacatgatattttcttatggatggtgctagagttcctcgtgcaatcatcgcgttatctatgaatctgaggcttgtgcttgcacatttatttgtgtatgccccaagcgtacagagctatcctttttctgttataaattatttaccttgtgtcagggtcttacattaggttataacacctaggtgatatcatttgatgaaactatgaacatgaatccttgcttaagatgatagaatgatatcagctcattagtatactcctggtgaatgcatcttcttcattgcccttttgagttcgaacttaatgggtcataatgctatctgaaaggtaaacctgaaatacatgttcaattcccttgatatgcataatttcaggtcttctaaagattttccggat

SEQ ID NO: 8278 - DNA, 1141 bp, Prunus persica
  Intron number 1 from transcript ppa005140m (locus ppa00514 0m.g) derived from phytozome v7.0 (chr-ID scaffold_2; pos 2249876 to 2251016)
tctctgtgatctcaaccttctctttcggcttcttggtaaattagctctagccaccatttcatttattaattccatgcatttaattcacataccataattcatatataattaatggggtgcacgcaacgcgcatgtcgtcaatttacatatagcctaggtggggtgagatttaataactcttgtctttttctacttgagttatgtttttatgatttgggtttcttatgttgcacttgtcttcttcttcatgcttttcttttatctgtttttttgggagactttggaaaaggctaaaagagtgagaaattttttaaaagaagccaaaatggacaaaattgcccttatttatttttggatttcttaaggaatcctttatatttgcatgtctttaatttaaaagttgagaagtttttctgtcttttttgaaaaagttttggcttttttcaaaagtgaaagtttttttgtaactaaaacctaaatttatttttttgtttttagtgtgtgttaggtattcctcagttttcaaaatattctgcatttttatttatttatatattaaaatggttaaatgtatatactttctgtgaattagacggcacacacctttccagtctcagagactgactaaagttgagtggagagtttttctatgtttcttattggaagttgtagtctttgaatcatactctgtttcacagttgagaaaagctcggaaatgataagagattttgtatgagagagagagagagagaggataatgagcccaaaatatttgaaaaatcaacccaattatcctaatggattagcctttgtattttggataaaccatattaactaacggtgaaaaatcaaatttaatttaaccaattttttttaaaatcgaaatctaattaaaaggaacactcaaaactctgtctttcccccctttgaattattctaatgggttgtcttactaatatggaattatgtatgtatgtatgtatgtatgcatgcatgcatgcatatgatagatcattcagatcaaatgcatgattgattgattggtatgcagtatcgactatgtatgtagcttagcagcaaaacctatgtcatggaattgaaggagctaaatttgataatttgtacaaacttgtagctcggc

SEQ ID NO: 8279 - DNA, 2999 bp, Prunus persica
  Intron number 2 from transcript ppa008442m (locus ppa00844 2m.g) derived from phytozome v7.0 (chr-ID scaffold_2; pos 3432539 to 3435537 reverse strand)
gtttatcaattcacctggtggttctgttaccgctggtatgtttaaaacatattcagtatgtttaatcctagcacctcttctgaacttctttttggtttttatctatccttgatattgaagataacaaaatttgcagataaaactacgtaatttattatataagttgggaaaccaatttacatttataatataatgtaaagcatgggcgtgcaacctagtaagtgaggaaaacagcatcatgaagccatactttggtatcaagcacaaaggattacatgcatgataatgtattatttttgcaaaatattgaatgaggaaaccttgaagaatgaaaaccaaaacaaaaaatcgcaatccatgtaaagcaagtaatatattgaattgactaagctttgatgtatagtctacttacatgtagctactgatcactacaaatataattattggattgagcttttctaggttttggctgttagcagcaacttgaaaaaagccttcacctcaaaattgtgatacctttgtcacaatctcagaatgtgtcaaacttggataccatgctttcgttgccttagggcattattgtcaccagcttggtggatttgccagtccctcccatattgtggaatatccccaacaaaaatcgtttctcgaagttgactcaatagacttattgtgttaactttttagatgattaagaaaatcaaaattttcagtttctaagaatagagtagcactgattacagagaaggtaattgtttaagtttggtcatttgggaagaccccagaatgcaccagcagtaagattgagttgattcaagttgatgcagtaatatgaggtgaagtgaaggtagactagaagaatgctcgtcaaatagtgaggaaggatatgattattagaaatgtattagataagatgcctttacctcagtatcatggttgtgctaatgttggacagtccaaatagttattcgaacaacttttatgtactgaatgccttctagacagacaatatagatcctgacctgtcatcaactccatattcttgtctttaatttcatattcccatgaatattgacatctttgaaaattggactttttaaaatcgaacaatgtgaatgccttttatatatggaaagctttcacataaaatcctagtcatgacactctacatctctcttaaatatccttgtccgtagttcatttatttgagctaggattttggatctggatgaggtagacttattgatgattcagttatgtttgaagtgaaagacaatggatgaattaagagtaaatgtgatgattcattttggcatgcagactttaatggttcaatttggtatgctttcattaagagtaaatacacgctgcatgagatggttgggattctaatatcatgattagaggttcaagctgatgcccttggaaagacacctctgaaggcctcaactcttttgattttttttctgtaagattgcggtggggtatggggaatgggtgagattttgggaaaactgctgggttgtggaaacaaagtcttctcgttttcctcgattagtttagattttcatgatttcatactgtttccattgattgtttgtgttcaagtcgtcctcttcttgttttgcttgggaatttgggttccgtagaaacctgaataaacagggtgtgggtggattagttaatctgttggatgtcgtagaaaatatctgtaggataagttaatgtttggtgaaaagttaatgattttcggaaggagggggtttggtgctgaggagtgtcctgtgttggcaattttaaaggtggtttggttggagacaaatagaaggtagtttgaaagtgtaatgggggaggaggtcgatcgttcaattctttgagttcaactttgaagaccggtcttttcattctaatattctttgattggagtgttatctttgtagtaaagttttgtagttatgttattttgttagttttccgtcattagatgtttggtctttggagaataacttgtcccctttgttgtatcttctctcttttatctttacatgataaaatctgtttttctcataaaaaattgaagtgaagaaaaatgaagagagttcaacaggaagagaagtagcaatggctatctgtgtgactattgatttgatatgttgattttggtcaaggcctattgaatcattaaatcttaagaatgaagaaataaagtgatcgtattatgtgcctttgaatgtaaaacttttgcattatgtgccttcaattgtaaaactttatcattatgtgcctttgattgtaaaactttctactataaaaagtgtcaatatttttctcttacattttctgccgtgtaatcgtatagtgcgatgtatatgacttatacaaaaagggcatttttaaaatattgcaactgtatagttttgtgtgccttttgaagataacttttgattgtgtgattgtaagagaaaatgaataaacaagcaaaaacgaattaataaagaaacaataagcaagaaacaagcaagtgatgcaattataaggaaggagaaacatagttgacttgtgtgaggggcaaagaatatttatatggtttgatgttgggtacccttaggtgatatccgatcaaagtggaatgatattttggtgcgatgttggatttatcattttgagttgacatggttcttttatctgaaagtccaaatcttcatcaatcattatgcattttgaatgacatagagggtgggaaaatttctgtgggaagggaaagagtagggcagagggctgagtggtataatgccagcaaaatgattgaaagaggttagctgaatagaaaaacagttgaaaacgtgtccatctatttctgtttgggaaaaaattggcagactcgggcctagccggcccccctcttgttattgagaatatgacttttgttggattgaggataattttttcccttaaagttctcttttgttgttcttaccaatttattgctgcatacagga

SEQ ID NO: 8280 - DNA, 1213 bp, Prunus persica
  Intron number 1 from transcript ppa009505m (locus ppa00950 5m.g) derived from phytozome v7.0 (chr-ID scaffold_14; pos 91124 to 92336 reverse strand)
gtccttcgttcatcgtcggcagacctattgctaaggtaccactgcggttctgcgctctccgattctttgttttggtttttggttggtttgctgtcattcctgcgattctgcaaaaccgattcttgggttttggggtttgctggttgttttgttgagcttttagggtttagggtttaggtattttcatggaaaattccttattggcgtcgcgcccccttcactgccttcatctaccaacaacatatttctctgcctgtttcttttgctctgagctctgatctctaaactccctctccttctatctctttctctctgttcggcgccgctgccatccaaaacctccatttaaagcccaacattcagacctagaaatcttctccatttctttctcctctgccccaaagatctatcacctccactggtacccaccaccaccacatctctcctttcattatatatttttgtctaacgttctatttggtagctgagaaaaggatacgggaacaaattttatgtttttatattatttggtccacattttctgcctggttgctgagagtagggttttttaaacaaaaattgtaattctggttgtgtttggttatttttggacgatttcttgtttatattttgagcccttgttttatatttttgctgttcttatggctgagaccttgaatttcagtttcttggttgttttgattttctgaaaaagattgaattttgtgttttgctaagagaatatgatattccgaaattatatctaaaattctgaaaataatatacttccgaaaattctgcatcagaatggatttattatattccaaaattttggaaatcggaatcgggactgaaaatcaattccgaaagttttcggaacggaattcagaacacttgtttccgatcggttccggccgaaacacagccctaattggaactgctttctagtgagaggagttagtaagtttagtaagttttcagattctcttccttgttcatttagcaaacctctagcaattcattagttgcctaataagcacttgctcccttatttgcagttctttccagattcacattgctctgtctagtttgcagctgcactttaggcttagaatgtggcgctcatgactaaatattttgtttaattttcttggttcgtggtacatttgcatttaccacattgtttctttatatgttctcagcaaggaggaat

SEQ ID NO: 8281 - DNA, 1416 bp, Prunus persica
  Intron number 4 from transcript ppa018550m (locus ppa01855 0m.g) derived from phytozome v7.0 (chr-ID scaffold_7; pos 2821128 to 2822543 reverse strand)
ctacttatgtctatactgatgaatgcagtagctggccatctccaattggggataatgattcttctcttccaaacaagaatagtattccgaccaactatgaaagtaaaccagttagctatgacagtaaaccagttagcaataccgcctctaatttcgagaatcaaactaggatttcagaggtgagaatccacatgctctttgaaactttcatatacataattcttaatatggagcacaagaagaacacggaaacttaacacttgcttgttatgattcttaatccaggtttattctcaagcagaagaaaatctggaatcgttctttcgtcaatttgagctagagggagattttctgcatgccaataactatattggatgcaatgagtcgcaatctgcgactcttttcccacaaagttcttgaataacagaaacatcataaactcttttcaatgactacaaaataccaaaatcattggaaagggtttatgacgtgtgtgggagggattttcgttcccaaagaataaggagtaaaagaccacaccctgcaaaacaatacggagtaaaagacaatacaatagtcaacgaatggatggagattagacccttcgatgcctaagttaggccgagtgtttgtagtcaacaatagtcaacaatagtcaacaaatggatggagattagaccattcgatgcctaagttaggccgagtgtttgtaatcaacaatagtcaacaatagtcgacaaatggatggagattagacccttcgatgcctaagttaggccgagtgtttgtagtcaacaatagtcaacaatagtcacaatagtcgccaatagtcgccaatagtcgccaatagtcgccaatagtcgcaatagtcaacaatagtcgacaaatggatggagataagacccttcgatgcctaagttaggccgagtgtttgtaagaaaacaatagtcaacaaaaggatggagatttctttacgggggtgttggccaaagacccttcaatgcctaagttaggcagagtgtttgtaggaaaacgatagtcaacaaaaggatggagattttttcaggggggtgttggccaaagaccctttgatgcctaagttatccccgtagatattttgctccctcaagtggatgccacagtgacgctgacactgaagtactccatggaaagattttctgtattagctattggagagaaacacaacattttagttataggagaatatcaaaggggacttataaaccacaagagtccttgtgagaatgtttctctaactcacgttattgtagacagtgatattctcctacaaataattcaactgtgttgagtaaaacactcacagttgtctaggctttggaaacttgttcgtagttactagtctgtcacagacggcaagggttacgtctctttgat

SEQ ID NO: 8282 - DNA, 1362 bp, Prunus persica
  Intron number 1 from transcript ppa006725m (locus ppa00660 2m.g) derived from phytozome v7.0 (chr-ID scaffold_1; pos 24973315 to 24974676 reverse strand)
aggtcggttttgttctttttcaatttctctgattcactttttacgcttctgtttggatactcagattaaaaaagaaaggtaaaaaaaagggagagaggtagagtgctgctcagctgagctcgattagttgtttagcttctgatatttgcatttgaattttttttttctgcttttttttttcctgtttgaattggtttgattgccacagctttaagaaatccgagatatcaatttttttattacaatttattttgtctcgctatttacgaatttgctagatccttgtactgtttcgtttgcggttttggtcgtggagttttatatttaatttttaaggtaaaagatgtttgatcggaaaggcttgatgagtacattgcatatgtttgattatgtgagctaacttagtgatcgggtttatgcttttggtcgttgtgttctttatctttgaaattaagcaagcccagctgcttgtctgtcttaattataatagtgggggaggaagtgggtctttgttatgtagtttgggtgttaattcaaagggaacacgtggtctactttaccatggagggttttgaatgggtgtttgatttgtgactttgttttagctactgattgtcaaatggtagcacatggttgcttctttctcggcagagttcttgtagagggcaaagaggaacgagcacatgatttcttgcttgttgtttctctatattgcgtttgaagaatgtctattcaaaaaggtctgagtataagtatgcagtttctgctgttaaatggtcaatgtattctgtgggttcgatttgaagcacagggaaaagtgcgatgttgttattgagagagatatagagaaaacatcttacgggagcaccttaaccttttgatagtataatcaataatgttaggttagcagctttgggttgtgagttgtaagtgctatgcccatctacttttacgattttgtcaaccctgatatatgtgttgttttgatagaaacaaatgttcaggttattctcgtagttgtataatcttgtattactgagtcgtagagtcttgcttaaattgttgtgttccttcatgagggtcatcatttcttttaaggggaattctcaactgaaaacctgttaaataatgcagatcagctatcgctttgtacttgcagttcatttttccgtgaatttatagtcagaagcttgtaaataacatgggaaccctttcacgcaggttaaattttgtgacagtctattttcatcggaatgagttaacttttgttgctctttaaatttattttagagatctgatcttctctaactacatttgcatcttgttggctgcagtgcgggtggtagaaaaccaaacgagact

SEQ ID NO: 8283 - DNA, 3997 bp, Prunus persica
  Intron number 1 from transcript ppa012069m (locus ppa01206 9m.g) derived from phytozome v7.0 (chr-ID scaffold_3; pos 370077 to 374073 reverse strand)
ggtttgttggattccttcctcacttggctccggaggtaacccatcttgctctttttcatttttctttctttggatttgagttgctgtggaaggttttttttttttttttttttttttttcccggtttactgattgctgtgttcaacttggtattataaagatttgaggtgcgaaagttgattaatttaattacttccttcctcctatgttgctaataatcaattatgaaaatcaaaacgaaaagtaattgcattatttgatgggttttgtggaatctgtaatcacactgagctttgttcaattgagaactctatggttttaacttttatatcattctgaaatgaagtttctttaggctttatgattcaaatggtttccagcgttatcctgttgcttttagataacttaaaaaggatcggtgatttcatttgtttatacaagtggattagttgcataacatgattttctgacttcctaattagcggcttaaaaaagatgtggacacacaaaattttatgaatttgaatttatcggtcctatcaaaattgtaactatgtggctattctggttgaagttgtcttcattgttatgactatgatgatgacaattatgaaagtgagtttcaatcttctgagactagaacccatacaattgttagacggcccttattagaggcaaagctacatgttcatactattaagattttcattttactattccctccatatgagaaaacaagaagaagaaggttgagattctttgtattttctgttgtctctttaactggaaggggttatgggaaattggcctttgagtaaatattcggtgtgggcaactcttaccatgagtgaagtactagaaaccatctttgtgcatttcctcttcgtatttttaaatagtttttctcctttcgagtctattataatctatgaaattgaaagggtaagtacattgtgttttttttttggggtcaaaagagtacattgtttgttggaataaccaacctatagtttatgttagtatgatttggaagttctgcgttagtttttttatgcctgcattatgcagggatactggaatttggaaacgttcgatttctctgttttagggggttaagttgagagaatgactactatcccattgttgtacagcagatctaatgttgacagtggatgtgaaccccttgttaaattctcattactcattccactccttgtattctgtcaatgatttttcttcctttgagttaatagttagatacttcatcatatggcattaagcttcatggtcatgaatggctttttgagcttcctgtgagtttgatctaatgaagttcgagaaacactatagtaatctgttgtcagttcttttcatatccttaaagggctgtgaaccgtgcatctctttgttttgtgtgtttggttatatttgctccacatgtcatcatggataggcactttcttttcttgatcataaacacaaactttattcaaaattcaaaaattgaaagtccaagcatagtcgataagtgttacaaccctggaccctgcccaaggcatgatggctgcagtgcctatgccaaggcatgattgctgccatgcccttgccaaggcaagggtgcgtatggcaggtgcacacaaccaagtgaagaaaggtataagtgtgggaattcttgtacaaacgtgccaagatcttgttaacaatgaactatgatgagcacacacacacacaaccagtaaaaaaaaggataaaaaaacacaccacgaaagaaaaaaaaaatccactagaaattgtaccgaaatgaggtttggctatttgtgcctatgtccttggtaatcaccctgagaaatttcactagtcaagaaaggaacaactttgcttacgagaagaagccccttagcccttttttaaccctaggtcttaatttctctctcacccttgctcaaatcctttggtgcctcccttgtatctctcattttgtttcccaaccccctaaagttttatttgtatcacatagggctcagcttacaattagacccgaagtaggaaactaaaaccctaaaaaaatatgtaaaagacagcttgggttaaaacaggaaacctgagagccaactggccggctagctagactgactggtcactcgctgtgcgacacattccgaccggtcgctctgctttgactccgaatcctgcagtctcagtgagtagctaccgttcgcccaaaacctactgaccggtcggacccttgtacaagcctcgttttcttgcttccaaactatcaagatttcactaaaatatgtgtaaattaatgagatttatggtgaaaactcagtaaagcatgaccatgcacacaacagagatctagagttttctgaaatgcaagcgagcactaaacagttgaattgaaaatcgaagttccaatgctaatagattttaaccacacccaccccccccaaaaaaaaaaaaaaaaacgaaaccttaatgagagaactataaagcccaagttcaaaatttcatacaaaaaatttgaaacttgtattcacatgatcaggcaatccctagaaaagtaaaacaagcatgtttgagaagtttgaataaggaaacttaaaatcctaaaatctcaaatttataagaatcctgatgcagttgtcagtagatcaggcttgcctctcgtttgattgaaacatcctgtcttgtttcatttgataaaccaattgaatggattcaaagttgacagatctcggtcgattgatgtgtagcaacttcaactgatcttttgtcttatgatatttcttgatatcaacactcagttttgtattatgctctttttcttgcaagaggcagcaactgtagttgagttgtgtgtagcaaaataagtcattaggtcctagaaacatgagcaaagtatgaatagcaaaccagatgggaagtccctacaagccccagatgggtcccagcctagatcacaactttgatgcagaatggagtgacaattccattccatcttgccagccctttgtacaccaacctcttaacccatatcagttctatgatatgtctaaattatcttggtagtctttagttcctactaaaccgtcccgactactctgtctgcaaatcccctattatttcagttcgaacagtctcagctccagtacagagtcatatcttcctatattagctgtacctgatcttaaacgatacagagtacaaggatagtacctttgagccattataatctgtttacacctggaaaaactgttacatgtctggtaatactatttgatacgagatgggacaagtttactgatacattgtttacgcttgtaaagtggatccaaactttacactagattgagtgcagttctcttatttccatactggttctcaggttgcctgtctgtatatctgaaaatgatgccatccatgcatacacttttgattttttttatttgcttcccaactggtttgttcaggaattgttttactaaattcatggcagatgggtggaatttcgtctgatacatatatttgttagatacttccacagaaatatcagtgtgaaggtttgaaaaggaagagaaaaaaggatttgtagtgctgaaatttgtactctttacagaacaactttgcctaaaatatattcctcttggatatgcatatgatgacttctgttaatccctgtccaaattgcgcattctttggttgaagcataatttgcagtaattttgtacgatactagcacgttttaaccataatagctgtaaggtgttataactattggcttccacatcttcacattttcttaattcttgagcacacaatgaaataggtggagagtccattttcttgggcagtgagtcctatttgcattatcctttcttttattatgacactgttgcaaaatggaaggtctctagatttctcgatgatcggtctgctaactttgtatcatcctactctgtgcctacatttcagcttattctttaaacaggaa

SEQ ID NO: 8284 - DNA, 1444 bp, Prunus persica
  Intron number 2 from transcript ppa020838m (locus ppa02083 8m.g) derived from phytozome v7.0 (chr-ID scaffold_1; pos 12868100 to 12869543)
atatcttctctgctacccggtattgccgtttgttcccacaacttttctttcttctttctttccattattgaggaaaatttgtatattaatatttcattccatgtgtggccttcaattgtttgtgtgaaaaggccgtgttccttgattttgtgaaatgattcaggcatggttcttcttggttgtttaaacatgaaaattgttacacgtgacgtgaaagtgaactttgtgacttatagttaacgtctgtccataattttgctaatggttgctcgtagtttgtttctatttttcctactcggccactaaaaacttttaggaattttccaaagcaaacttttctcttttctcccatttcttttcttttttatttaccctatgaaaatgagaaatagagatgaattaatgaaaattttccttttctttgttgatttattaaagctcaataagtcggaatttgggactcattttcttcgtttgttcttcttctcatctttctcgtcctttttcattcaaccggatttaagttctattgagttcacaaccagtattagttttccagaataagaattctaaaaacttgctttgtaacagtggttgttatactcttaatcttttgagaatgtacctaaacaacctgagttcttatacttatttttttatcttaatatcagcactttattgctcacaaatttcctctatggttgacctattttatcttgaaaattggcctctcccacctctgcaaatgagtcacttggagattagaggagccacgttcatagaagcaagcagactttcacagtacttaatcccttcagatgttatccgattatttcgtcagtgaagtactctcgtcattaatttcattttaagatagttgtaaacctcagttggttgaactccaggaacccaatgattatttgtgtgtgaaaccctctccccaaaagatagttgtaaaccacagcataaaagaaaagaataaaaaattaataatggatgttttaggtcatgccactgtgccccaagattggatctcagattgatcacatgctctggtacagtttttttcgtttgtgttacatgcacttgattttttttctcatgcatgtttgcatgacttgtgatatcagattatgttcctcccttgtgtatgtgtgtatgtaatgtgactgagtagattacctgttccccaagacgtagttcaagaaacctgtctgcatgttttgagtcctgttcctgtgagctggttggtgtttgcttagaacatctgaaatagccttaatatatacataattttgcttttcactgctgcttagtctgccagtgcttactgtaatttgttttctttcttttacactttgatgatgattgttcaaacttatcaatcatgggcatctactacttatcagatataccaaggcgttggaggtgataaaaaaacttc

SEQ ID NO: 8285 - DNA, 480 bp, Prunus persica
  Intron number 3 from transcript ppa001246m (locus ppa00124 6m.g) derived from phytozome v7.0 (chr-ID scaffold_3; pos 15327304 to 15327783 reverse strand)
taggggcgggcgggtgaatttctcacctcgttctggtaagtgacgctcaaattagaatgtgtttgaaggtcactattgcctgtactttttctttttatccttgccaaaatcctgggttcaattatatgacttaattatgtttgccgattagcaaaattttatgtatttctactgactataactgtataacttttttctcctactactatttcccttgtgttaatttaacagctctgtaaaaggttgcctagtctagtaagctcaccttttttaattttcttggtatctttggcttgggcggaaataagggaaaaattatatcttccccttctccccaatatgagtggagtttttagatttgtagatttgaaaatgtttgcttacaccctgctttactgttgtaacagtttgaatcttattgtgccaccaagcttaagtcataccagccaagctaactttattctgtgtactttttgtcag

SEQ ID NO: 8286 - DNA, 740 bp, Prunus persica
  Intron number 3 from transcript ppa023653m (locus ppa02365 3m.g) derived from phytozome v7.0 (chr-ID scaffold_6; pos 6340186 to 6340925 reverse strand)
ccgtgatatcaatagaagtggctcaaaacgcagtggttgccctcgacctttggcctcctcttcatatccttttgattaatttttctgtatgtcggagttttggtgagtctttttttatgttaatgagtttttgggagagtttgccttgacttatgtgaactctgaaaaggcctgcgaatgtgaatacaatgaaatcaccgattaaagaaccaagaatttctacattaccggttcgaaaacctgatccctgtctgctgtctaggacttccaagaatgtgatggttggtgcaaatgatttaaagaggaatcagattgctcaccctggtaaatatttagatattgactgcatttattagtgagatttattttttaaaattaattttagaattaaaaaagataatggtagttgtgttccataaatttaggatccattatctgatttttcttttcattttaatttttttaatatgaaaaagtgtgaatttaccatattatcctcatttaattaataatttcaatttttaatgtttgcattaaccaagggcattttctggtattttgaatgttttaccattctttgccttttgctttatatatatagtttgctttatatatatagatatagataaagaaataagattttcacatttgaatcaaatggaaattatttgtttattttctgttaactacttctctcacatgcagcagggaaattgaacaacaaaaaaactgggccaaat

SEQ ID NO: 8287 - DNA, 2004 bp, Prunus persica
  Intron number 4 from transcript ppa003468m (locus ppa00346 8m.g) derived from phytozome v7.0 (chr-ID scaffold_2; pos 3489767 to 3491770)
ttctctcacacacggtaacacttctcaccattttgttcttaaatttctgtatgaaaatatcactctctctacctctgtgttttagtgttttgtttaagggggtctaatggtggtttctctgtgatgccccaaaaatccaaatatgtttagatctagagccgtgagattaatttactggatgaaattcaaacccttttttgatgaaataaaacatgaagtcgaataaccgttcaataacaagaattaatgacccaggaaaaccaaaaccaggaatacagatccatatgaagacattttcagaacaactttaggttttctaattaatatcattcaacagcaaacctgtgttcaaataaccaaacatggctgttaattgaggcaatgaactcatcttctcaaatatgttgaaatatattttcaaatagtttagaaagaaagaattcatacaaggaactttgagggtgaagctaatgaaaatgatgcagcgcagtagcaataagctgctgtccagcaactaaactgtgctaaaccatggtaaaaatggaatccatacgatcaacaacacagagaatagacggataaagcaatagaataaaagttggaacgatgataatagagttgtagacagagacccaagataaacactatattctgtaatttcttaataaagtttataaaagacccttattacaactcttaatcaggcttacatagccatcaaaccctaatgtaacaagggaaattaaaccaaatcttaattggaataggaaaactataatatcaaaataactaataatttaaagtaaatagaaccctagcctaattggctagcgggcccactttgacctggaaggcattagatgctcctgtatcagaaaagcatgtgatactgtatataatatagaacgcagaagcatgaaggtccaaatgtcaggatttgtcagaagtaaagtcataaatatgggtgtactcttggaaaagaaaggataagtggaggggtgggattcagctaaatttaagctattttagttttggaggtttagtagttgtattttgtacagttcatgtaggaaatcttgatgatggtggtttgactttattagtatcaatttttccaaaaagtagtaaaaccctataaaaataagttgaaatttgagttcaagaagtatacatccgaaagttgtgataagcaaatagatgctttatcatatgaaatagattgattcatgtggttgcaacacttataagccatgacatgcgtatatacaattgaaccggggaatttctactttttgtatggattggttttcaaatttaacaacagaggttataagtaagagcttttaggatattgaagtgactactctgatgaggtggttggagctatctataaccaggtcctaagagttttggtgtttttacttatatgggaatatgaaatatggcgcactattgatatcaggccaaacaaaatgaaaaatgataagacatttctaaggtttatgtcaaaatatgatgctgtgagtacattttgggcgacttttatgtttcacaatatctaatataaaagtattgcactgacagcagggtattttcaaggaagaaaaatacatttgatgaaccattggttgaagatgcatttattttgtcaaccatttctaaactccacttaagagtttttgttttttgttgttggggtgggggagggaacctgatttgggttgatcaatcagattggttgaaattaaggttctcaaggtagttagaattgtggatatgatagcatcttgtgaatgctgttcagctaactgctcctttagattccttactgatcttcagctccagcttacctaattgtgatgctaaattgaatggtgttgcttattttattccacctgtgctatggtggttgtcatttatttaatacttgacttggcattaattattttttcttcctttccttttgaagacttgaatcttaaaagtggtgtaaccataccagct

SEQ ID NO: 8288 - DNA, 1594 bp, Prunus persica
  Intron number 2 from transcript ppa006019m (locus ppa00601 9m.g) derived from phytozome v7.0 (chr-ID scaffold_1; pos 4936449 to 4938042 reverse strand)
aggaggtaaatgaagcccttttcattgctcttattgacttataatagattgcttatgtatttagttttcaaaattttactttcttattatatctgtggagctactttgctttatagatgccaagcatgcccttctttgtatttatcaaaaatgttatctggaaaggacttttttccttctggaatggatgtttatggtttacggaatctgaattgtgagtgattttctggtgcaattctgctagaatttatcaatgtttttgaatttttttaaattctggtcaaagtactttgtttctgaaaattataaggctgcaacatccctgtctgttttctgattttgatggatttggacatctttataactttattgctgcttgtatacccaaagatgagcttttacagaacatactaaccatttgtctgtgtctcaatttccatggcatgcaaatgtggtagtggcgaagttgctactacatggagtacgtacctttaactgtctaaatcataagatttttttaattcttagtgctcgacgtgactgaaacaacgaagattcgattcttaaaggtgttgtgctgttttttttccttcttaattgtggttgattataactgctttgtattattttgttctgccttttttggtgatcgaaatgaaaagtcaccctttattacttataatttggcaatggtagttccttctccccagctttgataattttaaatattcttaaagaaacaaaatctaaatattgaatgtaataacaaaatttaaagaaataaaaaatccagtgacggtcatcccatttgcttatcttttttaattcgctgctctttctcgatttaattttgtcaacggagtagcatgagctttagagaacttataaagtaaaacaagaagtgcagtgacataaaatctacagttcataattctttgatttagaatctgactgggagtacattctttcaggtttagtttgacccagaatcaaaatatggtttgatatttaaggggaaggtatgcttgcctagtttttggaagtgagtgaaaacgaagatgattaggttagattataatgtgaatcatacattgcattggacaaatttccattagtatgttgagtccgacatgttctgaattagtcctgaatgggttgtgttctggtcggcactatactgcactttcttatctcaacatgacatcgtctgtgcacccccatcccactttccatgaatgactccatttctttctttgtatacatatacatcaaatctgatattgaatgcctcgtggatttatttgcatttatacgaatggtgtctttctgtaataccttttgttattctcttatgatatttttattctccgatttcaatcagtgctgtaactgtattttatccagtaaatataaattctttttactctatctgccggttctaatatatttctcactgatgcagattctataacattagtcacttgttttccttagtttttaactttttattgttatattagcatttttattttattctactggagttcttcattgttgtgttggctttggtttcaggaattctctcctggttcca

SEQ ID NO: 8289 - DNA, 562 bp, Prunus persica
  Intron number 4 from transcript ppb013415m (locus ppb01341 5m.g) derived from phytozome v7.0 (chr-ID scaffold_2; pos 21486944 to 21487505)
taattgacattttagctcttcttccacttccacaggtaattaagagcatccttttcatattcttctcacactaattaattaatttgatttgaatgctggtataaattaaacattgtattttgtcactcacaggtggtaattatccttttcttttctaaagcaaagggctggagatctttgaacatagcgatgcttatgaattctcttgctatggtgcaatatgtgccacggattcttcgaatttacttctcatgtaaggaacttaaagagagttttaatgaacgtattggactatggattaaaagtgtactcaatttctttatgtacatccttgctagtcatgtaagtttcagtctcttcatctttaatttatgtaaaggttgatgcataatttttcttttcttttttttcttcgttttttttcttgatcaaagcttaggttcttaaatgaatcaaccttacaggtccagctaccgaagcatatttgacaattcgttctaatgaactataatttgtcaattctttaggtactcggagctttttggtacttttttgctattca

SEQ ID NO: 8290 - DNA, 541 bp, Prunus persica
  Intron number 1 from transcript ppa020587m (locus ppa02058 7m.g) derived from phytozome v7.0 (chr-ID scaffold_5; pos 16767507 to 16768047)
cgaagaccactccgtcaagctctacaagtttcctggtcactatcttccccccatttctcatgattttcgttttttttttttgggttttgtagaaattggggtttcttgcatcggtttgattctttgggtttgaaattgagtaatattagattttgtcaatgtgatgtgtgaaatgcaggaattggaaggaattattgaattttaaaactcactagtgtttggatctctgaaaaagaaactgaatgcttgcatgtgtttagagaattacaggttttataattgcaaaagcatactatggttatgaatttgtcagtgtaaactcctggatgtgaatgtctattcattacctggttacgcatgtcattacaaattcaattattgattgggccttgcgaattgttgccatgtctaataatctttggaattatgcttgtttgaacttccagtttgatttcggggaaaaaataacttatggtatgattaattttgtaattcaactttgctaggtggagagtttcagactaatattaccagattcacg

SEQ ID NO: 8291 - DNA, 4102 bp, Prunus persica
  Intron number 1 from transcript ppa005442m (locus ppa00544 2m.g) derived from phytozome v7.0 (chr-ID scaffold_5; pos 3136950 to 3141051)
ttctcgtacgtttctcaataccaccactgaagaaggtgagagttctttgtcatttcagctgtttggctcctgagaaaatgcaacaatattagactcatatttttgaattgaaatgttccccttcttgataattgaaattggttgtcaaatttatttttacgaccgacttaaatttcggtataagacttgagtggtggttgtctttccttccattttctttttgttcaaagcttaatattcatgtgccttttttgcatgatactttatgcatagtagattctttccttctttgagagccaaactgtactctacttctgtgaagtgttaaaaaagcaaatgaaggttagtttatttcttgatcacgtagcatttctttctgtttcccaggagaagagcatgaactttttgatatgtatgttctttccacaactttcttttttgctgcgtaggagaatatagaagtgcttgcaatgttactttttcttttatttttaaactttcctgaatgagctgagtatttcactcggaaagaattttgttctcccaacttggaagtgatgaaaatttctttcaatttcctttaactttaatttgatgaccaagtgcagtggttgaagttctgtaaatgtggagtaatatgtatttattatgccacattacaaatcataaaaagatagggctcctttgtttttccaagtaagattggtagtcttccatagcaactttatttagttcttgaagttccaattaagtgctttatgtactcactgttctgttggtgctttggtaatagccgaccatatatgtgtttggtgcctgatttctgcatgaattaaatctacataggggagtgagagagttttctcaagtaggttttgggagaggatgcatctctaatgtttgttataaatttggaaatgttgacaaaaaagttcgggttgcagtagccatatttatgttgagtgatacatgtatgaggacccaacgtttcttgttgggcatgtatatttgccaagtgatgtacattgtttgattgttaatccttaatatttcactttttaaaacccaatatagaatatgatataaaaaggcttaggtacattatttgtgtttatgatgacttcaaattggatacccatcttatgtaacactatcaggcctaggtctgttattgttgcatcatgcactagggcgtgaaactgtagactggtttatgtatatatctgtggatgtagatgtggatgaagatgtagactaagtctgagaaaaggacaataaggagaatgatagtgtcctctagaaggtattttatgggatctagttgttactttggggttgtaaacgctttgtgcaaatatgtatatatagaatcttttgatattctgtttttaggaaaaatgatttatttacagaggagttataaagttatgacaaatttctggaatctaattaaaaacccaaaagtctttcatactctgaatactttatttccttatacacagttattagaaaatattggtttttcactacacatgagttgtcaccttcacatccaaaatgttaaaaatggcttattcaatggtggttgcctatttttgtgtgttaagcaccttccttgtgtttgttttcatatagattgtacatctcatacccgtaatttgaattgtttgcatgtgcaacccaaattttttctttggatgagttatcttggtaagatatacttaatggtttcgccgttccaagtccatgctaataagatatccatcaatgcgtgatatatggactcaccaatcttgcatgataaatgaaatgggttcactaaccatataaaatttccaataattcaaagtggtgcaaaaaagacgtaaaaactgaacatgtgggcatcaaatggttaacctttcatcatgggcttgtgtttcatgtaggtagattttttggcagtacatattattaactattgtaaagccatatcaagtgaactttctggctgttcttagactaggagatggcctgtgtagtgatactacctctagcgcattggttctgtattatgcttacccacgataaaattcctatgttatatccccatcatagacccaaaagagaaagaaaacaaaaagaaaaagaaaagatagattacataaaacatagattaagaggaaaagctatctatgtgtgtgtatgcatgttttatgctttataagctataaacttctccaaagaaaaggacggtgcaagtccgttggaagtctacaggagatatttgtttattcaagtccatagattccaaatttctaaaattggaatggtatacttcatagccctatgcatttatatattaggtaacttatttacacgtctacatgcctacatatacatatgcataagtacctacatttatagagatacgtcatatttttctttggaggggccaaaattttttttttttttttttttttgaatagaaacattgtattgataatcaagaggaaaaatcctcgatcaaacaagaagaccaaaaaaagagtctgacctactaagaatgaaaaacaaactgtataaaaaacacgaaaaaacacaaaaaaacttcagtaaaatcatcttaagactgccatcatgtctctcatgatggtagagtagtgataatccttgaactgccccgaaaccgaagcccaaagggatgcccaaaatttaattctgtcccataattcctcaaccctaactcctatatgaccctgaaaaattctttgatttcgttccatccagatattccagaaaatagcatgaactagacaatcacgaaggattccagctctcttccccttccctgaaatcctcagattgatactaaggagctcaaaacaccctttaggaatcacccactccactccgagagcacccaacatcctccaccataatcttagggaatacgaacaatgaatgaacaagtgatcaatgttttctgcattctctttgcaaagaacacatcaagagggggataagcacatctttggttgcctcctttgaatgcaatcacaagtattaatcctaccatttgctgccagccatacgaaaaattgaattttgaggggccaaaatttacaaaatcatgtctgatgttctatgaaattacaaattatttgacctaagataatcaaactttctactcgaaattatgatatcttaatctattcaaacttgattttggtgcaaaaatgaaagccaatatcatcaacattatgttttttaggaatgcgtgtgcggtttgattgagcttgttatctagaaagaacaaaaggaatacctgaagaactcatttcacgtatagccatttactttaatttaaagtttgatgtttaactgctgccctatctgaagcagaggtcttgagctgtggaagggaatagaagaatatttgaggataggaaagaagggttgttttcagtgtgggacaaagttagattccttgcgtccctgtgggcttcattatggatgtcccttctggtttaatttaccgggattggtcatctatgctgacttaagtagtttggtttatttggtttcgggttttgctgtattcctgttggatttcttgtccagcctgttttgtaacttctttatttaataaattggtcatttcctataaataaaaaaattgtacacactatgcacacacacacacacacacatatgtacatagatacatatgcacactactttcatctttggagtgctcttgattgtaaggtgaaacaattattagaagtcctagaagagttatttgctttcctattctttcatttatatactttcatattttccaattgcagtctaattttttcactaagaaattaacattaatatactaataatgatgttatatatatttttggctgacctgacttccaccaggatacttgtagtttaacaaaaggtccagctttaaatattctacatattttatctttgaataatgggagaggggaccaagagctaggtggtcattagaatgcagaaaatctcctttattaagctgttgactaatttgaaatgttcatttgtagagctgctgtctgcaataaggaaggaaacagaagct

SEQ ID NO: 8292 - DNA, 4059 bp, Prunus persica
  Intron number 2 from transcript ppa008935m (locus ppa00894 2m.g) derived from phytozome v7.0 (chr-ID scaffold_3; pos 4027422 to 4031480)
tgagctggtctctgctctgctagaaggccggttaggtggtgctggacttgatgtttatgaaaatgaaccagaagtacctgagcagttgtttgagcttgagaatgtggtactcttgcctcatgtaggaagtgacactgtacaaactgacactgccatggctgaccttgtgattgggaatcttgaggctcacttttcaaacaaaccattgttgacaccagtcgtttaacagagtatttgaaggtaaagttgattgaaggcttcattgtcttgttctggtaccaaaacttcttcaatccatgaccattgtttcaagagttggcaaagaatcttggtaattaaagtgcatattcgcttctgattgactagagattgattgcatccattttgttcaattattgcaatttccgcagtggaagtagttgggatggctcctaaacaagttttgtatggttcacttgcaggttcttgtgtgttttgaagaatgaaggatttcatccttcacttgcaagtgcttggaacctccaacgagtacaacaatctgaagtatccattaagtggtggataccctcaatcggcaagatctcctttaccctatgaagagtctgtaatttcaaaatgccctagaaagagagaaataagggaattaaagtaatgaaattaggaaatgaaattacccttaaatttggtggaacaatatttgacaaacaaaaaaaaaaagggttggaagtgttcattgatagaagtatcgtctccccttataagttcataaaaagcaaatttttttttttctgaaagagttacaacaagagatacaaaatcccaatctagaaacccaactcaaaataacccagagcaataaagaaccaacgcaaacacaaaacgtacaaggtccgcacaaaatgcatctcaaatcaaacataattaccatattagcatagtttcaaaggatagcaccttctacttgccttaaaaatacctacactccagttcttgttctctcgtcttttgctgaagtttccatttccaattttccaccgactccctctactatgccagcccatttttgcaataaactagtctctcgattcagactcatccttgtgtcacttctttttcagagaatcttgttttttaggtcaaattatggagaatcttgttaaacatagagttttatttactttttgctttctaattatttgtattttaatataagctactgttttacgtttttcttcctttaaaatgaaattgtgttttgaatttttttctttctaacgactttccgccttttaaatgtttcaagtttttttcaatgtttaatcattctgtgactattgctcaatctaatagttcaaaaaagtttcttaaaaggagttcaagattgagtgaaccgttgaatttacattcaacgatgagtgaccacaaatctcttggactcctgtggtccaagagatcgggactgatatatatatatatatatcacattaatgattaacaaaataaacttttaattatttagcaaaacaaaattgcattattctattaatataatttatcttattttttaaaaatcaaacatggctggtcactacaacacgcttggttttggttgtaagctaatctcaatctgccttcatccaacgagacgtccacatttcactccatttcttcccttccactggtcctcctctctgaacaccacacaacaacaaacagccgtccatcactaccagtccacaaatcccaacctttcccaccgttttgggtgccaccaatcgaaacccagtaccgaaaatccaacaatggagtccataggcgttctcatgccagccccaatgtcctcatacttagagcaagagctcgagaagcgcttcaacctcttgaagctctggaccgtccctcaaaaaccccagttcctcaaggaccattccagctccatccgagccgtcgtcggtaatgcagggaacggagcggacgccgagctcatcgagaaattgccgaagctggagatcgtagccagtttcagcgtcggggtcgataaggtcgatttgaacaagtgcagggaaaagggtattcgggtcaccaacacgcccgatgttttgaccgatgacgtggcggaccttgctattgggttgacgttggctgtgctgagaaggctctgtgagtgtgatcggtatgtgaggagcgggcagtggaagaagggtgactacaagttgaccaccaaggttgtgtcttttctctgtttttggacttaatttgcattggttatgcttcttttttttttcatctacttaccgtagagttggtttgtttttctttttttcttttggtctcaagtaatattgattatggtttttgtgatttgtgtctaggtttaaagtgaaattttgaaattgtgttttgttatttgttgcttttggtggaatacccagtttgagtttatggtaaaaatttaccccaaaaaaagaaaacccaattgtttgaaagaaataagaaacgtgatactggtatcgaccagttgaattgatgataaagctttgttgttaagcacaagatgtgaagtcctggatttgatgttctttactgagtttagaatttaaaggcatgaaatagtagtgcttctgcagattagcagtcagtttaagtacaggctgaaagatgtcttcaagtgctgttgtctgtactgaaagcaactcttgtactgatgtatttaggatgacatcaacccatacccgttaaagggaaagagggtgagatggtattcagtattgattgtttgtttctgattcttttttgaataggttcttctgtagatgtaatgaggaaagcttgcggccgttgttgattgtttgtttctcattattgtgtgtttatgcgtatctgtgaaccctttgtggttatggagtgttcatcgcattctatttctttggttgaaaaatgcttgcttactagctgctttgctcttcgggcttggtgtatttttcgtattgtttccaattttacagtaatgcatttgaaaatttagtaacaaaattcacgtccattctgtacaatactttcaaactaacacggttattttttatctgttttgtgtgcaaatgtcaatgcctgttgaattacgcatttttcgatttattgttttcctgtgtgtggttcttttgtcatctcattggcaatatcgtggactttgctatttctcaatattctgtgtaattgcttttgctcctctgtctttcacgtataaactgcttccctgtaggtttcaaagagttttgccacttttgtataagctgcttatgtgctatgcacatgatagcataagatatgaagtcctttcatgaaatcaagattctcaagatgttttgttattatggtagttcgaatgtaataattttgtgacatgttgatatttttgggttctttaccgcttttaattatgtctaccattttaaagttggagacagatgtagctctaatttgaaatgtcgagtttatcaattgatagaacaagtagttttttttatatacttatttataggaatgtagaacaaatagcttttttcccctttctctttccctttcttgggtcctgaaatagagttagtagtgaattagtaactacgagctagggaaaaatctgcctaaaacatttctttcttgatttcaacttccattcatatagtatctttgttttaatagttgtcctttctttacagttcactggaaaaacagttggcatcatcggtctgggaagaataggcaaagcagttgcaaagagagctgagggttttagctgcccaattgcttactactccagaactgcaaaaccagagttgaagtacaaatactacccaagtgttgttgagttggcctccaactgtgatgttctagttgttgcatgcccattaactgaagagacccgccacattgtcaacagggaagtcattgatgctttgggtccaaagggtgttctcatcaacattgggagaggccctcatgttgatgaagctgagttggtatccgctctggtagaaggccggttaggtggggcggggctcg

SEQ ID NO: 8293 - DNA, 1039 bp, Prunus persica
  Intron number 9 from transcript ppa001650m (locus ppa00165 0m.g) derived from phytozome v7.0 (chr-ID scaffold_2; pos 18715790 to 18716828 reverse strand)
agttgtcccgccttaaacagcatttgttagaaaaggttatatgtcttgaaaatatccattatttgcattgtcgtgcatgacattttgcattcaaaatttgagtggcatcaaacttttcacgttttaaactttccatttgaatctgttgttgatgttattagactgaggatattgttcagtggattatcctttctattgcacactcattgtttaaattgtagaggacaatgtatttttcctagtccacatgatagtagctgtgaactgccttagcagaaaattgaattactgcatggtgcagtaataagttatatgatatttgttgacttttgtgatgcatggaccttttctctttttcaagtgaagtttgatttgttctgctagacatgaattttgacactccatatcttacttccaaaggtttctcctggaaatattatatgtccactgttttgatcttgtctactctgttagctgttttttgggtgatttggttgtggaggaataatagaattttcagaattatagtgggaatgagagaactctttggataggctttgggcatccttggggatttagtgtccccagcaactagtgcctgtttgttaagtgtaattttactaaattggggagctgctgtgaggtacataatttcacaattagataacatagttgtttgattttgtattgatgatctttgttcgaggtttaaagttgtaactcttgttcatagagtctctgtacttattttattattttattcttcataaatgttttctttcattttcattattttgtgagtatacttctgtgtgtaagtttggttttatttactgtgtacagataattttggtagtttggatatggaactctttattttgttcgtattatttatgagtaccgttttatattgcacgggaaacattcttggtggatttgtcatcctgtatataccaagtgaaaatgtcatggaaaattattgacgaggattttttcttttggcttatacttcgtgcaggaatctgaagagtctgaaaaa

SEQ ID NO: 8294 - DNA, 2721 bp, Prunus persica
  Intron number 1 from transcript ppa007604m (locus ppa00760 4m.g) derived from phytozome v7.0 (chr-ID scaffold_1; pos 45163537 to 45166257)
gaaattcatctaactcttcctcttcttcaggtatgctttctgaagtggaattgaattgcatgtgattggtcgctatgaattttgttttcttagattttgattgcgggtgcgtttggtttatcttgcttcgatttgtgtttatgggtttgtgatcgtggtgatagatgagcatagtgggaaatttcaacgtttataattgtgaagtttgactttctgctctgtttgggttccggggagctggagcatgtagatgtcgaaatctaccgtgtactgaacttggattctctgatgtttaagctaaacactaagttttaggcttggaacctaagaaaacagaatgcccaaatattagttggggagtgcatttataggcctgaggggctggcccatcatggggctgctggtaaagggtctgcttcagctatctgcttataatcatcagatacccttggtgcgcatgggattaggcctctatcactactgctttcgtaaaaagcgaagcttcctttgtagaacattttggtagtttttacctggatgggtggaacaggtccttggagatccgcatttatcatactaggcaatctccttgcaaacttgtatctagcttggtgggacaagataaatttatggtttgaaagccgtagtttacctgtttcttaaggaacaactttgggagatgttctagtccgagccgttaaattggtggaacgaggatagtcatctgtgccgccagctactatgcatcagaatgaatacttgttcctagtgctgtacgggacagaaaagtgccttttggaactagaatggtccatgttaatgaatagtgccttttgcaatatgctaataactatactttgcggcattagataatgcaacttatccagcatcaaccatatctctcatcacaattgtttgcctcttggagtaactatatagcttacagatgctttcttatttctcagcccgttaaagtttcattgttagtagacatagtagatccaaaatctatgttgtgcatattgagctgggcagggtcatggggttagttgacacgatacgggtacagtggcataatttggtctgcgcaacaccctatttttctttttcttttttccttttttccctttggaagaagggaaaaggtggaaggaaggagggaaactcatattcgaggtaaatttatgtaaagccttattgtatttctgctcaagttctcagcattttcaagacagtatcaagctgtgttggatgtttgaaggagttaagtatgttaagactagctaaactgccaacctcatttcttgttttcaagacagtgacagttggtggtattgctagattactcctagaaggaagccaagcttcttatcattgtcccctatctatttgtcatttttacaatgctattctatttttaattttagcatccaaggtagagatgtgtaatgctttatattaggcgcagtgtccatattttctactcttacagcattatacaatttacttgactgtttggacaacattgacaaaagattcatttgtttcgtcgaattagagtctggcacataagtgtccccacttgtgatagacagtgattgtttggtgcattttgtggttttaaaatcaattcttggtcaaagagctattagtttgatcttgaaatgtcaagaaattgagacctatcattatcagagcttgcttaaaataacaagggaaaccgtgcaaggactggagtatctgtagatactgcgttcctgcgaagaagagttaatatctagattttctttacaatggatacaactactaactcgttgtttagaatttacaggatataatccttgttctcaattccacacaccacttcctatacctcaaagagcctatgaatatgttctatccaacaatagagaaaggttcccttgtaaacttatatttctttgcagaaacccattttgtaatctacaccaacttgaatgttagtgttttttttttttccctgggtactcaattctattggtttagctcaccaatcacttctcagcttaaaacttttccaagctgtagatttttagcatatatggttactgctttaaaggatcatgtatttggtggtagtttactagattttgttgatcccaatagttaggtgtagaatggccagaagggtaaagtgtctttaatttgaaattttctgtccagtttaatatatatcttcactgctttcaggaagctaatgatcttttctgtttttttattggttgtggagggagttgaacccttgagctatcctaatcctaattcatcacccaccctccttcatcacttgggctagccccaagtgcttaatgatctattctatttccgtttattctattgagagaatatcctcggcttgtggctgggattttaaataatattactttcccttacacttacagctctacgggttctaccttttttctaagtgattatctacatggttctttctttcttgtgttgtttttacttcataaaatcctaaatcaatccaaaatacatatcctccgtatgtatgtatgtatgtatacctgaaggcaggtcttagctttcacgtattactttcattgagcatggtctagggtcctgaccaactttgtacctattgcaaaaataactactgtttttctgttacaacttaatgtatgacgtcatgtatggtggtgatatttcatacaggaa

SEQ ID NO: 8295 - DNA, 3480 bp, Prunus persica
  Intron number 1 from transcript ppa009502m (locus ppa00940 2m.g) derived from phytozome v7.0 (chr-ID scaffold_7; pos 4141675 to 4145154 reverse strand)
cccatatctcgatctccccctacccacccctcaaggtacgtgttacccttcgatttatcacatacctgcttacctattcgtttatttgttatctgaattgactgattcttttgttgactgtgttgcttattgaaaatattttgtctttattgggtgcgaatttgtgtattggtgatgcttgatttttgttttgttggattgtgtttaaattaatcaaaatgggtgattctggattctgggtatatcagtttctgaggttttaattgcaaaagggtagctggtatgtcatgcggggtggtagagtttgtatggtgcaaaaattgaaatattagaatgtgaggtattggttgccttttggataacatttttgtctctgttagaatgatgatggcagatgattaacaaaacagaaaagataaaagttttgaaagaataacagttgcaattctataagtttccctatttgttatcaattggctaattacagaatagaagaaagattggaatttgagatagctgtgttctggaatgtggttgttttaggtaaaccttccctttactctttcagtatgattttattcattttaattagttcgtttgaggcatggtcaaggacaagggccttgatttgttcatttttcttttactcttcgagtttgattttattcatgtgaacctacgaatatgtcttgaacccttgttgtataactctgccaaagtcctaggtcaagcattacataggacttctggttaatcactcaatggggtgtctagtgttagttactatgttatccactgaagaacattgtatgaagtaaaaatttgtatgatttaaggtattcgtttttgtgcttacatcgatgtttagctgccttgaataattttacttcataatacgagcattactattaataacactaaagaattggacaaaagaagcattcctgttaactaaggaaatgagtacaaaacatcatccaaatcttcatctcccatctcaaccaagctttttttctggtcatcaagcttgaagaggctagaaaggacatgtctatagtatgggttgactagcttgtcaattcaatttttctaccaaatgcacactgcttcattgtccatctttgtaatcatcatggtacaaattgatttgaaaacatagtatactatagacatgtcctttctagcctcctcaagcttgatgaccaaaaaatcagctgggttgagatgtgagatgaagatttggaatatgttttgtactcattttcgtagttaacatgaattcttttttttgggtccaattcttagtgttaatatttttatggaaagaacagttttttttttttcttctactttgttaaaaaaaagaaagaagtaaattggatagcttatttcatttgatttaaatgatggaataaactctttagtcattgttaagttgtttatggaaattaaatacttttttttttctctacaatctctcaataactttgtgatcataagttacttgagtagtccattctcttacagtgggtttagtacattttccatgcctttgtagcacacttctctttgattttggcactaaattgagccatttatatagtccattgagaggttgtgaagtagtaggctgtcaatcattgactgtcctgaattaaataaagatgctatttaacggtatctactaatatcctcattacagtttttattattgctgaaacgtttaggaacaatgaaagagattaggatatagaagatctaaaacttgattaggagttggtagttgaagagggcttacaagtgattaaatcttgaatgatgtagcaggagccagaaaactgctgcatgattgtccagaataaggtgtcttaaggatttagagtgttaaggttagaggtttgttatagaaaggcttttcaggagtcaaagtagagtaatgcagtggtgatatgtagaaatagggttggttatggacacctggtcactgcagtgcatgaatatcaatggaagaaagagattaaattataggcacaaaagctagatctccatagttaccagaactatggtcagaacgactattctcctaggaagcatctcagctattgcagatattcttttcaatatgttctttattggaatgaaaggagtacgctgcagaatttggagttagttcatagtgtgtctttttgtctgcatacggagagagagagaaattgacacactcccacacacgagcttctttgacaggatccagctttatgggattctactttttctttagaatagacgaaattttattgtggaagacaataaaagcagggtagtcaagatggctatgggattctaccttttagcttttagttttagttttttattattgtttccagatgcaatgggatttgcttcttgtgaagggttaaatttaggggttggttacaggtgaggttttagagttttaagtgtaagggagaaagaatgaagtggaaatggcttttaaacactactcatttgttgagtattgttagatcctaaatacccactgcagaataggaggcaaacactaatgctgatgaaaattgcctttgtggcacattgtagtgatgggtgcaataattataatgaagataaatgcagtgattataaatgatttttaaaatgaggatatgaggtgttgacgattgtgaaggtgggttgacgtggcacacaagaattgctggcaaatggtgatgattaacctcagcctataatgtttattgaagtgatattctgcctttgtttatagtttgtttgttgctcacatttattttatcaaaatgggcttccaatttatattaatttaaaaatgttcttgtttttccttgtatttagagcctcaattttttttcccgctagaccaatagctagttgattattttatgcatttttttgtttatttttttgccttaatttttttttattctgtaaagaaaagaaaaaggacagcgacctttttctttgccatatttttctaataattatatgtgaaagttttgactcttataatgtttcaaatcaatgttcatttacctggtgcacaaatggagtttgatcctttggaagtcatggcgtttgtggtttgagtccaagtgtatagagtggagtgtataataaagtcaactggaatgtctgtttgattgcttttgtgtcatctcacagtttaaactttcttgccagaaaaatatggttattaaaattcaaatatatagttagaatctagtgatttcccaaatatcgaccattaacgcaattttccctttatttttagtatcttttttctcatcttttccttagcttccattataattgttcttttaactcaataatcagttgatggtagtatgaaactttttttaaagaatacaacaattgcatgacctactttctgtcagttaaaaatggagtattgtgaatgttatttattttcttatcttcttcaggtgg

SEQ ID NO: 8296 - DNA, 1634 bp, Prunus persica
  Intron number 5 from transcript ppa000116m (locus ppa00011 6m.g) derived from phytozome v7.0 (chr-ID scaffold_4; pos 20409561 to 20411194)
ctaagtacaggaagacaatctcacgtgaggaggtattctttttgttcctattttttaattatttttattttagagtttcttttagtagtaatcgtgtataaagaagaaagatagatatattaatatgttatttaataaataacttgaactgtatctaagttaggccattggatttatacgacttctgttgctttaagatctaatgtatgctttctcatggtaacaagatgtgatatgaggtacagttatgcagaatatgtgaaaggagggtttgcaaaatctgctcacaccaacaaaaccaacccaaactaatcaaaattaattttttttcttactcatatttgttttttagaggacaagaagcttaccaattgattattattatttttttagggttgccggtataagtatagaccattttacctattgagattttgttagcttaaataaatttttttttttttgatgtccatctaggtgaattatataaatattgcctttcaaatcgtggtgcattatttgatttgatcattaaattataataaatagaaagaattaattagattgatcaataaattttaaagtgcataaatggatgatgattgtttagcgaaggaagttaatgggaacattttcttgaggaagatgatcgtgtgagtaatatcagtaatgtagattggaggtacggtttaataataaagatggtaacataacaagaacaaataacatgattgatagagattttttctttttttctctctgttttaaagtagggccaaatactcttgaaaagaacatgttactgaaaatgtagggctgaatatgctcataaaccacatgttactgaaactgttggaatccagtgatatgtcaacgctcccttcaatttttataccaattatagacgcatgggttaacattcactaatagaaattcttttggggtggcatgcatggagaggaatagaaggacatttgagggagcacaggttgatgaagtggatcttttgtgggataagttcgctttgggcgttgggtgtccgtttcttcagcatttaggatagttcctttcaggctttattttgtgattggagttccgcgtttcattcatgcaatattaaggtgttttagttttgcagttgtagttgagcagtttactctgactattggacaacttgtcccctgtattgtaattttccttttttttttttggtttgaaaaattatttttattgatggaagtatttttggtatgaaaaaaaagcataggttaagccaggcctaccatgtggtgttttctatgttattcttaggagatggtgctcaaaacatgaatatgagaaatggataaggagtgagacactggatataaatttatttcttcaatgtccttcaatgtatactgttccttttcttattgaaagctcgtgtatactgtcgtttaaaagttgatacttgatcttttataaacttgttctgtttctttcccatgtgtaattgctatttcaccttcattgtcctcccataatgatagaagctttagtaactattgttattgttttttattcatgtgaagtagctcatttatcacttttctttttctggggttatgtatatgcctgctagattgaggtcc

SEQ ID NO: 8297 - DNA, 705 bp, Prunus persica
  Intron number 3 from transcript ppa003990m (locus ppa00399 0m.g) derived from phytozome v7.0 (chr-ID scaffold_2; pos 2166424 to 2167128)
tgaatttgtgaggcggatcaaagaagcagtgagaagtcagttccctgcctttttataattttctcaatttatcatgcaacttatagacacaggaatgtcatgctagacatgtctattcatattcttgtttgagttagaaaaatgcacaaagtatgtgccaaaatctttgattgttcttttttgaaggtttggctgtgaagtcctaatgtaaaattgttacgattccagttgttaatcaagagttaggggctcttctcccaagctttaggatgggcaatatggaagctccataagttattgtaagaacatatgtgaagcagacaggagttaaattcaaacaattaaactggccacgtagatgttaaaggtcatagaataaaaggtagggcgtttcatttagtaagaaatattaaaccattaatcactcttctttatgtgtttgttgatcaccatttagcctgcaaaaatagttctggagagggagtatttattgatgatgactacgactaacaatctgatataaatcacttttaattatgaaaagcagttgtgcagacagagcatcattggcaatgcctaaaattcttataaaatggatgttctgaaatagccattgaatgtttccaaaataaatattattgtgtttgttaaattgtatagtcttttgaaatctcgtatttgaaagaaaatcaaatgaaaaatcag

SEQ ID NO: 8298 - DNA, 1234 bp, Prunus persica
  Intron number 1 from transcript ppa004618m (locus ppa00461 8m.g) derived from phytozome v7.0 (chr-ID scaffold_2; pos 577201 to 578434)
gaggtaaattactttcctactcttgcaatgtagtcagcgtcaacagctcaatgatgctggtataatttgtcattgctaggaaaattctgtgtggttgattgtgatctcctctttgtccgtgcatacattctttcctttaattctattgtttttagttttttgggtatttaaagggatgaaaatatatcccattaaaccaccaagagtgcccagtagtttgtccgtcatttgggtaaggttctgaggttcggttggatttgctccccagtttgagtccaggcaattgcaacacctggtggctagcagcaggctcagttccgcgagtaggaattagtcgaggtgctcataagctggcccggacacctcatggtatttaccaaaaaatatatatataaatcccaacaaaataaatgaaaatttcacgattctagtttggtactagccactctaaccactctttgtagtgtaccacacgtttgcatgatggttgctagttttctttggctggaggtgacccaatattgtattcatcaattattgatagtaccgaaaataatagttcttattaaccaaagggttaataatctatagttcttattcatcaattgtatcaattataatataatgactttggtcaagcaaccacggcattgtgatcatggctcaaacacacatggatcactgttaatcgtaatttatgctagaatttacatccatcaatcactgacaatgattcatgcacgacggacaaactgccctccttcgtattttctttaacaataattaattaccattactcattattttaaatatttttattgttagaaacatttcaactttcattcacattccccaggtggcttcctgcctccctctttaatttgcggaatggctgggctaacaaatcccagaattcactcttgcggaggatatcccggcgctcaagctgtagctgtatatttttcagtaggggaaatataaaaaaattttaaaattcaacgttgacaaagttcttggttgataacgtgcagctcaattatttatcattaatataatgaatctaatttttttggtagagagagagaccctgaagactataacttcctcttgcattaagctctgtgaattggatccagtgacattatctattagtttgatggcaatttaataattatattacctgtgtgtctataatttaaacgttgcaatgacttaatgtcttgacaggacctgg

SEQ ID NO: 8299 - DNA, 1739 bp, Prunus persica
  Intron number 1 from transcript ppa009054m (locus ppa00905 4m.g) derived from phytozome v7.0 (chr-ID scaffold_6; pos 15821462 to 15823200)
aaatacttggggggaggttggatttattatggtcattgttatttataactctccccttaaaacctacgaaaatttatcacttaatgaaatccttccaaatatatggcatttcaaatacacctagatttgattcaagttttttataatcctaattgaatacacccatatttgaatggactttttaaatgttcatgcaagttgaaattgaatacacccagacttgtaaaatctcttttaaagttcgtataaatccaaattgaatacacccagatttttaaaatctttttaaacgctttataatcctaattgaatatacctcccttagttaattttatatttttaattaaaatattaaagaatacctagttaattttaccttttagggtatattgccaaaatgccccctgaacttgtacctaattatcaatttaccccttgaccttttttttcaaaaaattaaggactcaaactaaattttattctcaatttcccccttgccgtctaaattctcaacatttcatccaatgttcagttaaataattaaaaaataattttttttgggaaaaaaatttaaaaaaaaaaagaggaaaaaaaacctccccgcagccatcaactttcttccccaccatcgccatcacacctctcctcactacaaccagccaggaagaatgaaatcggaatttgcataaaagagatcggcaaggctaaattttttaatcctcctctctcttttcccaacccctaacagtcacaaccagcctcacctcaatctctttacccaacctctcaaattcaaacggccattggagcttcatgaagcatgataattcccataagccactggtgtggctttgtgccaagcagaaacatggagcagagtagagaaaaagaagcacaaaattgcaaatggcaaacctcattaaattcagccatgggagaacgagatcgaaatttgcagaaaagaaaaccctatccctacttacaaacccaaacccattcgcgccctttcccccatgattttcccccatagccttaaaggtccagacctcttcacctcacaagttcattgccccttcatccaaaatcttgatcccaaattgcacaactcatcaatggattcaagatctaaaaaaaaaaattggggctgtttggagggtggggggctgatgggtttggtcgcatagagagagagagagagagagagagagagagagagagagagagaggggcagagagatcgatcgagagggaatcgtagggagagagggaagaagagatttagttgcacacacacacacacagagagagagaagaaagggtgggtgggtcccactcctctgtttattaaaattattttttaattttatatgtcatactattttattttacagtatttaattatgttttacatatgaaattatcaatttgccctcatctttaacggcaaattgaatgaaatgttgatgatttagacggcaggggtaacattgagaataaaatttaattcgagcccttaatttactaaaaaaaaggtcaaggggtaaattgatatttatgtacaagttcagggggcaattcggcagtataccctacattttaattaaaatattaggtgtattgagctaattttaaggttcatttaacaaaaacaagaataattttaaaataatttttagggtttaaccttcaggtactcaccatcagctcctgagtctgcacctttttctctctctttgcaa

SEQ ID NO: 8300 - DNA, 697 bp, Prunus persica
  Intron number 1 from transcript ppa025946m (locus ppa02594 6m.g) derived from phytozome v7.0 (chr-ID scaffold_2; pos 15128914 to 15129610)
taccaacaaaagctccaagccaagagggcaaagaagtaacaaaatatcacatctaaagataactgtagcaaaaatctgaacatggaaaatcagggacgtgtaagagatatacaaattgaaaacaaaatgcaagttataagaaaatcatcaaaaggcatgtgtataattttaattgtaaggaataaaagcaaacttatttcataaaaatcatcaacgaagtctaccaaacattaaattacaataagataaaagaacagagaatataatatccttagccaatgtgtccaagtaagccaagtagatgggagattttaagtttcagtacaattgaattccatatatgatgcataatctgattttagcaaatagaaacataccagacagtttatagctgcataacatttctcctttaaccaatatccatatgccaaattgactacaaaaagaaaataagtaaataagtaaacgctgccatgacatatgaataagctggcaaagtcaatccatattttaaatcagaatgaaagctagcatgcatcacaaaccaagcacaataagagctattaactattaaggaactctttctctttgtttctcaattccataggaattttatccaattgaaacgaatatgttaaccaaaaaatcttcttctcctcgagcgtggtccatctccttcttcattgccctttctctc

SEQ ID NO: 8301 - DNA, 4941 bp, Prunus persica
  Intron number 2 from transcript ppa010822m (locus ppa01082 2m.g) derived from phytozome v7.0 (chr-ID scaffold_1; pos 46346368 to 46351308 reverse strand)
gctactggcaagctttttgattattcaagctcaaggtaccagcaacataccttataattattttgacttttccttccttgaaaaaataacaatatgtatgatcatgatgtctctgaagtctgatgacttcacttctctctgtgtgggtgagagagagagagagggggagggagattctgagatccagtcatttggttagaaatatatttagaggagagggagagtgcctttatggaaatttcctgtccttccagaaattccatggtttgaactgtgcaaacagacattatttattgtatctaagcttccaacagaaaaaatggagaatccagaagcttccagagagacttttagataggttttttttctgttgtcgtcgaaatatacttttagatagtcatactctgtttcaaaaaaacctagttcgagggtcactaccttgtatatctatccacttaaggaaaataaagtctgcttttgactaagacaacttctggaaagatgtggtgtgtatgatggtgatgttcttttcttgtactacatgcatgcatatgtaaaactgtgtacgtatatatcttgtttagcaaattctgtaatcttaaacccttatacacaagtatatctcgctgcttcaatctcatcctttcccacctatcacatgttggtaatagatattatataatatcttaggtggggcctatacaatgaagaatatcattgtccaagtccaaattaaaattaatgttcccttgtgagagacacgatatgttagaccatcaatcgaatcatacactcaaataatataacagactttttttaaattcatagtttaaccacataaaatgatagtgactatagctagtgagtgagtattcgaccctttacaatatgtatatacatctatatgtatatatgttatccttcgaacattcttcccacttaaattaatgttctcttgtgagagacacgatatattagaccatcaatcgaatcatacactcaaacaagaaagcagattaacaattctagattcgtagtctgatcacaggaaatgttagataatctagctagtaagagagtatttaactctttaccatatatatacatatctatatgtatcttatccatcgaagttaagatatttgtgggttgtgtttgaaaaggacctaaaagacaaaatgcccgtacattaatgtggttgcaaacattgaattatatgtttgtaattttcttactaggaataaagtggtatgatgataacttgagaattcatcatagaagccttgaagactttcagcaggaatatgcatgcatgctttcaactagggcaatgggtggtggagctatgaccataacatgtttttgccatggaataagaattagatgtgcatgcatgagaggaaggaaagagagggagggtgagaatgaaatgttaactatggaataagaatttaaataaggtcacgcatcctttcatttatattttttaaaaaacacacaaactagaaataccacctccaaagtggtcttctttaacccaaaaatatactcttaaggtggtcttatatggcgatactatttgcaagagagtgaatgtcgttaaacattttttttttttttttttttaaaaaaaaagctttgatacaaatggaggtgtcagttaaaaataacaaattggagacgacatttaattgtttatgtctgtatgcaatttctaatcagtttcctttaaaagttatttttctaggtttcctaattgacatgttatatgcaaagttattttatatatttttttaaaggttttctaattgtatttatattcaagtaccagagtacttgcaaccaaaacaaaaaccgtgaaatgaatattttactattacattatttttcaaacttctcgaagtttcctagtagagcaatattggtccgaattctccaagtttggaaaagtattgctcttggatattatactatattttcaaagatttatttagtattgtgtcgaaatatttatataggaactccaaagtcatgtgtgttcatgagacttgcccaatattattattaagttttgagatgtttcattcatatttgtattttgaaactcttaagggcttgtttagcgaggccatgttataacatgttggagtccttagccacttacaccaagttttcttcccattttagtcggttcaccacttcatagtacatcttcttcccatgtcttaggtccaccactccctatgttgtcacttggttgtttaatgttttacatgattccaagttttctactagattttcatgtcctattagcctagctttggggagtctagatccccttgttccagtgggataatactattcactacaagggtgactttttaagaaagtaacaatcctttagaccgataaggatgataaatcaagctcataatgttggtgctatgactacctatgcaagtaccaaaaatgggtcaattaaggaggtagaagtcgtatgatgattttagtctttctagatgatgcgaacaaaattcaagagccgtgcgtcctgtaaaaagctagatgaagatggctaaaacacttgttcgagacactactttggacctttaatattttcttcaattctgtaatttggttgaaaatacttacattgtgggcgtctacttgcattaatgacgcatcgtgacaatcggatgactaaagatttagcttaaaacacacaactttggaatccaccatgaagtagtgaggaaaccttaagtttattgataatctgaaataacataacctaaccctagccacaggttaaaaattctttaaataccctagaagccctactaataaacaaggaattaaaataggaaaaattacaaagttttcaaaaacttataagacataaaaactggattttgggttgttaacgatctcggatgcctgaaaaagctgttctcttcgaatcaatgggtcatgggcccaaacttgcagctttctaagtgtgccctttagcgcgcctcttcaactcttcttcaattgccttcgacatcttttctacatgaattaagtatgttcaaagaagagagttcttgtctaagatgtcttaaccacgttttagtatttcgatctctaagggcgtattgaggaatggagatgatgatgtcgggacattgtagaaagctggtgtcgggatgatggttgtggatttattcacctagtagtgacttttgaaatgttttgcgcaaaatgagtggctttctttacccgttttctattctgcctgatggcttgtgaaaattttggtacaaacactaacttaactagtatgtggtttagtaatcaagcaagcaagatcttaggcagtagaagttgcctaagattggcgagttttggttttcggatgattgccaaaccacgacaagttggtttgtttaatggttctttctagcttggtatgaggtcactctggggagcttgagttttggtttaagatttaacaatcaatctattagaagatacataagtgtaacaatcaatctattaatattcataggcgcgaaagatttttccaatgtattgtttatcaatcttttccaccaacatcgaatgaccccatacaaggaaaaatgaattcgaattcaagtaaatctttttttttttttgtcaaatggtgatatttcatttcgaaacctcgtcaaaaatggggagggcacaaaaactacaaaacaaagcaacctagaaaggaagctcactaatacaatgcgtctgatctctattagagatacgatatataagttggtctctaaagatagtcaccctagcattttccatatataaatgccttgtgttgtaaactatctcagttgcttgttgggttggtcttttatatatatatagggacattctccaataaatattcattaaatatgttggtagtctcttagggaccgtatatatatatatatatatatataggttttctataaaatatctatgaaggaatttgatttgacgttttgatttgcataaccaaaccatgcgataaagccagcagcaaatagcttcacgttctcattatgcatataaaacaagtatttatttcatttcaaaatctccaaaatcatagttgtgatgtggtcttgaatgaaacccttttctgatgctatcaaggaacagtactaatggtacaaaaatatccaaatctgtaacatatatattttttaatttgtgggggaagggagggctaaattagttaatttgcttttcactgttgaatttacttttttaataaatcatagttagattattgcatgcatgtccaaagtggttggttagattattgcatgctattttttgtaaaaacatctaatggaattattctttgtacttgttttctcttgagatgattgggttattctatggtgtagcccttttttggatctccaatatataactggaaaaattctgggtctgcagaaaattggaaatccaatcctgggtttgcttgtattttgctttataattgaaaatgaaattatgggtttgcattataattggaaaccaaattccaacacaaaaagttctgaattttttgcagtggggggtaagttgtagatcactctgattgctggttatgttagttagagacacttaagtatgaaaataattcaattttttggcaagatgccatcatgctttatggcttagcgttgaagttatgccagtgataaattgcagattatcaaaaccctgaattagacattagtgtgtgtgtcttggtgtttgcaaaccagaagtttgaataatggggttaaattcttttccatttttttgtttctcatgtatgttttgtcacatgttagttcttcaatgtcttaacaatttactagtgaacatgccgattgatttttattttttttcgttttttgttatgaagtaccaagg

SEQ ID NO: 8302 - DNA, 2269 bp, Prunus persica
  Intron number 1 from transcript ppa008238m (locus ppa00822 3m.g) derived from phytozome v7.0 (chr-ID scaffold_7; pos 18357638 to 18359906 reverse strand)
ggtgcgcaactctgtcaccccaaactcatttccaggttcatcatctcttaattctcttccctttcaattttctgcttaatttcatgaacatggttcttcaattttctcctgctatttctttgcatgccgatctgtcgttttgatattgtttctcgaacccatgaaggtacatataaattgtaaatcttcttgatttgatgggttattaattagtacttgttcttctgcttcttcttcttctttttaaaaaaaaaaaaaaaaatcaaagttcttctggttctatatagttgtttctggtcacttctccaacattcctgtcttcgtggaaatggtgggtgtatctatcaaattctgggtttcctttaagttgttctaaatctagcggttgtcacttgttagcaaaaaataaaaattattcacacacgtgtcaaatggtttttaacttaagtatttcttttctttttttaaaaaaaatattttattagcacttttgaatctttgcagaatttgcacacctctcaaccacaaaattaaggcagttcgaaatgtttttggcttttttccaaaacaattaaaaagacttctcattttcgtttacggaaaataatcaaaagctagctttgcgttttaagcaagtgttgacgcgtccctcaataatacaccccttaaatcacattctgatttgtctgcttcactcgctttcaaggaggagttagaatttttttttcaaaaatattaaaatttaatatcttaattggaagcatatgagaggtgtttctttctaaaatgacttaaaatcattaaaagtgattatatagagaaacacgtagaaggtgtttcttctcagaattgattctaacctttccaaacgagcccttactcgtttttagtttttgtttcttcacttctttcggttcagatgcttttttttttcctttccctttctcttttttggtgaaaccaacccttatagtggaccccagttgagacccatatacataatgattattaatgtccatggtccctttgtgtctctctgtctcttcgtcactataatgcctaaagatttttctatatgtttaggagaagttgcaatttgcgaatacggtaacacaatacaattgccacttatactttatcatacacgttttgttttgatgatgtttgcgcatagacaaagttctgtcaattttagcatctgatttaggttttatgcttatcggctgcatcatttgactggaattgaccattcgatccagctacaaaaacttccttttgaagaatatgaaatttaaaagaaattcatgaacctctgagcattttcattgaaaaaattttgctggccttttttgtgaatgaataatttccagagactcacaaaataaatcaccgactatttgagtcatctaagaagagaaataaatctaacactatttatacctacatttttctttctttcttagtttagcgaccaccatcttgtattgtcaaaactacaagtccacaaaaaaagggcatttctcaccacaagtgagagtcttttcaattggttacttttttattttttatttggttactttgtgttgtcacctgctggatttggctttttctgggtcccaaattattattatattttatatgctttgacaaattccgattgaatttgaactttgaacctcaaggtttagcatgccttagtgttgtcaatcagtccaatattattggcatagaaattaaaagtaaacccaaattctaaatcatgttatatagatctaccctgtttttggtctgtacaaattcttctattgatattaaaataaaaccatatttaaatggaaaaatagactatttatagctgaccaaccaagttcctcctaattggcttaaaccaccaattaaaaaaccataaacattttttatcacctgggttaaatacaaagaatgatttttattttattttaaaagtaaattcccagagattcaaaagatatgcacaacaaatttgtacaaaagataagcgctctgtgatgggattgaaccaagtagtgacaaatgttactaccttcatggctatttcctccctatggtatggcctcacatgtaatatgtaggcatcaactttggtggctttccttggaaaaaaacaacttgaattccactctgtgatttttgctttggattttgatgatggctaatattctgttttcttctctctgtttgtttttgtttcccaggatttttcttttgttttagtagtgcagtaacgaag

SEQ ID NO: 8303 - DNA, 2106 bp, Prunus persica
  Intron number 1 from transcript ppa008223m (locus ppa00822 3m.g) derived from phytozome v7.0 (chr-ID scaffold_7; pos 18357638 to 18359743 reverse strand)
aaggtacatataaattgtaaatcttcttgatttgatgggttattaattagtacttgttcttctgcttcttcttcttctttttaaaaaaaaaaaaaaaaatcaaagttcttctggttctatatagttgtttctggtcacttctccaacattcctgtcttcgtggaaatggtgggtgtatctatcaaattctgggtttcctttaagttgttctaaatctagcggttgtcacttgttagcaaaaaataaaaattattcacacacgtgtcaaatggtttttaacttaagtatttcttttctttttttaaaaaaaatattttattagcacttttgaatctttgcagaatttgcacacctctcaaccacaaaattaaggcagttcgaaatgtttttggcttttttccaaaacaattaaaaagacttctcattttcgtttacggaaaataatcaaaagctagctttgcgttttaagcaagtgttgacgcgtccctcaataatacaccccttaaatcacattctgatttgtctgcttcactcgctttcaaggaggagttagaatttttttttcaaaaatattaaaatttaatatcttaattggaagcatatgagaggtgtttctttctaaaatgacttaaaatcattaaaagtgattatatagagaaacacgtagaaggtgtttcttctcagaattgattctaacctttccaaacgagcccttactcgtttttagtttttgtttcttcacttctttcggttcagatgcttttttttttcctttccctttctcttttttggtgaaaccaacccttatagtggaccccagttgagacccatatacataatgattattaatgtccatggtccctttgtgtctctctgtctcttcgtcactataatgcctaaagatttttctatatgtttaggagaagttgcaatttgcgaatacggtaacacaatacaattgccacttatactttatcatacacgttttgttttgatgatgtttgcgcatagacaaagttctgtcaattttagcatctgatttaggttttatgcttatcggctgcatcatttgactggaattgaccattcgatccagctacaaaaacttccttttgaagaatatgaaatttaaaagaaattcatgaacctctgagcattttcattgaaaaaattttgctggccttttttgtgaatgaataatttccagagactcacaaaataaatcaccgactatttgagtcatctaagaagagaaataaatctaacactatttatacctacatttttctttctttcttagtttagcgaccaccatcttgtattgtcaaaactacaagtccacaaaaaaagggcatttctcaccacaagtgagagtcttttcaattggttacttttttattttttatttggttactttgtgttgtcacctgctggatttggctttttctgggtcccaaattattattatattttatatgctttgacaaattccgattgaatttgaactttgaacctcaaggtttagcatgccttagtgttgtcaatcagtccaatattattggcatagaaattaaaagtaaacccaaattctaaatcatgttatatagatctaccctgtttttggtctgtacaaattcttctattgatattaaaataaaaccatatttaaatggaaaaatagactatttatagctgaccaaccaagttcctcctaattggcttaaaccaccaattaaaaaaccataaacattttttatcacctgggttaaatacaaagaatgatttttattttattttaaaagtaaattcccagagattcaaaagatatgcacaacaaatttgtacaaaagataagcgctctgtgatgggattgaaccaagtagtgacaaatgttactaccttcatggctatttcctccctatggtatggcctcacatgtaatatgtaggcatcaactttggtggctttccttggaaaaaaacaacttgaattccactctgtgatttttgctttggattttgatgatggctaatattctgttttcttctctctgtttgtttttgtttcccaggatttttcttttgttttagtagtgcagtaacgaag

SEQ ID NO: 8304 - DNA, 1666 bp, Prunus persica
  Intron number 5 from transcript ppa009157m (locus ppa00915 7m.g) derived from phytozome v7.0 (chr-ID scaffold_1; pos 42266873 to 42268538)
agggctgggggaatagagaagaggtatgatgtctcgataacttgaataattatgcttttaattcaataagtcatccttctatctcctggtcatgttataaatcttgcttccaaattttgatatacatatatcagtcgggaaattcttgttccaaaagttatccacgagtacttcgtttggaatgagaacaattattgtgtgttgtgtgagagagagaagtaggaggggtaaactcggaggaaactgaaacccaggataatgaccaaaagtgtattgtgtcccacaaataggcaagtgcctattttgcatttttaattttttaattttattgtatactatgtatgaaccatattgtacatgtatattttttcacccaatacagatgcacaacccatcatttaactctgccaccatggagttatcaggattaagattttgtatttgtttgtagtggattattacaaaatatttgtgattgtgcatcactctaaccttcattgatgtgggcagtggaccaccttttggccactgatgttggccaatttcttgaccatgcattaataatttcttcgtggagaattttcaagtgaggatgtttgcttttaaaatagaatgttagcacctccctaggcctacctcacaattcagtttgattatcacaactgtctacattttatgtcatctttaggggtcattcttgtgaaaaaaaaagaagagagaaaggccagattagaaactgtttggtcatataagctgtacagacagacacagtttttcaaatgaaaatgaaatggtaatgttgctgaaaaatggctgaataattgttatttggctgatttttttgtaatgcttaaggagaggcttaaaaatggacagttatcattgaaagtaggctggaaataggatgttcagatttttcttaaatgcaaacatcctcacttgaagcttcacgtgtcttcccattgaaaggaaataaatgtcgtcttggttgaagactcttgcaatttgaagtgcaaacattaaaagtttagaagatgaagtatttgaaaataagaatagatgcattgacacagagagggaaaaacattagaatctgggttcaaccattcaaatgccacaaacttagagggaatgttagatacccatgaatggatgcaactagcagttgtgtgctactttggttttcgggtatatagaacaactttttgtagttttcctatggttgaattgttaggtggttgtcttttaaattctggttttaggatatgcgttacatagaatttttatttattgaaaatatattagtcctatgccttaagtggatattgtatttccatatatggagtgaatttttctctgattaatataaattaaatgtcaagtaagaaatgagtgagttgtaatgattaaattattgtatttccatattgaacgccatctcacctattgttcaatatttgtaatgatgactttgaagtgacaacatagtctttttcctattctagacttaaaacttaatgtgcaagttagcaattccttttttatattgcatattttcaacattttattctttctttttttacatgtgttttggttaatctatttttctgtttaaatgtaattgtggtatgccactggtaatttttaacccaggtggatccagcca

SEQ ID NO: 8305 - DNA, 4087 bp, Prunus persica
  Intron number 4 from transcript ppa007954m (locus ppa00795 4m.g) derived from phytozome v7.0 (chr-ID scaffold_4; pos 13778446 to 13782532)
ctaaggcttgtaaatttcagatggtacaaagctcaccttcaatgtaaaaagcttttaacgtttggtttggcagacgcacttaattttaaatttacctgcaagcttctctggcattcccacaatttacatgctagtttgtacttgcatgcagagtacagagcccaactgcttcaacatccaaacgacaacacaaacattaaaccctgtcgttctcggctctcagataaacaaggacagattagtctgagtatttttaaattcaaaattctcaatccccaaattctatcatgggatacagatttttcatcagccaattcccaacataacatgagccctgtttctcattttcgttttcttaaacgtctcatgttcaaactctattgacttactgatagtgtgtgagaaaccacccttatatcacttgtataaaaaaaatgaaaaaaaaaaaatctttttggtccttgctctactagctgaactcaggtttcatcacttcaattttctagcctctttttggacaatttccacacaaatcgtgggttattggctacactgttctacctttactcttttgctttttcttcaatattacgtttcctctctaagctataattggtttcatcactttaacaaacttcaaaccacgaattcatcaacaagatgaaggtcttcaccaccccaacatcccttgatcgtgtacttgagccgtcaccggacatgaaagagtcagtgatggccgtggagaagatcgtaggctacaacttcaagaacaagaagcttctagaagaagctctcacccacccctccgtcgctgggtccgcttcctatcaacgcctcgaggtcctcggcgacagcgctctaaaccatgcagtgaccaactacttcttttgtatggctgaccaccaaaagttcacccaaggccaaatcactaagctacgctccgccaatgctgggaacctcaacctcgcccgcgtcgccgttcatcatgggctttatcgctaccttcgccgccacaatacagctgatcttgatgatcaggtctttttcttttttattttagtcaagcgttttctgattctgagtctgattgtttatatattttttttcaaacctttcttttttaattttaaacttttaggttagggagtttactgaagctgtaactaatggagaagaagagccggggcttgtatattgtaaatctgaagaagccaaagttcttgcagatattgttgaatccgtggcagctgctgtttacatcgagttgaattttgatctcgatagactatggatggtgtgtatttatatttatcttcttttatttaacatgaaagcgtgaaaaattttgtttataagtttgtaaatgcgtggaagttgggcataactatatataacttacgaatttttgttgttttcctgttgtgcttttgtagaaatttaagcctcttttggagcctatatttactcttgaaaacttgcatgaccccacgacagaattgaatgagttttgccagaagaacgggaagcgctatcaaatcaagctgcggccgagacatgagacccgagatgtaagtattgctgatgtctatgttgatgacgagtttgttgcctcaggttggtctaacaagaagaaaggtgcaaagcgcaacgctgctatagaagctgtaaataagttgtttcaatcggtggttgttgacgatgggtcgttccaaggtagtgcagttggaaacaacatgtcatttcgtattgaagaagcgattcaggggttgcatgtgctttgtgtcaagaagaggttgcctaaaccttcagaatacaagtatgaatctttactttatgaaacccgttatatattgctggaattatgttgtaaattctactgttaactagatccatatttgttcttctattgcagagaagagaacgtgtttggtcctccacatgagaagaaatatgtatactcagttaaagtggtaacttcagatggtaccgtgcaatctgtgacgggagatgaaaagccaaggaaaaaaaaagcgatgaattctgcatcttacaagatgatccgtgctttacagcaaagaagctaataatatggtcaacagcaaagaagctgatcgtatgatcaacaccaaagcttcgaatgatcaacagcaaagaagcttatcatacgatcaagaccgaagaatccgattgcatgatcaagatcaaagaatgggattgcatgatgggttatattccctcactctacaaagtttgggctaaggccatagggtgataataagtctcttggttttttgtttgaagggaatacgcctgctagtttgtttatccttatgtgtgttacttacactagttattgtctctgttttatccaacttggttatcttttgccaaggggttaagtaattcctattaagtgtcatgaggtgaaggtctccttcaatttacctatatatgtataaattcctttagccggacttggcaaggcatgtgaagaagataatctcattgtctctataatttctacagttctcttttccaaaatcttccacacctgcaccattatacgtgcttaattgtatatgtggttcctctatgtactgccacaagggtcttcttgtttaaaacactccggtagacatattcactgacccaaaagaaagggcaagaaagaggaaggagaggaggggtagtgatgcttcttcctcctccccctccatggagtttttctttaggactcacagagggaaaagtgcggttagggttttcaaaacttaacctgaaattggtttcaagttctacttgcaagtaagcaccaattggttgatgatttgatttgagagtagttgtttgtaattgtagctggattatcatacttggatcccactacatttttcattctctaatcttcttgcttctaatatcagctttatttctatctgttgatcaccgtttatttgtagaaattatcaacatgagaggttatcgaaacagaggttctagttatcctaaactatacaagtgataaggtaggaattaaataattatctcaagatgagatgtcgcttgtatatggtgggtctgtaaaagcccctaagattcttgcagatactgtggtgtctgtggcagctgctatatatgttgacttgaatttttatctggagaaactggtgggtgatgtgtatctttatttgcttctctttgttttaaacgaaagtgaaaagcttgattttgctaagtttgtaaaaaagttttagcgatttgtctatagactatagtataacgtttgaacttttgttattgttgtgtatacttgtagatattcaggggtctattggagcctatagttactcttgaagacttgcaaggtcaactgcaacccgtgacaatgttgtttgagctttggcagaagcatgggaagcatgttgatatcaaacattggcgagatgagaggaagagtattgctagtgtgtatgttgatggagaatttgttgcttcgggttcttctgaacataaggaatgtgccaagcttgatgctgctaaggtagctgtggataagttatcgccatcgatgggtgtaaatgatgagtcgtttgaaggtgttgtcttaatggatggatcatttcatattgaagaagcaaaacagaagttgcatgagatttgtgaccagaagaaatggcctagaccaatttgccagtatgaatctttacgttatcaagatttttctgttgtcaatcctatttgttaagcagagccatattggtttttctgttgcagcattgagaaagatgaaggtccttcacatgagaagagatttgtgtcctcagttaaaattgcaactatagatggggtgctatacatgaagggagatgaaaactcgagagtaagagatgcagacacttctgcacttgatgatccgggctttaaaaagctctacttactgcatttgaaggcataggttggatggaaatttacataatttaaactttagagaaagcaagaattgccatggactttaggaaattgctgtgtttcaatgcctcatggatgctaaggatttgagcctttaacgtttggtttgtgcttgtaa

SEQ ID NO: 8306 - DNA, 1086 bp, Prunus persica
  Intron number 2 from transcript ppa022972m (locus ppa02297 2m.g) derived from phytozome v7.0 (chr-ID scaffold_3; pos 19829550 to 19830635)
tccggaacttactacaaagggttagtcatatatattagtttttaattttatccaaattttagggttaaaaagtattaatcccttaattagagttatatcttagtgttgaacatgatcctcaacttgatatggtgataaatatatattagcaatattggtcaatggttaaagaaactaatcaacaaaaactattttctttatttcatgggagctgagtttcccatttcccttttgtccacttacactcccttttgctttttaatactttttaatcaatattgttcttttatgttctttctctttcctattctgtccttaccctacattaaggttttgataattgaaattaagaaattttaaccgaaaattaaattaaattaatttttgaaaatcgatagaaatgtaagtatttgtaatccaaattctttgtttttttaccaagtatgtgagtactatttatctttgttgtagttaatagatatgcatagagcaaggtatgcataataggctcatatttttattttttttataatattagtaattgattatacatgtcttcttattaaacggaaagggagtgtaaaggtagaataggaaagaaaaagaacaaaattgattaaaaagtattaaaaagcaaacgggagtgtataagcggagaaaatgaaaatgagaaaatcacctccctgttttataagtagtaaattaacctatgtggttcttacatggctagctagatatgccaaattcaagaaagtcaaataatatccatacatggcatatactcaacctattatataatgctatgtactcgagatattatattattgaaacttgctatacgtagatatagattttgattgttagtagaggagccttagattgtcttaattttgatgttagatcgttattgtaatgaccctttgtgattagtggcttttttggttgaattatgaatgcaatttcagaatttctataaaaaaaatccctttgcttaatttgcaatttccatcaatatttttcaatttataatactaacttagaaattctacagcggtttttacattggaacttcgtcagtagaagaaa

SEQ ID NO: 8307 - DNA, 3105 bp, Prunus persica
  Intron number 3 from transcript ppa015277m (locus ppa01527 7m.g) derived from phytozome v7.0 (chr-ID scaffold_1; pos 37199568 to 37202672)
ctgtaagtactgtcactctatctacttttcattttcgtccaatggtcccttattaaaagcatttccaatggttgggtgtgcaattatgtcgtattgtggcacatgaacttaaatgttgatgccgttccttgcgtatcaacactttgggtctaacaaatgccatgttcttttgtacatcggagttcccatctattcgatctctcaataaggaagctttttcttgatgttcaatttcggcaaagcccaatgttgtgtcatatgtggcactacttttaaaattgacattttggaacatcaaataacttggagaagagcgaaacttatactttttcattggcacatcattggtgatgctctaattggagaagagcgaaactaatacttttacattaacgctcgttttgacgctaggcacaaagtgactaaattctagtattcgactacgattgagttcgactgaaaggtcaagcaatacttgattgtgtttgaggttacattacttgtcatgctctacacaagattgattgttccatgtcttgccatcattgattaccttttatatcaagaatagacattaagatgcttggttctaacataatgaactagattcttttcttaatgaataacaccatggctatagcaaaatactaccatgtgtttctatgaaatacccaaattttcaaccaaaactcggagccacaatgcctctttcatcgtcgtagtcatttttgcctcaatcgttgataatgtcattgtagagcctaacatcaacctccaattgatttgaccttatgctagtttaaacaaatagcatcctatctcattgtttgaatacccatacacgacaacatcatgctccccactttacttttcttattcaccatctgttgacatgtcaatgtttcttctgcgaatcttatgtgtagtcctggcaacatgtcactcctttctcttccgacatttaacttatcgtgtttaaatataggtaccattttggttcctatgttttgcttgaattttcattttggtccacgtgttttgaatttgtgttaatatacgcggatgtatgagcctctgcgggtgcatattaacacccaaattagacggaaatgaccaaaatgattaacatgtaaaacatagggaccaaatgcaagggattgtagtttaagcaaaatacaaggataaaagagtacttaaaccttaagaatataaagggcttgtttgggagtgcttctgaaaggcataaaaacgtttttatgacaactaaaagtgcttctgatagtgttttgcagaaaagtttagaagtgcttatggatcatagaacgctttctggagaagcacatgtcatgttcttcttcatgaagcattgcctagtgcttttccaggaagctcttcgatttcttatgaaaatttcaacatctttataatgaaagcacttttgctagaagcgcttatgagcagaagtacttcctagtgaagtagtcccaaatgagcccgaagtgcttctaagtcacaagtgctttcatgaatcacttccaagatccacttggattattcgataagctttttgaccttcttttagtagaagcgcttctacaaaagcattcccaaatgagccaaaagcctaacccatttttaaatttaaagggtagtagaaattctatgtgtaggtcgtccatcctttggtaaaggaaggactttgtatcgatattatcaataatttattattgacatgatatcgataatgaagttgatcccaacatgaagtccgttgtttaccgatagtaaacggacatgcatattgttgaaaatgtatcaataacatgtccacacggtttgttgttgaaaatgcttgatggtttctttctcatacatcagggtttaagcaagtaatcatatttctagggaagtgatgccaaaaagtaaaggcaatgccttgaactttgaaggtctcttttatttttaacagtcactgactaattggttttgttaattaagatggtcattcattgaagcaactgccctcatgcggagtatatatactcttctcaattctctattgccatcttctgtggtgtccattgtatgccttgcaaggccttggagcaatctttgtttgatcgaaacatctatcacttgaactttgcacaacccaaaattcatccttcaaacttcttcatctcaaatttagcgtttcaaacctctacaacgttatacgaatttgttgcagaaaaacttgtactagactagtgttgggctcaacttggcttgatacttaactatgcttaattgtggtctatagggttctagaactcaaactcaatatgcagatgctattccagattctcaagcaaaaaccaatcagctataaacaatggaattagatcacatgaacacaaagagacacaagatcacctgttttcacaggatgatgactggaggttcactattttgaaaacagaaaattactatactctgcacactgttctcacacatgtagacatactatactcttaactattttgagaaaagaaatttactatacgattttattttgcatttataacattacatgtcaaaacaatttgagtcatctagcatttgtgttttggggtgaagtgaagggtttggaatttagatttacttttaattcttttgtattattaatgcctagttcccaaaagctttcgctggaatttaggtcttacagtttctcatcttttttcatttttgcaggacagaagaacatggtttaagggatttgtgagtttttttttcctcacttctattctttatttaaagttttatattttcctttcaccaagttttttattttttattctttatatttgcttgtttaatctcaagttcatgtttattgttgacatttgatttaagtgccttgaaccttcagtcctcaaacctgtcttccactctattgccaaggagcaaggaaacagaaagagtgtcgtgaagaattgaaaaagaaaaaaagaaaagttaatttagatggaaaattgagctaatgttgtaaggtggacaattgtgtgggctatcttggactgatgaatggtcttttatcaatgtcagccttgggaagataga

SEQ ID NO: 8308 - DNA, 211 bp, Prunus persica
  Intron number 6 from transcript ppa006025m (locus ppa00602 5m.g) derived from phytozome v7.0 (chr-ID scaffold_1; pos 11208817 to 11209027 reverse strand)
aagttccgtaatttctccttcaataatttagtcttagttttattgtgtgtgcctgcgtgtctgctcggtgatttgaactagttttgtatttatctcttttgtattagtatgtctttatgtatatcttttgtattttgtacctattacattatctacgatttacatatttggattcagagaatcctgctaatcttgactattcttctcaggt

SEQ ID NO: 8309 - DNA, 2733 bp, Prunus persica
  Intron number 3 from transcript ppa006353m (locus ppa00635 3m.g) derived from phytozome v7.0 (chr-ID scaffold_2; pos 2959839 to 2962571)
tctgcaaggatctgacaggaatccagcaaattcaggttcgtcctacaattgacttgcttttattcatcctttggaaggaaacactttgtagattgcttagtatactcaatgttgctacatttgtgactgtcaaaaatggaaatgttggttgagtatttttatggccttttgtcggttcaataagtactgtaaaactgtagtttcatctatgcttggtagaactgttattgtccttaatttcaacctcagttggggtacttaatgacatgagctatgatccttctccagttttttggtttaatgttgtgggttgtacaatgtagaaggttggtggctctttataatattatatgctatgggcacggcatgattttgctcaatatgggttgaaatggattttcctgttttcatgccaatttgttttgttctgttttgtttgtttctttttttggtatttagttacacatacaagttcaagcctagaagaagttgggtcataacaaattgctgattactttgaaccttatagtcattgtgaagataaatcctataggttcatctactgcataagtgttggattatctaattggtgatagaggatagattgtagttctcaccgtagcggcatggccagatttgatgcaacgattggaaatgtgcatccttttagctgcataagacttgagcacatgtgtctgtaggtactgcgtggttggggactgaaacagagtaactggcatggagggtacatggagatttacaaaaaatgtgatgagcgctatgtactacagcttaattgggtttaaatataactagaagggctaagggttgtcttcttgttattggtggtctttctagaggtgctgggaaagttgaattttgctgataaaattcacgaaagaaaaacaaaaatagtaaatttgtgtcttttttagtagctcgtgtggagtaaatggttcaaaatcaaaatgagtgaattttttatatattttatatatacagccaaacacaccttaaatctattattgggttcaaatttgattttctatccaaaaagctgtgataaacagcttgtaagaaggattgtatctttctgcttcctgattgctgtctctagctggagattcttctcttcagaataacaagacaggaaggggaagctgctttttctcataggatttgggactactcttctgaagtcatttgtaatcctattcagcatgacaataaaaacctatgtattaatttttatttaggtaggggtccattggttggtgcaaagtacaatagcatattgtaacacaggactctagcttcatctagtcacttaaaaaaaaaaaaaaaaactatagaaaggatacagatcacttctctttagacctacttcactctgactagcaccggtcttgtttgttggttctatattcatattgtagcttaattaatattctgaatcgctcttcttggaccatgttttggtgtgtctagcattgggctatgggttttgagtttttaatttttgtgcaagtgtacatcatttttactctcccacccaacagtgtgcgagccttgacataatggtacaattgctccattgggttctgtaagggaaatagtctccacaagtggggtatggagggttcgcatggagtctcattaactgggccacattttttttcttaaccaacgaaactggaaaatgtcttgtgcacttgcctttctctttcttcttttgttaatttgtagtttcgtacgatttcccgagttttcagcttttgattactccattgacttgagctttttgttatcgcttctcatcttaaattttgtggaggagctgttctttcagtttatagaagaatatttctttgactgtgacatgtttaattaaatttttgtgaaaaaggcatgctttatctcttgcttgggtgcaccgtgcacttatggttttactggtgcttataccagcaagtgaatttggtgatgtcctggatgagattggaaaatgttcaggtggtaggaaaaaagtatattccttagaccattctgaaaaacttgacatgatatgttagttgatgtggtattaagaccggtggttaattatagattctgtggtattaagacctgtggaactaagcacattttctcattttcagtgttaaaggatgcgggggtttccattttaaagataataataaataaatggtttcacgttaattttgaggatttcttatgtttctccctcccaaaggtaaaatgcaggaatacccctccagcatggagattttgtgggtttggttctgaaagtgaagtttgtatgaagttatagttagttattgttcaggacaattgtggtttatattttcatttgtacaagtgtattgtactggcacagtatgtgtgtaaagtagtgccagtacaacacacttgtacaacacatattactgagtgaatcaagtgttgtactggcatgttaatcactatagtctttgaatgctggatgtaatgctatgaaaatttgcaactttatttggtgatagaacagaacaagattagattgtgttgttcatgtacactttatatgtgtctacgaatggtttctggtgttctttctctctcagtaatatgaatcttgctctttctttatttattgtgagcctttaaattcatttgttgctgaattgggtattattggcaggtggatagaggagttaccttaagcgaggcccttct

SEQ ID NO: 8310 - DNA, 1269 bp, Prunus persica
  Intron number 6 from transcript ppa007286m (locus ppa00680 6m.g) derived from phytozome v7.0 (chr-ID scaffold_3; pos 4669843 to 4671111)
gcttgttgtggataatacatacgagtaagtatattaaattttctctgattgtaaatgctgcaataatatgttcttaagtcatttttttgctgacttgatgacatggatttatatgattctcatctagaatttggtccgtgttcaaacatgggtgtattcattggtataaatctcaggacacacacataacattgcttgtgggttcccttttaggaggaatggtagttactctgatcgaaatctcagttgatttcatggcaaccatgatggtgatccttgcatctgtttttgtccatgaaacttcactgacctgactattaaaaaagtttaacattgtgaactgcatactacattgaagtttttttctaatttgattagcatgcaaattgatctggagtttttgtatgaggaattatgtaaagatatgtgaagattggggctgagaaccattatagtacagaaggaaagcaaaagatgaaataaaatagaatagcaaaagaaggaagaggctgtaagttggtttgattcttccattctattgaaactaaaaataacctgaaccatttggccttctccccctaacatcttttgaatatctccaagtttaaagattctgagctttactgaagtgaatgtttactcagatgactttttgcctataattggattgagatgtttggatgccagggaaaatggatctacaaaagtgacaggactactgtttagaaaaccttaattgggcaaagtgtccaactgagcatttgaataggttactgtagctttaaaaagggagagcctacagatttctctgcccttatcaaagttctttgaagaaagccttttataatctctccacgttatggacccacagtaatgtcagtccataactttcttgaatagcagttatgtgagtttgccttttgcttcagcagaggttaggctgtctcggttatattgcctagtacctttatacacttatattaataattgtagtccactgagttcaaaatgttaatgtgtaaataggttttaatacattccatttgcactagattgggtccatcaagaatgacatatataccaaattgatgacttatttacctgagtactcttgagtgtattcaaagaaacatctttttcttttttccttttcaccagtgctgtcggattgttaactgcttttgattgaagaattaatgtgttaaatgtttgcttctgaagcatccaagagtacatgtgggttttaaagtttgattttgcaggtatttt

SEQ ID NO: 8311 - DNA, 4551 bp, Prunus persica
  Intron number 2 from transcript ppa009718m (locus ppa00970 4m.g) derived from phytozome v7.0 (chr-ID scaffold_5; pos 4858062 to 4862612 reverse strand)
tcatctaatatcgtggataatttgccaaaagcttggtatgcctactacctaattgattaaacttctttttcagttttttgagttatagctagttaatcttttgttttattacaattgggggtatctgttgtttattttgattttagatatggtttaaacaagatgacaacgatgattatgacagacttatcttcttacagttgatatcacatagttgttattatttatttcaaattagatatcgtagactgtatgtaagtttagagacatagaaagatgatataacatgattgaaaaccttaggaatgaaatcattttcctccctatttttttttaatccaactggagatttctcttaattaactagtctgttatcttagttaacagtttggatgtgaaatgcgtctataatttagaaacttagcttgactttggttgttgcggaaatttttgtttctctgttttgagcgatttattcaaatgcatatcaagaattgtaggtcaaaatgaaatacaatatggttccatccaaagacttggacattttgagtcgccatccaagcacaagtgccgtgatttataagaatatttttggcgtagaaagtcccaaattcaggatcttctgctgcagatattcctcagtaacaaattcataggccggagttcagttttattgtttgtttctttgtttggttgagtaatattgcctatcctagtgcgtttatggacccactggactagacgcttctcaaactcaagcatttacttttttggttagaggctaatgtcttggggctaacgtaagacctgctcaaggacttacctctttaggtaaatatctaatgcattgtctgaccggggaagattttgtggaacccctccaaggtatccctattttgctggatccgaatggctacaatggatgtgcctgtgtgctcctccaagtgaatttttgctcatatgcccttcatgaagtgtacaggagaagttatctgtaaatattttgtgggcataagaaagcctaatagcccttttctgtgttgcagcctgcacccaaagtctaggcgcaagtatgatcatgtgatccctgtgcctagatatcatgcagaggtagagcttcctacttcaattttgctcctggaatctaatgtaagatatcataggataccgtgccaagaatctaggcacataagtcttcatgtagaggatttgaaatcccaatagggttgatcaccatgtgatgaagaggtgcctactctaggcgtcaagacacatagtggatccctcctatctcatctctcattataaaggacagattctatcttgagaagttatgttgtcgtaacccttccctagctaaccaaattattgaggtaatgatcttgaaaggacttactcagtggtcaaatgggagtctctctctcacgattaagagactatttctgtaatgagagtacattaatagacagtcttgcactagttattgataggaagtcctgtacttaattggttgagatcactagtctattttttctttttagtctgaagactagtctgtcatataggccagttgtactgaaattttcacaaataatgtcttcactctcttcactggttgtgattcatttatagtgatgagcatctgtgatgtaggacatgggtgaattgagtatttatgtagtttagcggaagcgaaaacaatggaaaaacagaaaataggtggtaaaagacgccttggcttcacgccaaaagaattttggcttcacacccaggagtcaccaatctctggaaagtaaacttttcttaatatatcaaatctccattttaaagaactacatggggggtatttatagcaagctaaaacctagagacaataggataaaaatccctcactaaaacagaaatcctaatccaccaaggaactaagtaaaataaactaggaaacttaaatcaaatcctactaaaactctggaaactaaaatcctagtgaaatctggaaaactaataaatcaggaaactaactaatgatgtccgcatcaattcccccaagctgaaaagatctcaaatctggtgagataaagctgtaataacattccaaaacgttgggatcaatgtgcggcaggtcctcctttgtaatccgagtactacgagaatctggtttaacttccacttgactgggaacttctgcatcttccttacattctttaagcataatgatatgtagagctttggttttacctgctttgtcttgctcctctttgtttggtatagattgattcacgagcttgggttgaagtggcttcatcgtgatcttctttcctttatggatgaatgaacatatattttcttgacccaagatggtaacattgtaatcatagatccatggtcttcccaagagaatatgactcacatccatatccaccacatcacaccaaacatgatctttgtaagttgaaaactgtataggaacgtgacatcgttgggtaacggggatagaagatgtattgtcaatccatgctactctgtatggcacaagatgcttctcgggtgacaaaccaagatgtgaaacggttagcgttgacaccacattgatacaactcccattatccatgaccaccttacactctttatctccagacttgatgtaagtgtggaaaatggaagtcctacgccaatccacagtttccttcctaggttgagccaaagtacaccttactactgctaatgttggatgagggacttcaaagtcgattctacaatcttcatcaggttgttggggttcataaatatcttcctcgaattcgccttgattgtcagcttgttcgttgatgtgtgcacgcagatttcttgttgcctccttcgttgggcattggacagcaaagtgtccaaaaccttggcatctgtaacatctttgcgttccaccaccacgtgtatcaactagcactccttttcccttggcattttttactaaattagtcatagatgttgaagtcgtagaacttggagtcacagatgtgtcaacatgaaaatcagatctttgagaatcagtttgcttgactacattggacgactttaaatacttctctaattcttgtaccctctgaaaaaccctctctaaagtattcacagtacgaggaattaattccctttgaagctctggacgaagtcctgatctaaaccgagaaatagtcatccttcgatcttcccttatgtcacatcgcaacatgaattcctcaaattttgcaatatattcagcaactggcatgttgtcttacgaagagtttgccactcatctaacaaactctgttgataggataatggtagatatttctgcttcaacctttctttcatctcaccccaatggatgattggttcttcaccagctctctctagctgtgtttcaacattggtccaaaacaatccagcttgacccaccaattttatcttagcaaatctcacccttcgagcttcagacatgtcgtgccactcaaaatagtgatctatggtagctaaccagtcgaggagtgctttaggatttagctcaccatcaaaattaggagcgtcaactttcactgatctcatgaccctttcatcagggtcttggtcatagccacgatgaaaattgtgtctctctgcgtctcgatcattccttctatcatgatgttgtcgctcacgattcctctcttctccattcacacttgcttcatcatgttggttagctgcttctaagtctgcaaggcgactttccacgagtctggatctagtgtccgaatctgccacttgctttgataggttttccatcatctgaaaaagacgttcaaagtccatctctggctcgtctgtctttccaggcttagtcggagccatcacttgacacgcggcgtgaagaacaagaaatactcaaaaattttgaacccaaagaaaacgaaaacctggctctgataccaaatttgatgtaggacacgggtgaattagtttagcgtaagcaaaaacaatggaaaaacagaatataggtggtaaaagacgccttggtttcacgccaaaagagttttggcttcacaccaaggagtctccaatctctggaaagtaaacttttcttaatatctcaaatctccattttaaagaaccacatggggggtatttatagcaaactaaaacctagggacaataggataaaaatccctcactaaaacagaaatcctaatccaccaaggaataaactaggaaacttaaatcaaatcctactaaaactctggaaactaaaatcctagtgaaatctggaaaactagagaatctaggaaactaataaatcaggaaactaactaatgatgtccgcatcaatctgtggttcacatctccttttgtaaaataaatgaacctgtaacttacccatcctagatctatgcatattcttgcatttttacttttatatagatattgaagagtcatacctgttgaattcaagctactaattcttaatttttttccctccattaaatgtcacatgctttttcaggttcatctacttgtttattggaattggagcaatta

SEQ ID NO: 8312 - DNA, 1045 bp, Prunus persica
  Intron number 6 from transcript ppa003387m (locus ppa00338 7m.g) derived from phytozome v7.0 (chr-ID scaffold_6; pos 20107762 to 20108806)
gcggatttgtaagtttttacgtttggaaagctatttttttttttcatcaaatatataaagtctgttggttgagttttcatcagtttttagatacaggtgcaatttgcaaacatattttttgaaaactgatgtcagtttgtcagtttaccttcatagaagcaatttcatttgcctttataacctttttgaaagagtcgactgttatgaatgttgctcaagggcgagcattctttgatcaaaagcacttggtccaatcacctcacataataacgttggttatccatgacatcgatgatgaaatcagtttaatattctatggttgtaattatacggatggctgttcacacatctagaggactgctggcctctcctttactttcctcccaatgtacaaaaccaatgaaaaaattcgaataacttatgttgttccttgcaagaaatgccatgcaataatttctgctcttgaaggttcccttcactcctgaaatttccatgtatccctgtgttttaacttaaggtttctttccctgtccctgtgttttaacttaaggtttctttccctgtactaagataatggctagttcacacttctgagtgccatgtaaaggcaactgattttcactgcaatttgtgaaattgcaaaatgtgttcttggctatgggcatggaaaaaccttcagtctaccatacaaaccaaatatattttgtggatgttatcctgcatgttgtagtttctgaatttctgttcatatataaacctaattttatttttaatttagtaagtattatttcagaaatggtcttttacctgtgtatttattagtgttgttggtgcttgtacaaattttagtgtgaccataatttggaagctaataccgtgagcttattttggtgtactataattttttatcagttatggtaattttatttctctattggtagcatcctagtatattgtggtgattttatatcatgggagatatctcagcataatgatattttgctttggctcaatgtttaggtgggagacaatttcagttggcgat

SEQ ID NO: 8313 - DNA, 1260 bp, Prunus persica
  Intron number 1 from transcript ppa003307m (locus ppa00330 7m.g) derived from phytozome v7.0 (chr-ID scaffold_3; pos 1447147 to 1448406)
gaacccccaccttctccacagccacttttggtaacaattcttactcatcaccttcaatttgatattctgttaatttggttttttaatttgttctgtcattgattgttcaattcagtttgatttcattcttgctgtgatatagaacaaatgaggagagacaaggcattttatgcatatcagaaacactagaacactagctggctaggctgtcctccaagtatcaagccattttaacatggctgttgttggttaccaattcatcttagtttctttccctgtagatagaactgaaggaaatcccacgtgggaatgtgccatgtgaaaccttcaggttggagctaggaaggaagccatagacattagacaccaagttgcctttctgaatttgacgatattggtatgatagggtcaattaggaaccagccacatggtttatgcatcttcatgttaactctcacctaaaaattcgatatcctcttcttctactgctgttattgttttgttattttaattttaattttattttctatgaaaagatcaatgctgctttgaataccattaaaatagattggatatctgggtgatgtgtggacggttgatgcccccaccatgtgcatgtctggattatgctttatatatttcttgttgttcatatgtggacccatttgttccatatttaatctacattacaagttaagcatagcaaaggcctgcttgacccgaaatgcaagtgttgtcctctatcctgcatgacgcgtgtggtggatgagctgactttttcttattgattgcctgaaattatgttatgttgatgaatatttgcatgtcatgcgctcatgttgcatagcacttaattccttccattgtagagagaaaaagagaagggaagtttggtacagaagtaattaaacaaagcaggttccagattctgtgccctgtggttcttgttggcccgcaccgcaatcatcaaaaacaataattccccacttggtttctttacacattcagattagagaaagagccccccaaaaattgtcaagcaattaggacagttccgtgcgtagttgcattcacattcccttagaaattgtgttagatttcaagttttcagactgagagacatgtgagagagacttctgttttgattcaaactgttagaaccttttaacgttcaagcttacatatcaagtatttgaattcttactgtgattacctattggatcaccagccgtagcaggaaaaggcttcatcgcaaaagac

SEQ ID NO: 8314 - DNA, 2002 bp, Prunus persica
  Intron number 2 from transcript ppa022657m (locus ppa02265 7m.g) derived from phytozome v7.0 (chr-ID scaffold_1; pos 44571890 to 44573891 reverse strand)
aatcctgaggaggcagacctgtggctcataaatacgtgaggatccttttattggtatcatttgtttagtggatttggtcatgtcttacactgaaaacaatgtcttaatttatatttgaaaatcaatgtcaagggaataatttagtgctccttcagtcattggaacataaaggatatagtttgtggtatagtaatatttttgaactttagtacacctgttttaaattctttgcatttaagtcatctattctttttgttctttcctgaacgaatccctttcttgcttctgatgataactgtcaaggtagtcaaatttacttgagcacctaagaaggctaaaagaaaaacttgcgataatgtggacatgtgaaacttacttaggcacaagtcatcagcttgaattgactgcttccctaccctgtaaaaaaatggtgtcctgtcttgtacaagaaagtagcttgcatagatcgtgttatgaggaaatattgtcatttctaacaatcaatgaaactaagtgacgaacaacaaactggggttttctttaccaaagttgactttaagcggtctcgtaagaggcagatagagtggattacaaggtttcaagtgagatttctcagtgatgatgtttgcagggtggcctcctcttgtggccggtgtaggagggagataaagaaaagagaaagggagaaagagagagagctgggctcctcttttggtgggtgagagagagggaggagaggtgctgggggtggggttgcaggggagagggaagagagtggggatgtcaggggtagagtaagtcactggcagggtacagcaggagaggggagggaggagcacccaaaactattttcttccttttctttttaaatttgattcagagggtaaaatttgggttttaggctttacaaaaaatgacgggaagtaattgttgactttgtggtatgaatacaattactcttgacatcgtgtggatttatttttttggtggactgcatgtttagcgttaatgtaagctttaccacttcaacattaataaatatgtctccatttcctataaaagagaaccccaattgagtgcttttaattggccagttatattgactggcttttacattttctttctaaaatacctaagcccctttctcatctcacatttttcaaatggttttttgattttcttagctattaggttgcatctgccaccaaatagaatgtaattattactattgcatggtcatccaaccatttctcaccgtcactctctgcaattttgttctatgacattgtgcactaacacatcatgggatattggtcctatggtatttaaactggtatgtctctgctttgcatgtatattatcaaactatggtatttaaactggtatgtcactctgctttgcatgtatattatcaaaactaagtcaagaattaataagttttagtatttgaacctaggagctacttaaaatcaatttattttcacaacatttgcaactgcttaataatatatttaagggaaaacagtacgtcatatattattagtaagatttgaggttttggagtcacaatgttcaaattctttatgggttactactggagtggctgtattctggtatggaatgtccattatactcgcttctgcaacaattgtcattgcgactgttcccgcactttagaatccttctgccaaaagcttttgtcccaggtctcttagtgcttttgtgtagtaattaatagcaatataattttttttaacgaactactgtgcttgatgtattgcaacattgctcctatctgtattcctcagaaattgtgtgcatcctatgcttgtcttttaatgctgtagagctctctttcaagctgacccttttttgtttacactatttttaaaatttgtcatttttattttaagatttctctaaagcacatgtttacctatgataattgtaattatctgtcaactcataattctcaatttatagagtttattactttatgtag

SEQ ID NO: 8315 - DNA, 1223 bp, Prunus persica
  Intron number 2 from transcript ppa020356m (locus ppa02035 6m.g) derived from phytozome v7.0 (chr-ID scaffold_1; pos 7253907 to 7255129)
caccggcgctactaaccaaggtgtgccacacaaggccgtccctgagattttgagggctctgtgtgaaacttaaattggggcctcgcataatctaatacgaaaatactataaaaatttgccataacttaatgtcataaacaatttttttttataactaaaattcaccatcaataaatatgcaatgacaatctgaaatcaaattcataaaaatttaaatattttcattaattgtagcatgtgattctctaacaatgaatctatcaagaactcctctttgagattgagtcaattcctcgatttttctttttctaagccgttttgtatatccagaaacgtattttctagtatgtggcatgtttagattacaaagaaaaattccaaaaccctacaacctggaagaaaaccccaacaagaaatagataaatatttctacaaactatattctcatacaaccaatcatcaacatgataataatttaataaaataagtcatgtaatatatagaatagattgaaatttagatacattcctgaatttgaattgagatttgaatatgactattcgattttgagtggtctatgaattcaggaattagggttttctctttttagtgttcaaattcctaaaattgaaagaataacaaaaattgtcaaaggattgaaaaaagaaccaaagagaaattgatgaacaatgattattactaaacagaaaatcatagtttaagagaaagaagaagccatgaagcttttttcgtggtgttttgaatgaagaaagtacttttcttggaagaaaaaatcttttttattttatttttaagaagggggatatatcatatatattcctcttttggtgtggttaagttaagcttccatgtttcctgtttgttaaaggctttctgtttttttattttatttaaattttataattatgtaaagtttgaatgcaaaaataatatcacaaaaggctaggtagtagaacgacatcaaggagcatcgaactcgggcccttttgccaaagagagatgcgctccatccaactcccctgaacacgctgttgtgcaaatatccagacgctatactatatatacgattcatataatattaatatatatataatataaataatttttttttcgggggcccttaagaatcggaggccctgtgcggtggcaccacttgcaccaccccagggccgcccctggtgccacaaccttgcaagggtacc

SEQ ID NO: 8316 - DNA, 2054 bp, Prunus persica
  Intron number 5 from transcript ppa003457m (locus ppa00345 7m.g) derived from phytozome v7.0 (chr-ID scaffold_1; pos 13672409 to 13674462)
tgatttccctgaagttttaccagcacccttaagtaagatatttagccacctcttgaaatttgacaatagtttctctacaactgcaggaattcattccattccttggaaggtagcttgatttatacaaacattacaaaataattttagtagattgaagtattacaataccttgtttacttaattgtctgactgtccatatttgataaccaacactcacactgtcaaccctttattataatgttattaacagaagattctgggattttacaaatagttaaagactactctaaaattcatataaaattactctggtcgatgacattggtagttcggaggcttggtggcagcattgggttgtaggttggcaatctgagaagattggtaggatggacaaatcgatttcttcctgaagggtagagattatcaagagtgttgtctagttcaccaccttttcatgtttcccaaggaaaagataaattccgagttggtccgcttaaacctatgtctttaataatatggagatatttttttttttattgtgggatggatgaaaatagtacgagaatgttaattatcatctagtgaattcggatgattttactccgtactcagtaagaaggtttgggagttaggagactgggtatctttagcagggtcttttaggtgaattcttgtcaagacagtagaaatttttttggaggcacatggtgcttttcatacaagggagagaaatgataatcaaatatgtagttttatgttgttttgttggaaacacacaatatgttttagtttttcttttgcccaagacaagcatgaaatacacattaaattccagaatttgagggctcaaataggcaatggtgtttcagtcgaacactattttagaatcaatatgttttctgagaaaaggcacgaagaattgtaagtgtggtcagttgaagtcatcaataagaatccaattctctcttgtcttgttccgtctcttttatttcttttttctgattcctatagccctctgtttctttaatgaacttgctcttgatttgtgtttttttccctctcaatatctccttgtttaaagatggttggttatgtttgggcccatttttcattttggttaggtcaatggatccaaattttacctagccctaggctttgtcttagagaaaacagaactcaggacgaatttgagcttcaagtttgttagatattgagtaagccaaacccaactgctcaagaccagcgacaaccagatgggagaaaaaggacctggtgtgcggtccattgaactatggaataggctcaaggaaccgtggctaatgcatcaatttttttccccttagttgcacgaccctggtatcttttagtggtctcggatgagttttcttgcctttcattcatttccaatttcctattgttccatattctggattttcattaattgaacaaaatttaagtaactttaaatatatttatacaagtgtctttagatattttataaaaagtaatattaaagtttaagcaaaattcttggaagacaacgctggtgcttccatgatctacatgcatgtattcttgaggattcagcctgctatattctaatgattagatatcttgtttctgaattatgcttagattaaatgatgcatgcgattgtaaattcattctttgcttgtgctgttaagagtcctaattgatgggccaccttgggtgttagtaaaatattttctttgtttggtaagatatatgtagggaatttttttcttgtcagagttacgttattagactgagaatcaaaaccatcattagttaatattatgcctgaatgtgtggtcctgtcctgattaacattctggccacgtaacatgccagatttctggcaagggatcactaccccccctgtctcttgtatctctttctctccgtgtactatatattatatatagagagagtaggcatatatataatatttgtataaagtgagaagagagaggacatctctctgtatatattattacttttttgagctgtttgtgattgtggctggcaggaat

SEQ ID NO: 8317 - DNA, 1676 bp, Prunus persica
  Intron number 1 from transcript ppa004043m (locus ppa00404 3m.g) derived from phytozome v7.0 (chr-ID scaffold_4; pos 12518407 to 12520082 reverse strand)
caccattgacggagaacgcaagtgctccacaataggtatgtactttcattcaaccccaatattattcaagctatgctattaaagaatatgtagcagcattggtttcagggctccagaagaatgcatgtgtttctgcaagaaaagctaacaaacctacaaattcaatatcataatgtgcattatttatctgtgaattcttatttaaatttacaattcaaatttataatctaacaacataacatattagatatccgaacaaaaatattactttatgttttacgcgatgtaaatatctgtaaaactggtgataatcttgcagataaaacaataattctttataaataaatttataaaaataaaataaaaataaaaaaaaggaaaagaacaagaattgtaagcattaagatatacatgtgggacttatctttaattcatcttagttagtatctaggtttcataacagagcatgtcttttctgtctcgatgaaatcaattgcaggctagtattaatataataaacttgattatcaaccattggataagatcattttaggaaaatttattcttgattctaaccaatataataacatttacctttttttaaaatttaatattttatttatttataggatccaaattcatgtgaaatccaattaactacaagttggtagatatgtgaaatatgtggtagtagctgcatttacataagcacccctaattatttaaattgtgaaaaggctcaaagctcctttcaggatatgataatttgataaaggtgtttagtgcaacatcatgaattatcccacactaatccatttctgaagccactaaatctgaagcatcagatgaatagcacaggacaacctacacttgcttttatttatttatttatttattgttggtttagaaaacataaatttttatagtgacttaaataaacataaaaaaatatttatcagataattaaaaaaattaggaaaaaagtatcttggttgatttttttttcaattcatattttctagtaaaaaaaattattgcttgagaatgaaataaataattcacttttattaatataaaaaaatatttcttcagaaaagagaaatataacaaaatttgtataataaaatctgaaagaccaatttgtataataaaactgacctttattaatataaagtatgagtcactcaatgtaggctttcccttcttatttaatttttcttataattaataacaataatactgatttgaagtgtcttttctttcttttttcatggtagcaagtgtcttttctatctattttatagcaataatactggtttgaagtgagtcaatttgctcgatgtggccttgctcctttttaaatttttatttattttataattttatgtaataattcaggtataatgtaatttttgttatttattaactttttttctggaaaatttgtgacctattaaattttaatgtgttagtaaacaaaagggacccaagagtgacaaagatgaaaaggagataatagtaaaaataattatatgaataaatttaatcaaacactttataaattattatagttatttgtaagtcctaatatttgttcttggtaaaataaaataaaagtcctaatatttgttttaatggtaggttgcttggggaaaagactaggacccaagattttg

SEQ ID NO: 8318 - DNA, 2487 bp, Prunus persica
  Intron number 1 from transcript ppa012018m (locus ppa01201 8m.g) derived from phytozome v7.0 (chr-ID scaffold_4; pos 2950279 to 2952765)
aggctaataagggtttgaagcagatcacttcttaaattagttcctttggcttctgaagatattgatggtaattttttttaattttctacccaattacttaagtactatacatatgatagctctactgctttgattagaaacctataattcatgatcagcttcatattaatcagattttaaaaggagataattaaaatgggttttcaacaattcttgaaactggagctgaacaaactgaaaggaaagtggaagaggtgtactactttaatttgaaaattatatgatctaaccatccactacaatttaaaacctgtaggccgcggagatctctcaattaatccatcacaaaaccctaaacccacaaaaaaccctaatttgcaaaaccgatcgatttcaaaatcatcttcaagctctagcataattgactagctaatagagtagtgagtgataaaaaaagctaaatagttttgtaggtaggtaatgctatggcccccctctctctctctataaatattttgaaggcatgattacattctctctttctctctcttccccccctccctctctctctctctctctcaatcagacaaaactctgtttctgttgtgtcctaattaaatatgtctcacttgcttgtgtacttttcatttgttgtgattctgtgcgatctagctgctccccatgggtgaccatatatctatatacgtacgttgcatgagttgtatatactcaggacgtgagaattagcgtacgtacatcgctgatactgatatatttctcattattattagaaaagacagtaagattctccccaatcgatatcttttttgtttatatatttgtggatgcatgcaagtttatattataatacttttcttttggtggatccaaaaccatatggaatttatatgcatatgtttcactttgttgacataccatttgtttagttgttaaacaattcattgcctttctcacattgctaatgcgtaagatcgttgtgagttattttcgcggattgtaatcagttaggcctctaaagtgtgtttgccttattttcatctaattgtactccatacgattaggactctatgtcattttataaaatcaagtagctagcttgcatatttaactttttttagtttcttctgcaatatttgacggcatacatgcatggctttggtacttatagttagctatagattgtgtgtccatcttgaacaatgaacactggaaactagaatttggaggtagacaaaatgaattaatcatgatcaaatgaaaagctaattgacatcgaccattcttgaagagaaagacatccttttccggttcaaaacccctcaagtttaggagttcttagaggttgagctattttaagagtaattaagataatgtagagataaattatcttcaaattaaagttacaagactccttcgatcctttagctaacccttggagatgctcatcttgttgtacaaagaaaatataaaaccagtcatatttttaattcaaatcaatacatgtcttgcttcatagcctcaaacaccatagatcttttcatgtcatcacacttttcaacaacttcaattcacaagaaaagaataaatgtttttttttttttcacgatcaaattacattgacatttgttgagagtatcccacattgaagaatgacaactttactttaatgcttaaatagattttgaacctcttcactcggttccaatcaatttttgattgaatacatgcattgtcaacaatattgtttttaacctaactgtaactatttatgtcactcaagtagctgctgatagcttatttgatgtgggacaattgtatataatttttacgcacggaatttctagtttttacgtttgattctttgaaagttattagttatttatatattgacttgctgtacaccttgagttgatttgttaagatatatatgaggcttgtatcttggttaagtcttattgggaattgattatttcctttcagcggttaatatccccggtaggatcctaagatgtaaacacgattgtactatcaaagagaataaggaacagttgacccaaaaataggacagatgtagcttttatatatatatgccgtacttgtagattcatgtaattcagttctttaattgtatattatggacgtagctgacttgagagtgtcatgatgtgaatgtgtcgtttttacggtcttaattcattgagtcaaatttaatcatcaacaatttctgtatacgtgtactcttttctttacttgaatgctggaacgaattgaaaatgttgtatgataatgttaatgtcacattgtcaattgtttcatggaacttgtgtgtgtataggaagcacaagttataggaacaatgaattccctttaattacgatgtgaaaatctttaaatttgtcatgaattttaactagattggtgtattttttttatgtttattgcaggatcacgcaaaagataatctgg

SEQ ID NO: 8319 - DNA, 1041 bp, Prunus persica
  Intron number 5 from transcript ppa010984m (locus ppa01098 4m.g) derived from phytozome v7.0 (chr-ID scaffold_7; pos 15248895 to 15249935)
gtgaactgcagcaaaaagttcaacagtgtacagaggtatgtttaatttgctacatcttgattgtatataaccttcgtatgcacgtcgaaaggtaacattcttctgattgtgtataactgtgtttattgaatctgtcgtttacactttatttgatttattttgtttctggtcatatatttccctctggcctcatgcttttgcaaaaaatatcagcagtcatgttttctctcagcccctgaaaatattcttcgtttcactttacattttaatgtctctatagttttaggtgatccacctctttgctcacttttatcatgggaattagttgttgccctttgggtgtcttagtactcatagtttctgaggtcagtgttgttttcctctcagccatcgatggactctgctaagattatgcagtcaatcacagctcagtgcaatgacatactttaagtgtttggatgagcattttactggattaattgatggtatgggagcgaatttggagcacagaattgatggtattgaagcgactttggagcgatttggatcaccaaagtccagagggtgatgatcctcacacttgagttgatttcattctctggatatttagcttagggcttcttattgcttgtggtgactgtagactctatggtagtttgtcattttggatcttgggtttgtagcttgagagataatgctactcttctgatgaatttggtactccttgatcttgtgaattaggctcatgcttatgttggtttatctttgtggatgttttgaatgacaacttcgttgttctgttaatctgttactttcttattggctcagtttatccttagccatttgcttatgaccttcacggtatgcacgtttctttatcgggttgctacagctacacttttggctctagttatatcacatattatatacatctgtaaattaatttctaattgaaatacgtttaagtttattttatattttaaggatgcgatgctcaccaacaagaatgactatcgtgcaggattggtgaaggggcatacc

SEQ ID NO: 8320 - DNA, 1890 bp, Prunus persica
  Intron number 1 from transcript ppa000310m (locus ppa00031 0m.g) derived from phytozome v7.0 (chr-ID scaffold_7; pos 19361949 to 19363838 reverse strand)
caccatcagttagacatcattgtccccgattgaaggtatagatttgaatttaaacttcaatttgattagattttggttgatttaacttctacgtgcttatttagggtttttatttttggcgtgtgattgaaggttcgtaatgcttcatttctctaggtttttcgtggattcaacttctagggtttccgtttaatatctgagctatttttcttgttttaaggttttttgtattatttttattgatgaactcagattaacagaaaaactttaaatttaggaagcaataaagtaaaagataaataaaaatttaaagtaaaccaaatttaatgtgactatctgtttggtaggtgtagcttttgttgattagaatggagaatcctgagcaaaataaaaatgttgaaaaatagtctcattcagtaaaattttagctcgaaagaccttgaacttaggagtcatactattacttgggtgaaacagctagacccacctcctccctctagaaaaagagccagggaaagaattttatttctaaagaaggaaagatgataaatgaaaaaaatgcattttgtaactgtgcggtgtcactttcgcagccttcgatatagctgtgttcattgaattatcttaagtcctttgttttaaaatgacagtcagtgttgatatattctgctatgctcatggtatgttaattgggccattgtgtaggtgtctgtaatagcatgtgttgctccatttagtgtcatcatccatcttagttagttttcattggtcaatgaactgatattgatatttattacttagggagattcaaccagaactcaacaatgacatctgttacttgtcagcttatctgattttcctaatctagtattactttttgggtgtgtgaacgttagatctgtgtagtgttcttatccttaatgaacagtagtagtaaattgtagaagtagcaggatagaccggggggaggagattgtaccaaaggagacttgtttgaccgggtgtttggttactgtaaattgtgcatatttgaagtggaaatattttctattaactgtgagcttatcagattttcctaatccagttttgacttttgcgtgtgtaagtgtttgatccccttccaaaaagttaatgcttaaatccaggtagtcgtaattatatttgttatatatgcaacatgccattcattgtgcctcgatcttaatttaatatcaatgtgattatcgtaatagtgctaacattaatagagaactataatgctgcttatatttctgatttctgtgcatgatgctcatatagcatgcacatcatttgcatttatttatgagggtcacatggtttctgggttgtaatgctacatagtatatgtattcgggagtgtgttgataatatctctcatggagtgcttcacccattctcttttatggatataataagatgcagcatctattgcaaaggttaatttatttccttctttatcctttcggataggggagttcatgagattatttgaatcttaggttcgtaattttgtgaaccattactctgaatctgaatggcttatgcataatttttatgaaccaatacccttactcaaaatctaaatggatgttgccaatttattttacctttgaataaggaatccataatttatgtgctgtatggtttatgcatctcagtccaatttcttgtttacacgttttcgcatctggcttttcgtgatatgtatccaataattttctctgatctcaaaaaatggctacccatctcatcataatggaaaacttgattattaattttgaaaaaaaacaaacaaggattttgcttcttgtatcatgatccttatctgtttcaggtgcactgcccagtcattgttctttagagtttggg

SEQ ID NO: 8321 - DNA, 1373 bp, Prunus persica
  Intron number 1 from transcript ppa007479m (locus ppa00674 4m.g) derived from phytozome v7.0 (chr-ID scaffold_1; pos 45634647 to 45636019 reverse strand)
ttttcttcagccactgatccacccaatcttttcaggtaaactccccttagtctccaatcagctcctctacttcacttgcaatattcaatcagatttgcttctgttttcttttttcgttttgaatttttttggtttctgggtaatcttcactttcagtgacagtggtttttcttcttttttgttttggtttcagctctctcttcctttcttctgccctggtttttggtagctcggactttgaagggaaggaactgaaggtaactttgggttttaatcttactctttttgcacaatgagtagtttagtttccagattttatggctttttttcttgttctccctagtctcacaaaatgcacggatttagttttaatggttataattttgtttagtttctctgtatcacttttcagcaaagcataaatatttggttttattttctttttgtgtatgctctgagttttttttttttcttttttgtgtggtgaatttcttggtctttattgctgggtctctctcagttttttttttaaaatttttgtttggctcccgtaaaagtaactcgtattaatttttttatttacgtgcatttaattttacattagaagtggttcattttgtgtctcttttgctaggtttgggttttgcttgaataatttttttttcttttctccaacagaacccttttataaatggaacacagagtcaaggctcataaatttgaagccatcttcatttaagttctaaaaccgtttggtcctgaaatctgtcaaacccaccatctttttttatttgtttatttaaaatttatgttttcctctcatacgactgtgatttggccttttgaatctgtatagaggtgatgattgcaacttgattagcagattagtcttaaattttttccagttctctgacctgaaataaattctatgctgaggtggtaatatttcagtctatttattaaatatgtaatccttttaccagggatgtaaagattgacgaaacctcaagcttcacgatctttatttaatttattgtatccactgcttaattgtgatctgagaatatactgaaatttccattgtaattaatttttttttggctttttgcttgtaacatggttctaaggcacaaaacaagattatttttattttaagggacacttgattaagtcagggaagtttcaagttgaatcttttggctgcctctactggatttgttttctcattaagggtagacagctgttgttgaatgcattattttttgcttcgtccattttttaagattctgggttcttttatgttttattggtgttttctgaagctttaacgtttagcaggcttcaaatataatttggagggttgttcattgtga

SEQ ID NO: 8322 - DNA, 1157 bp, Prunus persica
  Intron number 3 from transcript ppa007420m (locus ppa00742 0m.g) derived from phytozome v7.0 (chr-ID scaffold_7; pos 14994599 to 14995755)
aaggtaagtgcaaacccattaggttgggaaaaaactgttttttatttaaaacatacaaatggagaaaactcatttgatcatattcttctaaattttaaataatgataaaacagggtaagaattactgacgcatattatatatatatatatatatatatatatataagtaagatcatccatggactttctaaacttcagcatatccttcttccatttacccaatcaaaccaaattgctatgcttgaaagcatatccttcttacatagaaaaaaacaagaaagcatctttctcaatatattttatgactcatttaactattttaaatgcatcaatcatgatgaacaagattatatatatggagctcttatttgagggacacctttgtagggcctactccatattatatttcactaattcaaaccatctattttgtagatgatcattcaaagatcatttctacaaaaaatcacttgaatccgatatcatttgaccattcaattgaattattgaaattttagtactttcttgaagtacggtgttcattgattttgtaggacacaattggatatcgaaacggtttccgatttggctaattttttgcaaggatgatctatgaatgtagacttaaaaaatagatgatttgaaaaattttgtaggaaaccctaaaaagtgtccctcaatagaagggtactatatatatatatatatatatatatataggcttctagctctaagctttccaaaatgagttaatgtttcctttatttgattttgagttcataacacatcatttattcaacaaatggttaactaaattaagaataagaacaaaaaggaaacctttggttttaaaccatcaaatttcatttcacctcaaagagctaaatacaagaagtaaaacacaaaaggagggtcgttacaaagtaaagaactacaaattttgtaaggcaatgagccgggtgttaaagtatgatcagagttttagtcggtttctagtgagttggattttagttttgtgtaatgaatttgcccattatcttgtacaatttgtagttctttgactttttgtcaaatttatgtagtgattagaaggttaattatcatgattattattattaatacattaattgtatcacttggcagtgggttttatcaac

SEQ ID NO: 8323 - DNA, 2108 bp, Prunus persica
  Intron number 12 from transcript ppa016417m (locus ppa0164 17m.g) derived from phytozome v7.0 (chr-ID scaffold_4; pos 8696001 to 8698108 reverse strand)
tattgtggaagacgacctttctggacctctttctagtaagcatggtgaaaaatctactcggaacataaagcattctacagggaaagattctggaaagtctcaaactggttcttctgcagttacggaaggaaattttttagaagatttttactcttctgatgatgatcctcttcccaaacaaattgttctaagagaaactgcagtagatgctgaaggccaaaagaagaaggttgtattgaaatctttctgattggaaatacattgtggctcaagcaatgattaatttaactaaaaggagcatgcgtcacctctggttcttaagcactgttgtagcactgttgcttgtcgcattctcgtcctttcttagctctgtgatttcagacttgctaattgtgcagttgacaaggtactgtcgcaaggtgtaagggattcccatttgttttcataggtagccttcccttttgtgaggttgattctgttctatttcaccaatgcttcttttggtgtacattctatcatatccggtgaagaaaaacagcaggcatggagcccaagaaagaaaaaccatgaaggtgaaactgtggaaaaatttcaagataccggctcagggtcgtattggaggactctttttatcacaaaattctttttgggtagagggaatttggctttttgacgctctacagacctagaccttcatatgcttgtcctgttaatcttttagcattcctagttttgttatgttgatttggaaatgctatgaaattatttgcaacattggtttgttttgttttttctgtaaagaaggaaaatcttgtatggaaaattctttcattattgaacatgcaaaagtatatagtttcatttttgagatggtgatgaaccaagaacaatgatgatctttttgtagttgccggtagaattagacaaaataaaacaaagcataccacaaaacaggacagcaaacacatctcccaacaatatagcactgctacaaaagaagcagctcagagtggaagagagaaaagggccacttaaaatagggtttaagcaatctagtaacattagaaaagaagccattaacaagtataatttacatcctctcatcaagccaaaggatatcctgaagtcgatccccatcagctgaagagataatgaagcaaccatgcagccatgtctttgctactggaagcaaggaaatctgtagttccaactcatttcccagaaagtattaacattcataattcatctctgtgacattaaaggacaataattctgaacctatttcccttaatttcaatatgttatgagatgaaacactcttcagctttttccattctgtaatttcgactctcaagcaggacttgatatcaaagtgattttcaacttacatgaacttcaaaatcgtttgaagaacccataagcaacgtcaccagtcatccactttatgtgatttaattatctacaatttcttcataggaaatacaacaatggctgctcttctctgaaaacatgcttttgaggatctgcctccacatccccatcttaggaagaaagccttgtcttatcatctgctttaaaacccaatccacatcctgcaccagattttctttgcacagcccatgaatcaacgccttgtacgatacaaaactcgggccaacgcccttagggatcatccaactcataaactctttggcctcaacaaacctctgtgcatcaagaaaacaatacaaaacctcctgataagaccctgcatttggatcacaccccttgcctctcatttcctccaaaagcttaatcccctcttcaaatctcccctgtttcctgagccccgctatcaatatattaaacgtgatggtatccggatctataccctcattttccatcctctttaacatcccaaaagcttcatccaccttctcattgacacacaaaccatgcataagtgttgaaaaagttaacgcatttggtatacacctttgcttaggaaattcatcgagcaccttaagtgcagcatccaatttcccatactcgcatagtcccttcatgagtatattaaggcaacaagcatcaatctcaatacccagcttgggagcctccaagtacacctc

SEQ ID NO: 8324 - DNA, 1340 bp, Prunus persica
  Intron number 17 from transcript ppa002465m (locus ppa0024 65m.g) derived from phytozome v7.0 (chr-ID scaffold_4; pos 15221672 to 15223011)
tgaaactagctcctcctcgccttgtatgtatcaaccaagttattcttctttaatctttgttgcatacagttttctccatgggttgtctagcatgcattatatagtcactgtattgaaataaggattgttttgtagcctagccatattttaaattgggcaatgtgccctagcgtaaatttatccatcattaaggggatcaagtctatctatagatggtctacaatttggaaatccttaatcctaaaatatatttgacttgatattcaaagcaagctagtgttaacattcttctacagtcaatcccccagcctaatataggggccaacttgatagcacttctgtaatataggctggttattagtcatttagttgaatgactgattatgggttctttagcttagtccattagcttaatgtaaggtctgacggtttaataagctaaatttgattcttattgtctgattagcataattcaaggcttatctggcaaatttgtgtcttctggccatgcattaaacacccatgtgctctattgataagtagtgtaactcaatgatcgtcctcttatttttctgatttgtttttttttcctctaacgtgttgcccttacctactttgaacacacacacacacacacaaaacaataatatgaggaagaacaaaaggtggccaacttatctctagctactatgtgatagatatgttgaaattcttgtggttttttctagttaagatctcacctcagtttttttccctgtggagattccatcttgcctcgctgagatctccatcctgatgagatctcttcttggttctcgtcttgtacagatctcatctccatcctggaagttgttgatatactctccagcttgagagggaagcttcgttgttataggctgataaaaaaaacaattagtcatttactttagtgctttacttaacatctgatcgtttaatgagaaaaatttgaggcttatggtttgattaacttaattcttgtgtgattagtgacttcgtgtcatgtataaagcacgcttgtactctattgataagtagtgcactacattaatcttcctattatgttcctttttttctttccaaacgcataatattctgttgcattacattttagagaaattctttaaaatttgttagtttcaacaatggattcaaaatgttcaaaatattaagaactgctggagaataaaaatgccacttctatattctgcttttctgcttttggtagtaataaacccgccattaattttagataaagtaaaaccttcgttgtgtttacactgttcatgcggttgctaatatctgaaagcatttgggtgcag

SEQ ID NO: 8325 - DNA, 1946 bp, Prunus persica
  Intron number 1 from transcript ppa019457m (locus ppa01945 7m.g) derived from phytozome v7.0 (chr-ID scaffold_8; pos 20002548 to 20004493)
aggggaggagacaaaggtgtacaacttggttttcggtcaatctcgtgatttatgaggtagaccattttgtccgactggttggctttgtgtcctcatcaccttaacgaggaaatcaccaggaaatttcgtttcttgctagttgtcaattgtatttttgtaaagtcagtactttttctgcaaaaagaaaagtttactggaccaactgaaaggacgcaagatagggatccaatgtggaaagggagtggagtttgatggacggaatttgttgcagaaatttactggttgctgcttttgtgctttttagctttcagatttaaaaaaacaaaccaaaaaaaccaaaaaaatagaatttgttgcaggaaagatgtgaaagatgccgcaaaatacgatctttttaggccgaaaccaatcgtaatcagccgacttagcactttagattttaagaagaagattctattactaaagaaaattaaaaaattaaacaagaaacaatggccgtagttttaagtctttagatatatgagtgctttatttgttgaggaaacaccattgcaatttttgtacataaaaaacaaacggaagtccggcttggcggcaattctttttcctcgaaccgttaaacatgcaaggacaaaagcggacgaatatcattgggtccaacggctacttgaaatttatttatattgaagctgaatgttttttattttttgggtgttatagtttgaattcaaagttgtaaatgatacagaaataaatgtgttataatggtagttaggacattaaaaaatacgatgagtttgggcatacttatggtcctctcgaaccggagaaagagacaataaaacaggaatagacaagtatttttccttgagctgggagcaggaggcttcaaacctaagcccacaaccaacccccccctccccccaaacaccaattcaatttccaacctacccaagaaacacgagaaaaagaagaaggaagaaacgttaatcttattaaaaatgttggactttttagatgcaatgaaggaaaggtaaggtcagaagaaactaagaatgctggggcttcgtttaaaacttttaaaaaagcaccggcaatgtaaacaattaaaatgggaaaggtcaataacacgtttcccattttatggggtcgagtagtatttaataaagtagttaaaaaaaaccgtatgttacaatgatttaatttgataacacatctcttcgctttattaaaaatgcttaggtttgaagaaaaaaaaattgccttttccaaatttgtgttcaaattactgttcaaagaattgcttttttcaataacatatcttttcactttatttaaaaggtcttaagttcaaattaccgttgatcacaaacttttctattgcaccgatcccacacaaaatgtttgatttatcacaaaagtggaaagaaacagatttttgtcccagaacatcaatgccagctgctttcttctcagtacatttttggaacttctcttgctttcaattcgacagaatccttagagtaaatcttaagcatttcgtttcaatcgagctggaataactttgtcgatatttttagtagacctcaacccaagtcattgctttatagctcttttgcttcaaattcttttttgtttttagtcgatggttcccatcatagtggcggtggcttcaccttctcctatgacagttcgaactccaatgcgacaaaaaaaaattcaaaaaattgaatgtttaaaaagacttgagtgcattctggctcctccaatttcacaacacaaaagcaaaatggcgttttttattatttaatttgtaacaatgtgctaaggaacttgtaataaaatttagataaattaaaggaatataaaagccaatatatttaataaagctctaattaaactttgacttagttgttctgggatagtctgtcttggagtctgtaaga

SEQ ID NO: 8326 - DNA, 2470 bp, Prunus persica
  Intron number 1 from transcript ppa003542m (locus ppa00354 2m.g) derived from phytozome v7.0 (chr-ID scaffold_4; pos 21578453 to 21580922)
tattgattttggattatctattttcttgaagccaggtaaatgtcatagccccattttcttattattggaatcgctttttagatattcttctattaatgtgggcttcagttatgatgctcgaggctttaagtctatcatgcccctaccaaatgaaatgcgatctagtacaatattgtgcgtaaaactgatcacagaaacttttttgtctaaatatttcattgtccatctgctcctttcaatcatcttttaaacagtatccattcactcacttgtcttacaatatgctttgaatttgagggcgattctccaataagtatttaagttaaggattggttacatatttctaatctcggccgttggattgcattcattagatgtgttggtagatttaatatgcaacatacatgcaatccaacggtcgatattagaaatatgtaaccaatccttaacataaaatacttattggagaatcttccttgaatttgatactcaatcatgttttaacatttcgtggctctgtctggaccattatgctgtgtaccattttctctgaactaatcacttatagcatgctagctttttctttagtaatcatccagttaactcataagttttcttggatacttgagtctgggaattggaatacctgaggccatatttacattatactccccattttaaaatttttaaaattttagaattatcttcttccaggcttcaaagttccaactaaaagatctgattgtggaaaccagacacagtctggtagcttcaaaaacaggggaaagcagggccaagactgctatacaattgcttatgttaccttgggttctctaagaaaatttaaaattttgataatgaaatttaaaatcggaattttttatttcatattcttgtgtagttgatagtatttacaaaaactctcaaaaagtaagtactttaacgtatgattcaagttatatctcatgaatggtttagaacttatatgaattttatgagaaaatgggagtttagaacaaatgctataatttttcatgtatgtaaattcgaatcaatagattttttatgataagcgtgatccctaatcttattaccaacacatgaaagttttaaaggtcacataaataacctaacctaagttttttccataatggtcacttcttaaataagcattacacaaaatgtctgagagccactactttttcattggcattgcatctttttagtatacatttatttcttgctctatccattcagtagcctatataccttgagctgagactgggatgacatttgtattaccaataattccaattcattctcttgttatacactgttcaaccattaactctgcagtcatactcactgaacgcctgagatcccagactatcttctttctacttttgtatcttggccgatttgtttggcttgtttcacgcaatgtaccaccctcttttacagttttggaaaagttctggtttgggagagcttttatgccgctgtattcctatatagtcaaatagctgtagtgattgcaaatggcatcaccttcacctataggatttgtataagccaaccttctgtcttctaagaaaaaataaattcagctaaatgaatcatcctcttttacagtgtaggacaacttatggttttggatagctttgttgcagtattcctaaatagtcaaattgctgtaatgattgcaaaatgtatcacctctgggatctggataaagtgaacctttgttcatgcacatggttcatttcttctaaaaaataagttcgagtgtgaggtcatttttttagtttattgatttatgttattgtggatgctaattatttgattactacttgttcacattccatatgtaatgatcaaattcagttagctgttcgaagtttctgacaatgacgtgagtttttaatattttgcttttagccaccttcttccagtcaggtaggttcctaatgtcttttttaaaaatctctccacaaaactttacttaaccttgtacactatgggataagctacagtacctataatgtcaactttggatttgaactttagcttgaggtcaaagtctggtcattgtggaaaatgaaattttggaatttcatgacaaatacttggtaccaaaaaaatagaatacttacaaagtttcaatagtcgaaaagatagattccatcagtggaaatttcaatataatatttgaatccatacaaatttctaggatgcattggatatgattttatggtaatgcaaataaccatacattaactccttttctgtgcatagtttccgaacttagtttggtgaagcatgcttcttgtctgtgctcttttgactcattggtacttagtttttttaacaaataataactagagttgaagattaaactattcagaatttaatgatggaatctagagttgaaagatccatggttgcctccttgcaggagaaaaatttagtg

SEQ ID NO: 8327 - DNA, 1511 bp, Prunus persica
  Intron number 1 from transcript ppa003725m (locus ppa00372 5m.g) derived from phytozome v7.0 (chr-ID scaffold_4; pos 8257236 to 8258746)
tacttcttagtgtatgttcccttctcattttttaaaaactcttcagcattttaattcttgccttttgccaatgcgttgtcttctattttttttttctttcttaattctttgaatttcattatatagatggaaagttataattgggtcgcacaacatggaatttgtagatgtgtgacagcatcagagagaattatgattcctttcaaagtcctaatccgtttaaggatttaatgaccattttcttataagggtattttaggagtgatgtcttttagatggacaatctatgatgtagcatatggctcatagttggcagctgagaaagcaatggttgatccaacttttggagcgtgatctgtgtggatcctttaaatagtgtttgggtctcaaaagaaagccattttttccatcaattttaaaaatcagtgtgtaatatcatatgggaataatattttaattttcattatgtggaatatattttttttgtgtggtaatttgatcgtatgttgttttttcatttgaagtatgtggaataattttactgaagtcagcattgtcgactataagtttattcaccgttaagtcatagtaagagtggttctctttgaagtgtgagtataactatggttacgtttgtgctctatagcctatggttgtcactgcaattacacatctacaaatttacatagttccaagcaccatttattaaaaaaccttaatggttattcagaggagtggacagtgttcacataggatagataaggttttccgtagaggggttttaggagtggaaaaagcgttggcataggatagactaggaagctgggggatgtttgctcatgaagtaagctaggccaggacaggataatgtaaaggttttaggaatcccaattgaaagggttgagggtttgcacatatgcagaagcttgcatgttaaggttaaagaattcaggtttcgtggtctacctgggaccaaatatttcaagttttaggttatcttattgaagacttagtagaaattacttaagttgccaaattagggccttctggtgggaaagtaaacagaagaaaggccagtcatgttatatttgtgaaaagactgcagtggaattaagattatttctagaagatttttagacttgaaagagttgtgtttagcagctatatttctagaagcttttcaaacttaagaggccaatgccacaccccactttggataacagcataaataggaattgtttattagatatgttctgtgactttgtggaaccttcttagctttattgtcttggcattacttatacaaggtggcttaatttagaataatggatagctatgaggtgacatctgtggagtatttgtaactccaacaatacaaatacatattggtatataaacttaaatgagtatatacattgctagctacagaacaaaaatttgaaaaactgccacttatggttgggcccaatatttcagggagctgctggagctgctgttcagtacttgggtta

SEQ ID NO: 8328 - DNA, 943 bp, Prunus persica
  Intron number 1 from transcript ppa010829m (locus ppa01082 9m.g) derived from phytozome v7.0 (chr-ID scaffold_1; pos 22931317 to 22932259)
agttggaccagagattgttgagaactgcggtggtggtttccaatagaatactgacaagcgagagcacttgggcggcgccgcaaatttgtctttgctaggagatcagtcggtactcggtagactcggtactgaaagattaatatataaaaacagttgactttgaccgcttcagagagagttttcaacaacttcaaaattatataccaacgaggtttattccaaattagaaaatttgtatcttggcttaacttatagctgtatgattttcactccactaaacttgtgtctttcttctaacatcaaactcaacctaataccaacttcaaaaactaggtataaaacttgaaagacgtagtttatttacattaatattaatcaagttagtgaaagtagtttgaaactttaaaacacgagtcacgtcttgttaatacattgaattatgttctgcctttaatattcgtgatttttaaatttgtctgctcttttaaaaaagatcatttgcataaatagttcatttcttaaaatatttttttttataaatttaccgtatgaaattcgtcagtccgattcagcaaacttaacatgtataaaagtgagacttgtgtcaaatatttgtcaataaaatttttaaaaaaaataaattaaagagaatattctttgtgcgttatccacttcaaagatatttttaccgtgatcgatcgaaattcaaaaaccatttggcatcacccacaagtcagaaacatgctacatgtgacaagaaatcaaatagtaacaagcaagtgtagaagtagcgtagaagcaagaaaaatcaaaataaaaaaccaacacgtccgcaaaattccaaaatccccaaagccctttaaaaatccaccccaacacacactcgcgtctacgtgttcaacttcaagcccacaaccatttatatttctcagaaattcacaat

SEQ ID NO: 8329 - DNA, 1963 bp, Prunus persica
  Intron number 1 from transcript ppa005657m (locus ppa00565 7m.g) derived from phytozome v7.0 (chr-ID scaffold_8; pos 9098520 to 9100482 reverse strand)
gggtgagttatgcttttattgattttggctttttggatggttaatgggttctggcttttttatttttttataaatatataaatatatttataaattgtgtgtagtaatttttttttatagctcaacattctaactggttttgaatgaaaagctcatgtgggtgcccgtttttgagttcctgtagttctattttctatggtgtaatttctttgttgatagttagatgatttattttcttcttaaaccactttcttaaaactctgcacctgtgcccaacgagcacgctgaaagaacaaaatggtgacgaggggtgtctacacctttgagcattttaattttctcataggttctggttttgtctaggagagagattctgtataggtcaagatgcaacatctttgacccattcaaggtgttttgtctctcttgaaagagattagcagattgaggatccatagtacaacaaaggacgcttcttactgtgagatttaattagactcgggattatatcgccatctcaagctgacccaaagattatggcttcaaaataagaatgtatgacgtaacgttaagttcttgcaaacctttgaatgaagatgattttttagataagtcaattttcatatgtcagattcgtagattggaaaattcatggctgttggcccagccattaaaagctaattattattgattgacgaagtcattctggtagcttttataaggtgctatcataggtatagatggtaattatttgaaggcaaggaggctctgcctttagatgatacattttctgaagaatgggttcgaggactgcttccgttggtttgcatgtgtgttttgggggtaagagggcaagaggccaagtaaaaactgtctgagttaaattgaggatattttagttgcaaatgttcgtgaaccaccaagagactccattatgtatgtaggatataacatgatattggtaagctttaaacattcatgcatcttggcagcgtaaattataaatccgtacttgtttattcaatcgtttatgcttttagtgagcggatacatgcaaatgaaagatgatggaaagtacattgtatctagttaatcatcaggtattttgagaatttagactgttctggatgtgcatataccattgtttttttatgggttaaccatctagttgctatatgcgtaggacagaataatttgttttcacattactcactaaaagaagggtgtttatttggacttcaagaagaaaaagggatgcaaagacagaaaacagaatgagctttgtggagcactgtagtagcaaatatgacctggtttcgcattgggttggagtcagctactactatttccagcatgaggggagtgttgataatattgctgtttacagcatgttagattggcttgtctctgtcattgtctcagttctagtcttgctcagatctcattaagtttttgcaatagctgttaagtttgtcttttattctacttgctgttgttgatatctactctcctgcctcagggggagcctcattgatgaaggcgataaaaagccttatgttagaatgatttagctaatttagtttgctgatttggttagctaatgcagggctactgattgacataatttagtttatttggttgggtttgtttggatggtttcaagggattattctaggtaatttttgatttttttatgtagggtgctacgtaaggctatgtatttactcaattaaatccatgaaacatttggtactcttcagccttttcttaattttctcctcaacagcttttcttttgggtgtaaccgatgtttgtgacagcctcacagttttgtattagaagttatttgtccagaaaaactaatgtgcttatattttgaatacttaaaattcatactgcaatgtagtgaggtttaattagtatatgtggtcataacaggtgaaagttcttgctctgacagatc

SEQ ID NO: 8330 - DNA, 1374 bp, Prunus persica
  Intron number 8 from transcript ppa004026m (locus ppa00402 6m.g) derived from phytozome v7.0 (chr-ID scaffold_6; pos 14941059 to 14942432 reverse strand)
gggagcaaggattgcaattgctaaccgcacttgttcagttccagcttttctttcttatttttattagttcataaaatatttgttttcatctatcctttcacaccatttcattaacttttttttttgtgtgggtgttctttcaaatggctgatcagaatagtaaaatacccacttatgcatcatctcagcactcatttctttattttttttattaattaaaaaaagtagattataagtaaatatggttgaagggcagaatcatttatttggaaaaagcaattaaggataaatcgaaagtatgatacaaggtcagggtggattttggtgaattactctattgtagaagatagagattctttctaattgagatttgccaccaccatttcaattgtctcattttccttaagtagtattgttttatgtgtctccaacccgcatttgagtaatctctttgattaatttcactttgatgattttgttgtttgaaatatccttattgtttgttttcataatgttaaacccttaggctttaccacactatgtaattgttcttggccctttcccattggcataatgtcatagcctagttggacttattacgggattttggttgagtgcatcaatatgtttttcctaggagggttatttaggacagaactcaacgcttgcttttggaatggtagtgttggtaaggcctttggagcttaggtgattgcccgtggtgtacatttctttcatatagggtgggaatgctacagtgcgttcctctgggtataaaggtggctttttgcgagaattgagctgatgtcagagtcagttggcattttatagggctatctagaattgtaagaagatttgattcatttgctggatgaatgtccttatttatgcaggtctctggcatcttatgcagcattttgctttagttttaggcattgataacttttgagaagattgtgtcagatgtttgatatgaccaatctctttgaactaagtgcacatattgaaaaaaatttgataccttggatccgattcaacctgtatcctttcctatgttctgagaaatatatcaactacttttacatcaaaattatgacattcaaagctttgtgcaacctttgaagtgtgctttattgtagtttgtagtatgatgttctaaaactggagtgcactgcacctcaaatctttgcttgacattttgtgcaacctttgtatagcatgttagctacaaaccttgtttatatatatttttttcaatattctccacttccattttcccattcaaaaacgaaatcactgtgattttgtgttcttatggttgatttttattttgttgaagatcgagccagagaacttgcagacacaattggagga

SEQ ID NO: 8331 - DNA, 1117 bp, Prunus persica
  Intron number 1 from transcript ppa001783m (locus ppa00178 3m.g) derived from phytozome v7.0 (chr-ID scaffold_7; pos 3600249 to 3601365)
gaaagaaccagtcaagtcttctttacctccgaaaggtacgaagaccctcccctccattttctggttctgttcctcctcttagtatctcactcttcttttaggcttctctctcagacccctgtgtattgctgcctttttttttttttttttcccatcatttccaaccctttttgccatgccaacgtgatctagagcttacctttcactcttttgtttaccatttgtaaaaaaattgatttgattttttggttttacgctgagatctacactggttagtgtccacttctgcgattctgtgttggattttgcgaaaatttaggatttttcggatacccctttggtttaattgaatgaacatttggtggcattgggattttggttgttgggcattttgggttgcagatctgagtatgttatggttttggtatttgtagatctgttattgggtttttgggttttgctgtagatctctgagttaagtgggtttctttttggctgttatgattttcttaaagataaggccaaataaaaatttgattttattaagtggttcagataaattccctgcatgtagcattagatctataagtgagaccatttctctgctatacgacgatttcaggatgagattccttgctttaaacattagatccataagcacaaagttctgctatatgaggttgtaggttctctggttggatttgattgagtgtttataattcaggcatctatgtcgttcttcaggatgtctcagtatcagtattttttctttcattttcacatgaagataacagagacgtttcataaaattaatttttttgattcttttaaatcaattctgatattatttagttgcataataatcataactaaggaagctctattgtgaatctgttctcatttgaaattttcggagggtataaacttttgttgttcttgatttcaatcaactcttttgtgtataattttctctctgtcgtggtgttttgaatggttgacatgatgtaacttaaaacttttcttaaactttttattgcctgatcatcgtgaaaatgttcttcttctagttgttgagtcagctaagttgtgttggttgttgatctgatcaaacagagaa

SEQ ID NO: 8332 - DNA, 1018 bp, Prunus persica
  Intron number 20 from transcript ppa000553m (locus ppa0005 53m.g) derived from phytozome v7.0 (chr-ID scaffold_2; pos 7371383 to 7372400 reverse strand)
ttcgtaaccgtcaggtatattttcttctttttatttttaaagctcagaatctcccagaatgttaattcaatgtcggagtctccatattttagtttacctgtcctatgggttaatcttgtataactctctgattcagaatataaaaagccagctaataaggaaaactagggaattcgcagatcactgatgacaagcaattaaagttgggataacttagtatttctctaaatgaatatttagtttgcatgattagggaaactgttactcatgttactgggaatgagtggcaaagagatgggggatgttgggattccctccttaagtggtggatgatattttaacacaataaatggaagcatggattaatgaatcacatgttgcatgtgttttaaaggggaatgaaccaacatcacgggatgtagctagaaatggaaaatgcattcattggccttgggtacaatcttgtcccctctcttctaaacaggataaaccccctaacccttcatttctcatcatccactagtttacacataagtgcaagggacacagagtgggagctagtgaatgggaagtaaatcctcttgtatacaagaaagggttcagaacttcagaataaccactttcttgtcatttttgttttgtaatcccttagtgctatctagagatgaacttctggtagttccattaggtgtatggtggaagattttgctcctgcagctcaaacaccaaatctcataaataatagtctcttgcttatttgtttacttgttgcttcatatcgtctgctaatgttaatcccacaaatgtggaaagggtttgatgtggggactagtaattattttatgggcttttattaggcatcaaccttccaataggggggttgtgggtcatgagggtaggggtggggtgttgcaatgttgggtgctctctattgttttattatttttgtattgtgagtttttcaattccatgacaatttacaggttgttcgttttcgttctttggacaaaccgaagga

SEQ ID NO: 8333 - DNA, 921 bp, Prunus persica
  Intron number 1 from transcript ppa006524m (locus ppa00652 4m.g) derived from phytozome v7.0 (chr-ID scaffold_6; pos 22237208 to 22238128 reverse strand)
agaagcttgacaaaaagagaaagcccatttcaaaggtaatcggtccatattacttatgtgtttattttattttattattatcatggttaattagttctggtgatatgctagttaatgattgtttattttggtagtctgtttttggatttgagatgatattgcagtatgattgtttataccatttctcatcgaacatgtgtccattatgctaagcagatcatttcatatgtgtatatagttttcttatcagagaataactctcattaatgttcatgtaattgttttataaagatgtctaagatgtgtgctagtgtcagtaagctgcctgtgtgtgggccgtctggttcttgcaactcaagaggttatcaggggaaatgaagttcattttgcttgcatctgcatcgataccaaacctaaaataatacttataattgaccttataatttgcaaatcaaatcctataaagggttggaagtgtgaatcatcaaattcttcgggcaatccagagttttggtgcattttctttgtgaatcaaatgttatttactattcactttgtaggtgaaaacatttagtatggaaattaattgttattacgtgttgacgatgtgggttctttattgatttagattgtttcagaaattggaaatgtttgatctgtcatctaatatattatgatttttcatactatgtgatggttccttcatataggaaatggttccttcatgtaatactgcttttcatcagttacacataccatcctcaattgaagttgagaatgtacaagaattctgcatcttgcctaaaattcttttgcttcttgtttactctgttacaagatcttgggcaccagtgctaatataaatgttgaatttatttttatacaggaggaggcgtctactatcaaggccgcaggaaaagc

SEQ ID NO: 8334 - DNA, 1295 bp, Prunus persica
  Intron number 1 from transcript ppa009774m (locus ppa00977 4m.g) derived from phytozome v7.0 (chr-ID scaffold_4; pos 28511920 to 28513214 reverse strand)
ctgcctttggtagtgctggtatgtatctgttaaaggtcttaaactatgcatatagccttgttacatgattcatcttcatctttgaacagtatattgtttaaggctccaatagcatttctaagtactttagcatgtaattcacgatcatatataagatttagagtattcatatgtaagaattgctactactgtgtaatcccaatttctattttagcttgttcagaatacaaattccaactccggtatgtcaatccttgcaccacaatatacaatatcctggcttgccaattggttttggttggatgctcttagttttaacatggtatcagagcgcacaattcatccttatgttagaccttgtttggccacacatgtgtgcatcacatcacctgatatagttgatccatgtgtttggttcagccaggccatatgtgaggaggcgtgctgagaatataaatctcacattgagtatttcaagccttgcaccacaagacataatatcctgggcatctccacccatttgcaattggttttgcgttgcatgctctaactttaacatagcttttgccacgtttttttgctaggttattatgatatgttgtttttggaagtttgcattttcttaaaattgcaagtctattaatccttgtttcatactgtttgtctcagcagtacattgataaattcaaacaatgttaaaaccaattgccaaagacaatctcttttgaacacaagtgtccaatattatatagggtacacaagttgtagcacaagctagaaagacgtagttcaaaactttattcattttagagagtatgattgttgatcctggtaacagttcttgtcggtatgtattgtattttaccctaaatcatataaatctattacgcacttaaattgtacaatatatgtatatatatatatattgacctagtagataatttgattaaataaacttttgaagatttattcagtatcttttcctaatatttctgtcagaaaatttgaaagtattgtctatttttttctttatttcaaacttccgctgacatcaatatttaataccctgcttcagcttaatgattcttaagcttgtgcttgttatatttatcgagtttgagcgaagtttgaaatctagttaagcccaaagaattattgcttacgttgttttaatagttaagtttgtggttcaatttcatcttacttcgatggaaaaacaagcccatcagagagttaatttggttaggttgtttggacgaactagtattaggagacttattcatttacatatgcag

SEQ ID NO: 8335 - DNA, 4513 bp, Prunus persica
  Intron number 1 from transcript ppa009989m (locus ppa00998 9m.g) derived from phytozome v7.0 (chr-ID scaffold_3; pos 5518665 to 5523177)
tagagctctcagctcctcctgcttggaagaagaaggtctcttctttctaacgttctttttggttactcaaccaaattttatttgtttatttttcggtaccaaccagtcctatttgcatgatatgaactgttcttgtagctttatgtttgcttctaattcatgggtatttggtttctttttggtttttgggtgctggggttggtatgattttagctctgttttttcttaatctgcttcaattttttgctgtttgttagtgctatgtggtagaactttgtctgaaattgcttgctttcaagggtagggctttttatgcttctttttttgtttgcaaattaatttctaattcaaggcagtaatttatggatgccgaaataagggcagtagcttttaagggatgggctcttgacttggcgtgtgctgattattgttgtaaatttttggtctcttgttagtgtaaagtgtttactgaatttggtgattgtccaaaaagtgtcggtgaaaaatataggaaagcttcttttggtgaagtattctggagaaatactttacgcgaacacatatatgccagtatttttatttgttagtgttgttattattatttcagcaaagttgtattccctggtaaaaatgcttaatttgtgctctaagatataagaactgctttatctgtatggaaccctagctggattgtgttaaaggttacatcgtttagatcaagtactttttgttggcagtttgtgtgaatctctgttaatatgttgaaaaattcatcctcttagaagtaagttggagctagttctgtataaaagaaatgtaattctataagttcagtaattggaaggtcttgggaaataaatagtggccaaatattatttgttctagatagatgttggtggtttccttcacatttacaagtatggtagacttactagaggtgagcttgaacttaggatctttttatttttttcaggtaatgagggaacccccatgaactattcccttgttgggtacaaagtcttagggcaatcacccataaaccgcatatccatgaactataagttttcttcagtttggcacccttgtgattcccaaacccagattttcttaaaatctgcaatcctgatgattccatttctattaataggtgcttgctctgaacgtttccaaaataaatttttaaccatatcccggttcgacgggtttcgttttgttattttttgggtagatttgattcaactaggttatgactgattagtcaatctgttaattgtccgccattaatgaatataactgatatggtaatcgaatcatgtagtgtcatctgatatggaatttctttgtagcctcactttgtagaaatctatggattcaaaacctacaacccagttatggctgttacactgtcacacaaaagttattaaacaacttttaggcttaggggaattccaagtgttgtatgattgctagctgcctggtcagatagaattatgatgagaaatcccattaaattagtgcactaattttggtttttcaactgtatgctacacgaacttcaaaacatgttgtcttaccctgcttttgccaattaaatcctaataaatggctgtccttgacctctgatggttgccctaggtaacgacaaccggctgagagcccgagctagcagctttagcttaatctaatctctgccttgggttataatcgcctcctttgaagtcctttgtagtagacatttgttgggtacaatctaaaagaattttgggtttgatgctggaacaataacattatttgtttcttccgaagtttgtgtatcagtgttcagtgaagcaccgatacttgatgatttcggcccaaaaggatttggtcatgtcccttttatgtgtctcagaacttgatttagaattagatagttgacataagtgtgggagaatagcactatacctagtttataacagtcttttgcttacttgtgtgtgattttaatcgattgtagatagatgagatgattcacctcagtataactaaaaattcttaagaagatagtcttttctagtcattatgttattgacgctatttcagaagtaacctgagttcaccacacggagagggtattgcttagatgtgaaccttgcagacctcgttggtttcattcagtaggatagctgtattcaactttctgttgtaccataaatctggatgacaactcgttaagaataaataataagattgaatccagcaacgtaagtcttttccttcagccttatgttatcttgtttgaaagtaaaacatgaggaattgaaaacttcattcctcaaaatcaatgtatgttctacgtgcatgcacctagtatgctcttgtatttctcgtattgattaggttccatgccttatgatgaaaggggagtcagcgagcttgttgtagtcggtcctaaaaggagaaccctgtttctgcacgacaaaatttcctcttgttaaattgggattaattttttgaaaaagcatttagtgtcatcaagtaatcaatttttacatgtttagcagtttagagtcaaggtctgcgagttgtgatttctagtgaactctgtctccctaaggacaagaaactaggtaaattggcatgctctttgctaaactgtgaatgaaaatagggccagaatgtgatctacatcaggataatctggtttttttatggttaaccgtagattttcataaatatttgagatctataagagacgaacctctgctactttctaaccattgggcaaagagtatttctggttgaaatattttcttgcctatatcatatagtgcttatacctaagattgaccatttaaacaggaacttggttctctaacaccttttatgttattcataaaattagaaaattgtgttaagttgaatttgaaatcctttatgctttgatttgctgatatttcctattttttccattccttcatgtgtatgtgtttactttatacaaagatgcatgtgtttgttaaaataagaagaggtgaaaattgatgcattttattttgcgctatataaagtgttcagctatataggaaaccaatgtttgcactgacaacatgtgtgtaattttgggggaagacaaaaagggtcattgtcctagcaatacagttcagatcatataatttaaatttaaatagtgcacgctttatcttcattcttctagttcgtataatcccagaaatctccccttggctatattcttgtctctcttgaaagtatcaaaataaatttgcaaacttatgaaatcagacctaaatggtcttaaaatatagagaagcaatatccacaagttcttctcccccttttctctcctctctctcttgcatgtgcatgcgttctgtatatatgcatttctatgttaaaaaaacaaaagacagcccactgcatgaggctcctgtaatgtcgggtttgactttgaggagagcaagatgtatgcagccatacccctgtttttgtagtggctgtttccggaactcgaacccacgacatccggtttcttgggcaagccattctgtttactccaatgtatgtattgcctctaacatttctttcgctctatacagtataaatcggttatattgtcctaatcatgaacaagatagtatataccttgtgtatatatcgtgtatctgcagtataaaattagaattgtcgattgatgtatgacggttgtgaaataagttggatcctgatagagtgaggataagcaagtgggattctatggaaattttggtgaaaaaaattataccatgccaagaactcaaaggttgttatatacaactggagaactttcatcagtaaaatagtgctggaggaggtttacgtcttagatggatgccaactactttagaagtagactttcacatgaaaatcttcatggaggacatatttgtgataaaacttcttgcaattgagttaaaaacccaagtggaagttaaggtttcatttgctatggttgtttgttctggtggagagccacctaatgttggagaagttttctggtactttggccatgacaaattaaattcttatctgactattcaagtactcaggcctgatgttgcacaagtttgaaagaatttaattaagctcatctgactattctggtatatgaaatctgagtgttctggtaaaatatgtggacaacctactcaaaacagcttgtgaaaagtgaatgatattctggtgacattgtgaatctgctttttatttggtccttgtaattagatcacagtcacttttaatacatgctgcagaactctttgcctacctttctaaatgtttcaaaacaagggcatatgcttttctgaatcctttagtatttggctataccatgctagcattgttggaattactaaggatggttgatcgagttaagtcaatgtggttgttgtacataatccttggatatggttttttacattttctttctctttgttccgcagtttttccccaagaagggaggtacaccaaggaaaaa

SEQ ID NO: 8336 - DNA, 1218 bp, Prunus persica; identical to SEQ ID NO: 8227
  Intron number 1 from transcript ppa006668m (locus ppa00666 8m.g) derived from phytozome v7.0 (chr-ID scaffold_5; pos 1682640 to 1683857)

SEQ ID NO: 8337 - DNA, 2452 bp, Prunus persica
  Intron number 2 from transcript ppa003948m (locus ppa00394 8m.g) derived from phytozome v7.0 (chr-ID scaffold_1; pos 1026699 to 1029150)
gatagtattattagaggtatcgtttcctccttcatagttcatactgtgccattctttatgctgtttctatcagaatgtacctgtggataggttgggcccaggtcaagtaaatgctctgcatgcatcctattttagccctgagccctttatttgaatctgcaattctggagaccacgtttgaaaagattaaatatctttattggatagaggcaaccctttcttaaatacagcatactgcccgtctattccataggatatctctgctttgttatcttcctcctggagaatatagttaattagtttgccatagaatatctctcaaactcctccagttttcattgttataaagtccgcaactgtcaccttttatggtttgattgatttgagtgtggaaagaaagggtcttgccggtgcatgtgaattagtattagtgcctccatgataatatattggtttcgttttatatacttcttctggaacttggggacatggttagaaatctttgttatgcaacttcttgatatggccttggagctgagtggcaaatatagaaggcatttcttcccttagtttgcaaggattaggccacatgaagatgagttgttgcatatgtcatcttcttctcctatgtgccatcatgccatgcttgtgttctactttcctgcggcaattaaagttggttgagatgagcatatgccaaactgattctatgcagggtttctaatttatgtactccttttattgctttaccttctaagcaccagcaaggaatttgggttggttgaatctcattcttcatttttaatggttcggcctatggtttgtcctcctgtttggagtaatggtcatcatgtacgtacctgcttaattgcaatctattttattctcgttctccagggtttgagtctgatgtcatccttttttaatctactcccccaccctttttttgattagtttgatcttgttaaccaattgtttgatttcgactttggacagaacaattcctaacttccatggtctagtgactttgaagacacaattactctgtggtccagtccagaccacaatttgtgaactttaagccagttaacctaacctgttgtgttgacatttaagactgcatttccttacaaaccttcctatttaatggatttattcattttgaattttatgtgatgattaaattaatccttgcgcataggcttagcttttccctatacctgtacaactgctcttactactagctaagaataaggaaacctgggtttggcttaccaggatcttggacttctgatgtcaaagattaacaagcgcaaaaaattagagtctctttcaagttgtcttaagttttctgtttgtaaaattttggtttttcatgcgatacatgaaaggatttgttaattccctattcgaataggctgggtattgtctcatattgtgttatcttgagggagaagaatgctggtgtcaattgtcagaattttcgttttacctggtatgtacattacctgacatgtgcattatcacatccttttcccctattttggtgcattgcttgatcctacatgataaacttcacttcgtccatgcacttcaactccaagccattcagccaaaagtggcaaattgggccaaaacctcctactgaactgagacaaaccaagaagggcactgtctggcaaattgagcaatgttctctgatctcccatagatagaacctagataaacttgaagggtttactctacattttaggtagtttccttcaaactctctaacttcttcataatacatgattgcggttttgtgcttggcttttttattcaactgcaaaatgatgccatttgtataggcaagtgaccctagcctggttgtatttagagtttacttgtgttgcaaataacatataagactactactactttgtttttctttgtttttggtagtttaccctccggttactggatcttatcccttttttttgtttattctttttattttatgcttatggacattacaattgatatttgcagtctatcatcttgttattagtcgggtatattagctacgtgcttttgtatgtattttctgttcatttagtcatgagtacatatggtatgttttccttgcaccatgtgtgagccttttgacgctggtctggtggtcatcaacaaaaccgttttcttaaaggttcctatcaatagggggttgttttaaatagctttggattttcgatagagaatctggagccgccttttatggctgctagcagtcattgtcatggcatgtggaacaaatagagaggttccattctgagccttgatggcttcattgtgcactgagagaatttgccccccaaaaaaaaagggaagtccttttgacaagttacctgttttcttctggcatttctgataagcagatcttggatttgggagtggcaagtcaaaatccttg

SEQ ID NO: 8338 - DNA, 1827 bp, Prunus persica
  Intron number 4 from transcript ppa009408m (locus ppa00940 8m.g) derived from phytozome v7.0 (chr-ID scaffold_7; pos 4717390 to 4719216)
gtcaattagttatccttgcagctggggagaaggtaaatagagtaacggttgttttgcagtttgttgctatatacacagtccttgctacctgccagatatattttgaggtcttatagggagtaacattgttatagacatggttgtgaatgtgcttggggtacttatgtatttagtgtcattttgccttcagttatgaaacatagatgaattttttttacatttcaccttcttgcacctgctttggaaggttcaccattgaatacaagcgttcacatgggttgggtaaatttgcgttgggaaaatcaggtttatatctgttgaccaatgtgttgaattaagtaagagtcttgcataacttgaagttaagccgcttagaaatatggggttacattagttatcaatttgagggttacattagtgatcaatatgatcttattgttttcaaagttattttgattaagggttttctaggagctttaattataaaataagggttctccaggagcttttagcaatggtagttttcttgagtctaaatatatctgtttattgggcattcacctaaaaagcaatcataatctttgaaggacaaggaatcatagttctattaggttgaataaatccaaggttcctttatgtatactttattgtttacaaagtatttagattttggttatggaataatcaggttttggggcttgtttacgtacttgggaatcagaataggaataataaaataaaataaaaagaatctggataggaaggaacagaaatgaggcatttcctattaaagtgtttactcattgtctgaaatggaacgaggatacgattgatttttcattaacatgtttactaacttccaggaatctgattcaaatctagtttgattacttcagttctattgggatgaataaattcacgattttataaatatacttcgtagtaaagaaaaaaaaaagagatttttgattactgagtttttgttgcattaagtctttggataataaaaagaaatctgaataggattccacttatggcatcaacatgttatataaccaagttgaatagaatgaaaaagtaataacagagctttagctactgcatcaacatgttatgagtgcttttttggagcagtcattacatgagtttctttctttaattacactaaagtttgtgatatgtgcaatagatatgagtaactacaccgtacctatgtatggttatcttcagattttggatatcgtattgccactaaaagagtaaagctggctttttcgaattataatccatgctaggcacagttaaagcttcattaagagtccttgactgtgaaagagcttgtacacatgacgtgggctttacatattttttttgtgtgcgaacagcactagattcctgcgtaaccccaacccccaaacaaaaagagtaaaagaagtattgtttttattttgattcctgaacacctcaaaattgtacatatctttcagtttaaagaaagcgaaattcaagcagaacaagatatagtgaagggaaccaaaaaaaaaaaaaaaaaaaaactcctctagggttattataaagttcttcttttcctagggctagagagttgcagagttttgagtaagggatgggctacaaaatacaaataactatattatactcttcagttcagagtcaagattgcaatacctatggttaagtaaggagtaggattccttcacatgcttattcctatccgtaggttacaaatgtgtttatttgtaacattgctgcaacagttcaactgtttataaatgtaggcattgtacgaggaagtgattcctgctttta

SEQ ID NO: 8339 - DNA, 373 bp, Prunus persica
  Intron number 13 from transcript ppa004468m (locus ppa0044 68m.g) derived from phytozome v7.0 (chr-ID scaffold_1; pos 35079119 to 35079491)
atctttgggcaaccttcctcgtgttctcaggcgaggcatgtgtttcattgtcaaactctgaaacttttgagcagtcaagtttaatttaccataattgatttcaactcaaagtctcagacaaacttgcttttgtagtaagagaaaattaaatttcagagaatgaattaggtttgataattctctgatttattccctatttaatttgatttaatgaggtttggttgcacttgatggtgagtagtcaagtgagtctaaactcagaaagttatttccatcattgtgttagtttgtatctccactgtctatttgactaacctgtctatattctttttcttccattataatataaaaggtgcggataactctggagctg

SEQ ID NO: 8340 - DNA, 4960 bp, Prunus persica
  Intron number 8 from transcript ppa002620m (locus ppa00261 8m.g) derived from phytozome v7.0 (chr-ID scaffold_1; pos 36035788 to 36040747)
cttcaactgagcagcaaaggacggtaagcacatttcctttttttcttgatacttgggccgatgttttgatctacatcagcctttcttgagaaacgaagtcataggcacgtaattttagtaaaaggtgctttagatgcacgtggttccaagttgataccaaataaaaaagattttggttatagccctcactgacggagtataaatagcacactggatggatcattcaatgcacttagtgatttgatttatctgttgttgggtggacagatgcttggtgaggctttatatcccctagttgaccagttggagcacgagtcagcagctaaggtgacaggcatgcttttggagatggaccagactgaagttttgcatttgctcgagtcgccggaggctttgaaggccaaagtggcagaggccatggaggtcctgagaaatgttgcccaacagcaggctaacagcagcgctgatcaactatcttcattgtctctgaatgacaaccttgtctcgtaaatgagaagtgtggcatctggtgtttccttgctatgtggggagtctttggcataagttttcgtttgatgttggagtgattgtagctttttcaaaattagaacctagacttaatttcctcctgcaattttttgtttttgtttttggtttttggttgtgtaggatttttactgttgctacatttggcgtgcatcatggattcatggttttggttaatttaatgactttagacattttcttaaattttttttgtagtcttttcttattttaatcgttttgttttgaaattttaatttttcccctagattctttttagcctttcactatttatccgattcattatggtaatattccgaattctattacgattcggatgggtaaaataatggaaatgaattggcgagtcgaagggaacttggaggtgtgtgtttggccggaaacaaaagcgccctttgaaagcgacaaggaattctgattctttgctagtcttttaactgcattaatgaccaatttgtataaaaagtgttgcaaattcttggatgttgccattgtccacaaatgtctatccgatatgacatgtggcgtattacgggacggctctcagaggctagcaattgagacttaaaataatgagcctgcctctgtcgagaggctagctaggtcttttgggtgattcagacggcaaccaaaaaagaagaaaaaggaggaggagagaacccaacaacaatctccctcagctcaaggttttcttcttgttcttttaataagctgctgggttgttaattagataatagttatatgggtaatattggggtgggaatggctgtatatattccttaataagctgttgtgtggttaatttgtgaaggatagatgataatacatatattagttggtagcagtggcgaatccaggattctcgggccaatgctcttttaaaaactttacattatagtttcataaatcatttattttttaataattttaggcacttttgtttatgccttatctaaaagagaatatcattttttataaagaataaaattacaatgtatagagactacaattatcttttaaattttttttaaatgaaactaacccaaccccctactttgaaaaagaaaattaaaaacaaaaaacaaaaaacaatatctctcattttcttttaaaaataaaataaaaaatactacatataatataacatgtttgctgttgttagcgtcccccactttaatacttctaatattatatttttatgttgttttcaaagcaaaataggcattcagaaaaaacaaaaaaacaaaaaaacaaaaaaacaaaaaacaaagaagagactagctcacgacacagcacgaatcaaatatactcttttttccccctctccagtcaaactctctgtcggtggctcttcttccagggactattttgcgcctctgggttgcaacacaaatttcttttgatctgctctaccttgtctttccttttctctgtccaaaattaaaactcacccacccattaccattgcagtaatccatcaaccaacctctctctctgtctttggggactttcatcgagcacgttcattgcattcaagggtcaacaagctgctggctaaggggtctgcaactgctctcctgcgacctccacagccaaacggcggcatcccagggggtcaattgacccctcttgtcccttggtgcatccgtttgtggggtcaagcgacccctcttgtcccttaatccgtccgcccctggttggtagttggtactttgtttccttggatatgttcaaagttggtgactgtcttctcatctttgcatatactacgggcaaattaacacttgcactaaacaattatatatccaggaactgcagcccacgtctgcaactgcatataaaaccagaatagctaagcagaggtggaaatatcgagaaattgaaacagctcactgcgcgtgagtttttttttctgtaaaatgaattccccaagtgtcaaatacatttcagaatgctttgtccagccacaccatgcctcagaagaatcaaagcagcccttctacttgacccccggtgatctggccatgctctccgtgcactacattcaaaagggccttctcttttccaaaccaccagaagcaaaactgggacaggaggatttcaccaattctctgttggaaaggctcaaacactctctttccattgcacttgttcatttctacccattggcaggtcgctttgtgaccgagaagaacgaagacccgcctttgtatttggtatatgtagattgcaacaacagccctggagccaaattcataaatgcaactctggacatgtcaatttctgacattctttcaccaactgatgcgcctttggtggttcaatcgttttttgatcatgacagggcggtcaaccatgatgggcacactatgtccttgctaaccattcaggtcacagagctggtagatggcatttttatagggctttccatgaatcactgtcttggtgatggaacctcttactggcatttcttcaacatttggtctgagatctttcaagcacaagcacaaggagatcataataattttgtacccaaaatctcaagaccaccagtcctcaagcgctggtttccagatggtcatggcccaattatcaatctccctttcaaacactcggatgagttcattggcagatatgaagctcccaaactcagggagagaatgtttcacttctcctcggaatccatagccaaactcaaagcaaaggccaatgcagaatccaataccaccaaaatctcttccttccagtccttgtctgccctgatgtggaggtctattactcgtgcgcgtggtttaccccgagatcaaggaaccaactgcaggcatgtttccttcaatacattccactcagaattcccaagtagttttctgtttcttgatattttcataaacatcgatatttaataccttggttgcaggttggctgcgaataacagaggaagattagagccaccattgtctggagattattttgggaactcaattcacccgattagatcagaaattgtcccagctggtgagttgcttgaacatgggcttggatgggcagcgtggaagttgcacgaagcggtagttaaccacaatgacaagttgataagggaacatgttgatggctggctgaagtctccagctgtttaccaactgagtttcttcgatccattcagtgtgatgatggggagttcaccgaggttcaacatgtatggaaatcagtttggaatgggaaaagcactagcgcctagaagtggttatgcaaataagtttagtgggaaagtgtcatcgtacgaaggccgcgaagaaggaagcatagacttggaggtgtgtcttccacctgatgcaatgagtgctcttgaatgtgacagtgagttcatggaagctgcctctttacccctttattagtgacaagtgatcatatgaataagaatcatgcaatctgcacaatgtttaagtagagttgagaataatatgaatatgcatatgcttaatttggtagtggaatgatagaaaggtgtgtggaaggaagaatgagaaaaaatggaacagaaaaagaatatttcattaaaaagcacttagttcaaaagatatgaataaggtgtatatggaatttacacattcaaccaaatccttagccgttcagccaaaaatcatttgttagtaactttgtgctattttaaacataaaaaatattgttatgactaacaagatatgacggatgattgtcacattttttataattatccacataataataatatggaggcaaaagccaagggcggccctaggtggtgcaagtggcgccaccgcacaggacatcaaaaaaatattctttatattatattatattatatatatatataaatatattaatattataggaattgtatatatagtatagcattgttgttgcatttgtgtttaatacaatataatttaatttgttaatgacatttgtgtgcaactactttttaatttttgattgccaattttttttcctattaaacacagattgcttattagaggcagcaagggaccttataggggcacaaatagcttatttttgtaccaagcatttaattttatctaatagaaacatttaaatttttatgaatttgatttctgattgtcattacatacttattgatggtgactttttagttataaaaaaaattgtttatgacattaagttatggaaaatttttatttatagtattttcgtattagattatgtgatgctccaatttaagtttcgcacagggctctcaaaatctcaaagacgaccctagcaaaagccaaagtagcaagcatgtggttgcttggcatgagcacaagattaaaacgttatgtttttaaatgacaagaaaaaaaatgtaaagaaatgttaacataccttgggtggacag

SEQ ID NO: 8341 - DNA, 1867 bp, Prunus persica
  Intron number 1 from transcript ppa008296m (locus ppa00829 6m.g) derived from phytozome v7.0 (chr-ID scaffold_1; pos 41238305 to 41240171 reverse strand)
gaggcccccaattcttcttcaatctgtttgaaaaggtcggatcttgccatttctttcgcagattataaccgtaattttagtgggtcggtttgatttgcattccttgtgcttgaaaaagcttgtttatttaccatgatattgctgatttggtatattgcgtgcataattatgttagttaaaaggcgcttttgtgatttttagtcatgtactttacccgaaagttggttgatttttttatggttttatgaaaagaagaatatagatttaatttcatgaacaaatacataggacgcattgcaaaaacccacatgagcaaatcccagctgcacgaacaggagattttatgtcaatagattttccggttatttgtatgttagatgaatgccaatccaagacattctgtttaggtagatttggatattactacaaggtacaagttagtggtgattccagagttgtcatgtcaaagctatcacaaaagggcttattaggttgaaaattttacttcaaatagtagtacattggatgcgagcaaacatagttcaaaaggctgtatagtttacatgtgaacaatttcaatttaagtctgattgactagaacatatgaatcttaatgacagataaggttgagactgaaggttttgagtaggatttcagtgcttccaaatggtgacacaaattcttgttagtcatctcgtggttatagaaatgactatgcatatgctgtttccagttaataaaataatgccaatgtaattttgttcgtaatagaaaggaaatgcatatgctttcaaggaaaaagttataggattgaattatggttgacgttattgatcgaatcgtgaaattgttgaatggcataggttcgttagtgtttggcagacagaaaagtttttgttccaaaaaggagataaaggtgaggcattctattgaaactgacatgatcccatgtgtaatttctgcaaaggtgggaaatagaggataatctcgaggggggaggagaaatttaggaattttgtggtcctgtcagctaaaaggtccatgctaagtgatgtaatattgtaatccagcataagttttatagagaacgaatttgtgcaactcttggcaaggttcagggtgatttgtaaatttgacagcttgagagcagagaactaggtttcaacaatgtagtcattggggttatttaaattcttggaaatagatatttggaaaccaatttttccgtgcctgtagaaaccaattcaatagtattcatttccgttgtgtcttttcttttctgtagtagttggattagttacttctcggctctaaaaatgattgagtaattggcagatgtaactaacatgtaaatctaaataacttctgacaaaattaaaacataatataaatgaatgtgacccctcttttcaaaaaatgaatgtgatcccatacatgatgaattctgtcacaatgtctattcttgaaaggtgctagccattcttgaatcatgctttttgattcttcagaataagattggtttaattgttttcattgctcattcaagtgttttgtagcttataaaaatatgtattgaccatagttgagttgaccgttcaatcttaaaacaataatagaactatgttgatgtacttcatgactgcaatatgctagtttccatagtgttcaagtaagaaatttaattctggttctctagggataagcttaaaatatcgttttgtttttgtaggatagagaacttgccttttgtttttgcacttttttgtatatgtaagtgatggtgagaggagactgaaatgggaacaagacattagtacttaagttctgaagtcttcattgttaatttacagattcttctctgagaact

SEQ ID NO: 8342 - DNA, 3415 bp, Prunus persica
  Intron number 5 from transcript ppb022850m (locus ppb02285 0m.g) derived from phytozome v7.0 (chr-ID scaffold_6; pos 22321825 to 22325239)
tgcaacaagggagtgccaacaacagaaggaacgtattcccggaattatctaaacctgtgtggttctgtgcatcctattcaaatgttatgtgcacatacttgttttactttcatagtgattaggctgtttttttattcagacaactttgcaatgggaaaagatctagagataggcctatccagtaatagagatttacagcgtcagcacgctaatgacttttcaaccaaaccagcaggaacaagacagaataatctgattgagataggttctggtgaatttgaccaccagattgataaggggcagctgaagttcaactatgagagtctttccagtaagccaaagtatgatggtgctactataacaggtgttgtcactgatcccacagatcccctgatggacagcacacaattcgaagcttctaacagacagtataaggccttagacagaagcactaaagccaatagtaatactcatgaaccatccgtggagctcagtttgaaaagacttagaggagttaaaggcactgagacaacagtacaggatgaccgcaatgtcttaagacgttcagactcttcagccttttcaaggtatgaggaacacaaggacttgatattgctattgtctactgataaagtggaagtttgaaacagttgtcttgtacgttctcttgaaatttctatgtggttacccctagcatatttcttcctgtgcaggtataatgcagcctcaaatgctaacaaggctccttctgggcatgttggaagcaactctccacatgataatagtggggaagttacaaaaaaggaattttttcgcgatattcgacctcattcaagcgataaccctcccaatcaatcctcaaatggaggcagcaataacattgacatgggctccacaactaataacgatgttcccaaatctcaagttataaacaagtcagcagcagcatccactgtccaacttttgcatccatcgtctactttccatcctgtgaaaaaggaccttaagagtgctacccagcaagttttagtagataatgctaataatgtggcggcgacagtattggctcaatcaagagatgcccagaagcaactccaaattcagaacctccatcatgattatgatcactgtcaggtccatcgccatgttgtccacaccatgcaaggacaacacctgcctgaacataatgatttatctttgaagaaattggctgtagctgctctgcattgtggatcgtccaatgttctgagtgggcctgttgaaggtaatcccggaaattacagtgtcaacggaagtgcttcaggcagtaaccatgggagcaatgtgcaaaacggaagcagcactggaaaaaatgtaggtggtacaaacatggaaagtgatgttgctgggaaaagtggaagtggtgatgctagtggaaaccagagcggaaatagggtagatgaaaacaaggtcaagcaaagagaagctgccttgaccaagtttcgtcagaaaagaaaggagagatgcttccggaaaaaggtgactaattttcggttgtttcatcctaatgctagatcttaataagtggtttagcaataatttaggtgttccttcttctcgaaattgttttttaaattacctccactcatttcttctccctattttcatttcaaaaatttcttatccgtatttgctcttccaaggaaggcttgttaaattgagtgcttcctgtttgcgcaacattgatgtgaattgagtaagttaaatctgttaaatgcctcctctcttgcatgcttgatttcctttagaatatttgaacagaactcatcaaaacagaaacgaaatgtagacgggtttgctgaatttggtttttggttggtttttcaggttcggtatcaaagcagaaagaaactggcagaacaacgacctcgcattcggggacaatttgtgcggcagacggtgagcgagaacacggtcaggacaacagatagctaatccaacacttccgataaaatagggttgaaattcggtgtacttgtgagttgttatcagttacatgtatatgtacatttcttgcaactcttatgagcgaggtgcatggtaaatattcatgtaaagaattggaggtgttggaggtgagaactctataagacagaccacaccttgagatgcattccattattgtggatttcaagatgcttcttttacacaggaggccatcggctttctgcgatcagagtctttctatttggtgtggtgttattttttgaccctaccctggcaattatggaaatttattttccttttaaaagaagaaaaaagcctttttaattcctatctagattctatgttattctaaatgctatttttccttcattattttttccccaaatctcatatttttcatttcattcttcccttctattactgtggagactaaaccaagaaatgggtgttctctagcttccagctgacagtacttaaagagacaatctgggccaggcccaagcttgtttgtgattgattttgttttggtacttggacctctaatgtacccaaaaaataaaataaaaataaaaaaccaccttaaattttagcacaattgaatcatcatcctcctcccgtgacatgcaatgctttcaggaacggacccatagtggggtcaatggagtcaaacgaccctatggactccatgaatgtttgaccctatggactccatgaaagcaaggtagaaggtccctttgaattggggtgtgaccccatgaatggctgaagggaggagttgcagatactgaggaagaagaagctgaacaggaaatctgtttttttgttttaaagaagctggccaaaacggcgtcgttttggcccagcaacgaatttttttaaaaaactcgctggccaaaacgccgtcgttttggaccagcagtaacaaattttttttttaaagacctggccaaaacgacgtcgttttggtccaggtctttaaaaaaaaaaatagaacagattgtatagctgctgcacagacaggggcggatccatgttgggacaagaggggtcagacgaccccttggaagtctgaaaaattggcaacggagtccatggaagcccccttggacccaggctggaagcccccttgtatgcacacaatgtgctcgacgaaatgccccaacaaaattccctttgcagctgcgcgcgctgcgcgtaattttttttaaaaactgccttaccaaacgacgtcgtttggtcaaggctcagtcaaaattttttttaattgacctggcctcaaaacgacgtcgttttgggccaggttaaaaataaaaaaataaaaaaataaaaaacagaacaacacacacgcacagcactgcacagattcattttctccttcattcccaattccacagcagcccctctcttcccatcctctcaaaccctaacc

SEQ ID NO: 8343 - DNA, 957 bp, Prunus persica
  Intron number 1 from transcript ppa005242m (locus ppa00524 2m.g) derived from phytozome v7.0 (chr-ID scaffold_1; pos 12895360 to 12896316 reverse strand)
gctcacattagtggccttgttgctgctcaggtatgtgccttttgtggtgtttgttggtgggatttgaatcttttgttttattggatttgctttgcgtgttgttagatctgatgggttttgcctagtttttatgttctatgaattgggtttgtgtagtttacttgatttggtttagcagatctggttttgacttccggttgtgatctatattcattcccatttgttcagaagatccactctaaatgttcttgtgatatttttgatgtacttctcaatgctttcattatgtatttgtgattctgtgtagatcttgatctttgaaactttgaaattctttttcttcttttttatttatagcttatagagtttcattgtatctttagtgcaagggcacagttatgttttttgctttgagaatttgatcctatcattattcacatgcaatgtcatgcaggttcggatcagcaattgagccatcactgagatgcaaataggaatggatgtagattataaaatgtgttcttgaggggatgaaaatggaaaactaattttcttttagttaattaaatatgaagtagatctgcactgcacgtttagttttggttttgcttgttttcaaaatttacggatatgctatggcagggctagtagtagtactggattatgacttgtgtcattttcttatatctgtttttcttttttctcatttttaataataaaataaaatctcataaatggttcaaaataagatctataggagggtaaatttcattttcaactctaaattgcattgaggttatttttgtgcttttcacctaaagggtgcagccttgtttggagtattaaattgctggcattgctgtcctcttaatagattgccttttcttactccgtttttcttttcctctttatttggatataggaagctgcaaatccctttgagtactgtgacattgt

SEQ ID NO: 8344 - DNA, 462 bp, Prunus persica
  Intron number 23 from transcript ppa020237m (locus ppa0202 37m.g) derived from phytozome v7.0 (chr-ID scaffold_3; pos 15040042 to 15040503 reverse strand)
tgctggataagctagcctgctctattttgcctcaggtgcctgaattttatttttgttatgcagcctcggtttctttagagttttggtagatgatatttttccctatttttttttctagcttttgtggatttgggagcttttctatgaaagtcagttttggttgtataaatataacagaatcacaatgcatgatagccagttttgggtcaatttcgttaatttaccttttcttatctgaaattaagttttagaatttaaaggattttctttgattatcaattgtcattgcaataccaagaagtgaaatcggaaacttgttccctcacccagctcaccaatggagtaccctatattagggtcttgagaatggatttgagaaatccctattaaaaatctgggccttaatattatttcaaaccagtacttaatatatgtcaactttctatttctgtattaggcttt

SEQ ID NO: 8345 - DNA, 904 bp, Prunus persica
  Intron number 5 from transcript ppa004527m (locus ppa00452 7m.g) derived from phytozome v7.0 (chr-ID scaffold_4; pos 5796783 to 5797686 reverse strand)
gacaagtggtgaaatctgagtttgctactattaaggtacatgaaatagattctgattgcaatgctcaatccagatttttttttttccatcttgcatttcattaactcacaggtttttttaaacctattcaattaggttgattgtaagtttctttttatttatatatttatttaaatcttcatgttatcctaggtggctggagagcttattagatttggtagttgagagtaccataattaatgtttgttattttttcaaacttctgaatctttaattggatgaatgctgtgatacagttgtagtttaaatttatcttatgccggtacatccatacataaagggtctggttgtagtttggttagttactttagttgtaagggttccacattatggctgtggagacctgggcttgatccccgtagtggcccatcaactttttctttgtgtagataaaggaagcccgttgagttgagtttatcctgtacacaagtacttccagatcttaggtaattaggttatcaagtgatgaaaaatattaatatggtaggctttgtttttggtttgaaaaagggctatggataaaaaaaaaaaactgagcattgatctagagttttttaattgatactcataaaaaagattctgttttcttgtatgtgttataatgccccttgcaagatgatcaagaatagcaataaaaaattgcaatatgtaataatagtattaataatcataatacaaacaacggtaatccaaaatgctagatttagtcacattaaaatagattttttttgttattattccttgtgggtttgtctatttcaacaaggtaatgagttttgcattctctttcatccttcttgcttgtgcagattcctgaattagattttgagatccctccagagtc

SEQ ID NO: 8346 - DNA, 1572 bp, Prunus persica
  Intron number 8 from transcript ppa020585m (locus ppa02058 5m.g) derived from phytozome v7.0 (chr-ID scaffold_8; pos 345137 to 346708)
gctgttggaagcagtgcagggaaggtatgacgtcatttttcttttcgctagtaaaggtatcctataatttgtgtgtgtgtatatatatatacacttatatagttgtgatctcattttagttatgtgtgttatcagaactaggcaccatatttgtcgttgtcaaccatgcaatatctgttgtagttttcgtcaattttgattttcgattttagagaattcttttagattatacacttgataggtaccgtgtatctgtatatgcatactgcatgcatagattatacacttaacaagcataaaaatgtttgagacagccacttgttttccatgacgaatacagagagggttataatctgatatacttgacaggctcaattaatctagtggctcctggaagagtaacaagtactctttgaagtgaaaaaccgaagtgccagccaacttgggagctaatcaaaactgtttgtcaaattatcaataattttgcatagacttttctcttattaagaagtcatgtgaattgtcttctttatgtctacgaggggggaattttaattgtcatatttaggccccacggttacttgcaccttagtgcattataggaaattgttctatttttcagaaagtgcagtctcttatccaaatagagatggtcttaacgtggtgcgggatgattttcccttggctacaatgttattaatgaaggtgtgttgttttgtggtttttctgttttgttcctccctgttagtttgggaggtgttggtgctgtttgtttgtttctgttttttttttctcttcagttgtggatgcattatccacctccgtgtttcttttgcttaataaatttcttttcttctataaaaaaaacaatgttattaatgaaggtggaaaaaaggttttgcaagatatctgatattaaaataaggtaatcaagataagagataactgggatcaaacatcaggtaggtggtgatttacatggtaaatttggttatgcagtggattacaggtttatggtctttttgtggagattactgaatgccttgttggaggatgtggtgataaaaaaaaccatttgggggtatagtgtcactaacttataactgaagaaaaggtagagggatgaacactaggatatatggatctctttggtcaataatattatgttgtgagtggaggctaaacagagcagattcaagggcttggagattgaaccgacagggaatttctcttgcaaatctttttgtagatatctttgttgggagtgagtctcgttttgtgttcctgagttataatggtcatttactgttatttaacatgttacatgtataattgtaattgtatccgtattctagttcttcaagagctgccgtatcaccgtatcatattgaattgtgaatcctgtactcatatccgtgcaatataggctggcaggcaccatctcttctttcaccttcagttgtagtcatagagagcctctatcaagaatatgtcagagcagtgcccaatatttctcaaaggatgtagctctgtcaatttacatcgtgtcactgaccttgcaggtactcgtct

SEQ ID NO: 8347 - DNA, 1197 bp, Prunus persica
  Intron number 1 from transcript ppa015406m (locus ppa01540 6m.g) derived from phytozome v7.0 (chr-ID scaffold_5; pos 13131337 to 13132533)
cagctaccggagagacctgttacggttcgtacgattcgtcttattcttcttcttattttttattttcttaatttttagaaaatatttgtttatgttgtggtgtgtttggatgctgatagatagtgttggttcttctctggatgtagtgctagattcactgcttatttttatgaacgacacttcgtttgctgttcctttttctttgccaaaattttattgtcgtttgccagatcgtcttagtgtcatttcattttgtttcctctgattatttaatttaatttctggtttcttcaatggaaattttgattattcttaaacttgttttgggtattcgagttggtgtgagggctttttggcacaaatattattgtaattctttttatttttatatatcttggactcgtcgtccttgttctgcgactgattaaacatgttcctgagaaatcgtgatgagatgagcttgttttctctcattttgtattcttccgcttttggggttgattattacttttttctaaaagtttttcttctttaaaatgtttttttttcgctatttatgtttctgatgctttaattttagtcggatatccccaaatttctttcatctctgtagcttctccaacttggttccttaaataggcccaaatgtggaattgattagtttattttgtgaaattgccttttgttccgtctgatcctgtaattagggtaatgtggccctatcatttactttatgttttcctttgatggcgctctaccttttttgttcttagtgtagcagttcttattattttttagatttcttttttggcactcattactttatttttttgaaatttgagttttcaaatatcttcatgatgtactttactaatgctccaactaatgcaaaaggagtctaccatctgtattcaatctttttactgaccatttgacatcctcgctggtccacatagtttgttcattcccatattatcctgcatggggcttgaatgggcgatctggttaacatttattcaataaactaagaaactgcttgggtaggaaaatgggatctagaatttgtgaatgtggtctgtattcataatgtttgtgtcattgcctatgaaacagcagaggagaattagtagattgttgaactgatatagttaaatcatgttaataaaaaattgttgtatgctttcgtttccagacacc

SEQ ID NO: 8348 - DNA, 1235 bp, Prunus persica
  Intron number 3 from transcript ppa012985m (locus ppa01298 5m.g) derived from phytozome v7.0 (chr-ID scaffold_1; pos 579505 to 580739 reverse strand)
gcttcccagagcaattaagttcaatcagcttgaaggtatctagcttaatttttttattagttgcatgtcataattcagatatttcaagcatgttaaccattatttttttaatgaatttagtataagttttaagtggtttgattcatttatgtgattatgcatgaactatgttggaagaatgataatgggaaggaacatacagcgattttactgaaaaaatgtgactataagctctctttctcaagtcctaaaggattctgctttcttgaaatagagtggggtgggttaaacaggaaacatggttttgggatttctaaccagctagttactcaaatttcgtagggctattatgatgtttatgctacacgttacaacatcaaccctaaacccttaaaacatcagcgtattgtaagttgtgccatgtttgagaaaaaaaagtgtatttgaattgagtatgttgagatggactagtggaagtacaacgaaagctaaaatttcaagcttgtaatagcacaaaggacagcatgaggaaattcatattccacatagttatacttatgagcttgttaggtgatttttatttggattttgaaggcgctatgagaaggtgctatgaaaacaagaggtagaaatactaatttgatgtaggtggtgcaaaaatcatggttgcctgtgttttgcctagtattgagtccttgatcgagtcacaagcctcaaaaaaggtggcaatcctcaagcacttaggtttagagctttgtttagttttcttggtttctaaatagttaatcaatgtattcttcagtatttgacatatctgccaatctagactggctgaaaaggctggcaagtaatatcctttgcccaagtatgacttgcaataaaatacatagaaagtgaagattagtaattacattactttcctgtttgactaaactttgtaagtagtttgtctaaatttgtagctgaaatgatacatacattaattagttttcctatcaatagtcttttatttgtcccaatttctgaaatgaacaaaattgcattattggcgcttttgaatgatgttatcataaataacatgtgtttgcaaataatataaagcatttctttggagaattagaaccaattgcttatgagccgattcaatttaaagtaaccatctgttgtagtagctggagatttgtggaagggcatatatactgaaattgtcgcatattataggtaggaaaggttat

SEQ ID NO: 8349 - DNA, 1278 bp, Prunus persica
  Intron number 4 from transcript ppa012378m (locus ppa01237 8m.g) derived from phytozome v7.0 (chr-ID scaffold_8; pos 20533739 to 20535016 reverse strand)
caagatacaaggctgaatatccgatattcaagaaggtaattgaatatcttttgccacatttatcaatcatcaatccggttatcttagtcctacatggtgcttgtgatatcctgagctttgaagaaaatgactatgtatgtgatattattatttgctcatgggttttgccaataatttttctatgatcctcagcttggtttttgtttgaattcacccatgtccagtttaggaaatggaaaaaggttaccagacagctaaatactgctcactgctattgcctttatatccccacctaaatactagagttaaggaatgtagatattatctggaaaaaaggaatgaagagattaggtaatagaagttaatcactataagttagatgttttccagtcagcgggtcagttctaatggcacagaccattggaagagcacgtgttctttcaaagagctttttgaggaaggcattatcaagatttagaattctcagactcatattggatggcttcctggtttgttttgatttgtgaaaaagggaaacgctaagactaatgccctcatacttcagtataaaatgtggcccataccctgtgctaataatattatgaggttccttctccactagagcatattaaaaagaaagaataaaccttgtcacctttcaatattacgacttctggatttatatatatatatatatatatatagtttccgtagaacgaaggaaacctttcatttctatttatttggttcctttcttgagtgtttagttgatgtgcctgaagttgagtgcgatgggcatgttatttcattgatgttggttgtgcttacgtgtattctcagtaatgcaatcacttgttatcttcatctggttggtcaattgcaatggattgcaacaggggaagaatattactgattctgtaccagctgtagcctttttatccattacccctttatgagaaatggtttacacagtggtggaatatgagaggccattatggttgccaaatatatttgaatgtgtgatagagagaggagagcgagagaaaaccactttctgggagatgcttcactatcaaccaagactaaagaaaacctttgacaggaaacaaatccatgatatcaaacaagctaattgattggatttgtaagcaaaatcatgatttctttccgagtgatgcatctgatgttaagatcttagttcttttgcgcaatctgcagatgaaacataacagtttaataacatggattatgtactcttctatatctaggtacgtgtca

SEQ ID NO: 8350 - DNA, 1551 bp, Prunus persica
  Intron number 1 from transcript ppa011329m (locus ppa01132 9m.g) derived from phytozome v7.0 (chr-ID scaffold_6; pos 27839593 to 27841143)
atcccaacaacgtcactacagatcacattcaacaggtcctcttcttcttctctgcctttttgctgggctctttttcctgtatcgtttctctgcttgcttctgcacttccatttggtttggtttctcctgtcacttcctttcatttccccttctatttcttttctcttctctgtgttttatgttttattttaaaattttataaaaacttatccttttttctctaaactctaaagtattgatttttggtattattatttttttttgtttgtatgtacttttatgcatccatgcttgattattagctgaagctgttttcttggctatcgctgtatttttgtctccgtattgctgtttcttctgcttttctaaacagtttctcaagcactttccaacatctgcttttctctggtgaagtttaaatgggtgttgagaattgataaacggtttctgttatgtgggatatcttgatttactcctttttctttttgtgtggattttttttatgctaacgtcttctatctgacgtaaatagtgataacccacatcatcatgcattttggtgcgtttctcagatatcatgagtttatctaggggctttctgcctgcagcagtgcacactaacttaaagaatggtgctttcatttattttgacaagctgtgactagtgaactaatatttgtactttcacttgagggtcggcttcttgaaaaaaatcttgatggcatacctagggtaggattatgaaccacaaagtatgtagctttctatattatgcgcatcagttttggtagtcttttttattccattaattttgtaaggcataagttgagctgatctagtttagatttcaagttcaactgaaaaatcctttacaaaatgccaaataagtctcagaggggcattgaaactgagaaaaaatgaatacagggatactcaaatagtaaaggacaaacttgtaggtgtacgtggagaatctagatgtttgcagaactggaatggaaactatggattggtttaaaaaattcaaggaaatctgtttaaagtgctgttttggcatgttctcgtctttcttggcaccaaaacagcgaatcctacagggttttgttcctttaaagggttctaacataactcatgtcctcattctgtgatcaatcctgtgcttgactgtcaaaattgattctggctttttgaatccatcacataaacataaaggatattttccagtcgagtaggagtagcgctgttgtcgctattatgaatgtaaacaacttggctttgattctgcggctcgagtccgctgggcttcattgctttcagattcatcattttccaatgtcaaactacttgatgtctgatttgtactaattggtttattgctgggaaacatgtggtcagataattggcttcagtgctggttgcacattttactgtaattatcttctgtattagcttatagttatcctagtgttttatggtttaaattaattgttcctgatttcattaaattttactgcagtacttggacgagaacaagtcattgattctgaagat

SEQ ID NO: 8351 - DNA, 1003 bp, Prunus persica
  Intron number 5 from transcript ppa011650m (locus ppa01165 0m.g) derived from phytozome v7.0 (chr-ID scaffold_1; pos 43565722 to 43566724)
ctgtaaaatttgattatttcaaaattgcaggtctggtaagtattcttgatgttaaaatttgatcattaagccgaaggttaaattctgatgtttctgattgtgttatattaaacctcttttggatgatttaaattgtgcagttttccccttttgttggaaccttggaccttgtctgtgttatatagaaactgttctcataattggtagaataatgaaagtatcaaagaaatatttttacctgaaaaaatattagacttgtaattaacaaaactactaacagtaaagggtagataaagtaagtctcggagattttatgactgtggtcagatatagggttggagttgtgtcgcatgtgttcttggttggtgcaaccatgtaggagaaaattgccctctatatctattaggttagaaggatgaaaagtatacctcactgcaactcacacattacgatctaggctccatgatggagtatttaggtttttctttattctgaaggcttgaatctcttatctcaaccaaggatgaagaaatttgttattgtgacattgaataaatagactcagatttaccataacagaaatattaaagatcagctagtgatcagatggtgcacaaaccgttgctctaatataataacctaaagaaattttggatcacctttcagcaactagttatagcaaatttcagcataacaatacctttctttgtcttgtagcccccaggaaagatttaaaaagaggggaaaatgcattgttgtgagcatttctgacagtctacgttttcaattttttaaaatattttataatctagtctgatgctattctattagaggaggaaaaggtagatatgccacatatgcttcactgaattatccaaacttcttatgaagcatagtgatgatgcagtctcttatagaaaaatgaaaaataaaataattattttcccttaataagttttatatttcagatacctgttaaggcacctggaagagcacgcggaga

SEQ ID NO: 8352 - DNA, 1429 bp, Prunus persica
  Intron number 1 from transcript ppa000138m (locus ppa00013 8m.g) derived from phytozome v7.0 (chr-ID scaffold_4; pos 249501 to 250929 reverse strand)
attcctccaaagacgctctcgtgaagctcctaaaggtttgcattcctctaatttcttagtttctataggcaattttctgtcgcttacagctcgttcgaagttaaattgcaaagctcttggtttcggggaatttgacgctctctaacgttagttattttagttattttctgtttggttgctaggaaaccagtgaaaggaagcgaaattaagcattagaaatttctttttctaatttattttctgtaacgtatactatttctctttgctaatttcattttcgaaactgaaattctcggctacagcaagtaatctaactagttgaattagggttttcttaggggattaaacagagggtaatcttgagacgtcacattaaacttccttttttatggcaagaaacataacaaattaacttcctttttggttttggggattaaacggagtgttcagtgaaatctgtctgtttagaggttttaaattccttatggttgaaaaagttcagggcaatttcgttgatttaggttattcattcactaatgctatgtggttgtagtgtcgagttatgtctgaaagctgcacttgttggttagatgccgatgaagtgagtggaagaaatgaaatcgggttctgagtctctagtggtaacatgatattgtttacaggatcgatattgttgtaaaacatattgcttttagccgtagtttaaggatatgtatagttcacttgtattttataggaagatggttcgttcttgctaaatgtctcccaatgtaccacctaccagtacaaatgtggaagaaaaatttacccaatgtagatagaagtgtttggtcatattggaaacttgagggtcgtgttgcacttaaagaggatcttgataggtttgttctgaagtcttatagttgtagtggtgttttggtgcttgggtggtaagttggtgatccaattggagtgatgtttgaagtgctaaataatgctaaataaacacagtatgttcgattatgtcagtccttggaaatttcatcccttgtttgtgtagggttcttttagtttactcaattatttttttatatagctggtggcctggtagtggaaaataattatagaatcttccttcccaattgaaatgactattagaattatggaaatttctctgttgttttattttcatttgggactattagaataaatccttatgatattatctttgtcgttcatcatttgcctcaccaataaatgcatgctatgtggaattttttacttttaaaagacactctaaacattcttctaatcatcagtaggctatagaggataattattctgtaatgtggatgcttatacttgtgagactattgactttccatgtaaagttaggtttaattaatgaatacttgctattattttcttccaacttgcagcaagctgcatc

SEQ ID NO: 8353 - DNA, 1640 bp, Prunus persica
  Intron number 2 from transcript ppa023092m (locus ppa02309 2m.g) derived from phytozome v7.0 (chr-ID scaffold_8; pos 3809859 to 3811498)
gatattgcccttgcggtgtctattgcaggaatcaggtaaatctctctctctctctcgtctcccacctcatccataagaatttgtgaatatggatgcgtgtttctagtatttatttcctctggttcttttttccctgctcatacataagcctccatggtgtggccatgtgttaatcataattttgtacattttgatggtaaaagattctaatacttttacttatttgtattttatttattttcaaaatgagtttgtatatgccaattcatattatactgttgtgatgttaatcatggttattgtttttggttgtgttgtgcttccccggttttcttctataaaaaaggttcaattctttacagaaaaggataaaatgttatacacacacatgcatgcactccactgcctcttactaataattttattctcacatatatatgtgtacatgaaagttgtctttgctgtctttatgtggttgtctatgttttggaaattagggtttgacatggaatttagggtttgtaaacttttatggttcagaagggtataggttggatgtagatggaaattctggacaatggatacttttatgggctctctggctatttgtatgggatttttgtttttttggccagtaataagcttttagattgaaaatataagatcactatattagcgttttatgatgaataagtaaaaacaataggagctggttgtggagtagtaaagagagtgaatcactgtataggattggtagtgcctgcatatgtttgagaggaattaatcatttttcttcacagtgataagaaaatggacagaagtgatttggtgttgacaaccttaggtttttccgagcatgatccaagttatagaaaatattattttgtgcttacgaaaatgaaatgcctactattggggaacaactcagtatatcatttccatggagcatgtgcaatgggtgaaaagatgaattgaagggtgaatcacctatggccatagcaatcacttgttaaaaatcttgttgattctacttttgagcctttcaagatgatttggaagttttgtgtctgtactgatgtgattttattttggcttgttatccatgggaaaactaatgcatgtgagatactcttaaagaaggaagaccaaatgcttgctcattgccttattggcccattttgtgcttttctaatgcatgtgatagatatactctatttgtcttcttacctttaatccataaatttttaatatttcgaaaagacaatcagtatggtggtaagaccatggttgtcactagatgtgagctgccagatgcgaggcaagttcgttttgataagaacatgataatatttgtcacaaaaggatttttaaaggtggggagaattagatggggttggcaatgacactactcttcaatgtttctctttcatggtcgcatcaataacttatcttcatttttttaaaacattctctttgctgtattatagttgcttttctttttcctgaaagtatcgggataatgatgtacttagtgtgagtttaagatactatgaatcttcaaatccctgttcaaattctgtgaaactattattacccatatttgatgtctcatttatttgctgtcaacagagatttcagaa

SEQ ID NO: 8354 - DNA, 1045 bp, Prunus persica
  Intron number 1 from transcript ppa002551m (locus ppa00255 1m.g) derived from phytozome v7.0 (chr-ID scaffold_6; pos 16475937 to 16476981 reverse strand)
ctctcctcaaggctatcaagcaagcgttcattcctgtgagtcttgttatttaaatcttttcgttttgtgacgtgtgaatgtgtaatgcattttcgtaactagggttttggtttttttttttttttttgcttttgtggattctttgtataagaaattgtgttattttctgcctcaaaggtatggcctttgtttctagtttatctgttttgttggatttggggctttgccaaagttttgaattcaggatttcgtatctagttttttttctttttccgcattaattataagcttatcatttagttttctcgatgaattgtgacatagagtctctatagaatttattatcaggtattaccttcaaatgtttttctttttctctgcatgacaagtatttcttgatggatatttttttttatcaaacatgttggtagattatggtctctttgtttgcactttgctctttgctaagttcatgcatccgagttaatttactatgattgtttagtataatgtgttggtcattatttttagtttatttgcatggaattagtaatttgtatttttcttgtcattttttgacggaagtattattttttatagaggaaaatttaacttttattgtaatgccttgagtatagaacaatttttcagtttatttagcaagaagcttatggtatgcagaaattgtcgagacctagagactttcatttttattggggaaattggccaaatagtgaacttgagatttcaaaattttcttctattttattttcaaacctttatgtgtatgttagcttccttaaatagttaagtggaaatatctgcatctttgcattttttgaaagttattgcttcttgtttggtacttggtagctgcattttcttgtttatgtattaactgaagttattttccttgtttttgtgtggtttccttttccttttttttttttttttttttggttgttgctgatatttgtaccatttttttttttttttgtgttactttaaaaatcaggattgaaggtgaggttttagttgaacgaag

SEQ ID NO: 8355 - DNA, 1442 bp, Prunus persica
  Intron number 3 from transcript ppa006328m (locus ppa00632 8m.g) derived from phytozome v7.0 (chr-ID scaffold_7; pos 20834802 to 20836243)
caggttgtagtagaccgctatcctacttggtaagtcaactagattcgctattatctattatatgaattctgtatagttcatggtatctgtaaaattttgttaagatgatgcagcattatttagtttgaaatttgaagtcctttatttgtgttccagttgcaatgacactttgttgatttgtcaggcataacccatattatctgaaagagaaagttcttttatgtttatccctgttggagaaattgctcatttatgctaatccatgaagagaagaattttagtttgttcttaattaaaaaacgattattattaatgcatagtataattgtgcgtactttcatgctatgacatcttgggatttcttgattttttttctctctgaaagaagaatttgatgatatattttactctaaatatctttaactttttgttatctctggagggttataagttatagcaacatcagacatgataaaaattgaccagtatttgagataattaacatataacttgatgtcattgagattgcatctgacatggtgctctgaaggacttgtctgcttgtctgtgaaattgcctctaggcattggagcaagtcttgctagttttgctataagttgaagttctgaaattaaagtgggagtcttagatttagggcaaggaaaaagccaattgaattggtaacttggtttgtccaatctagcttgctgttgatgttgggtatatgagtttgttgttgaagttgctatcaaagttgtttggggaatatgtttttgcggcatagcactgggaatttgagatcatgccttgaagagcagtggggacacttaaaaagttaccgtttgaatttgatgttcatatcaaacacgggcacatggttgatgtatggtttcagaaaagtaattcaaggtgttatttgtagatatgccaagcgaattgctcattttctcattaagattcttctttttccttcactgtgtattgaaattttgaaatgctatttattatcttttgtcactgtgtataatgattttggcatgaaggtttactgtatcatgaacttgatcggcttgctcctgtgatgtgttcatatgcatttgcattctgattctgtcagagttgatatagttgttttggtaggggaaaaatgcttgatgtagaagccaactaaactcccaatacaagaatgagtgttaaggtttcgatgacttctgattcttaattcgtttgtactgatatataattctacacccaactaggttaaactgacaagttttttgccatttgttttatctgattactttgtataattatttatctttgaatgagagaataagagtatgttacttattaatttgattggactattatggtgatgggctgaagtagtttctttctatcttgcaggggtgacgttgttcaagttgacacttgggttagtg

SEQ ID NO: 8356 - DNA, 1606 bp, Prunus persica
  Intron number 7 from transcript ppa016577m (locus ppa01657 7m.g) derived from phytozome v7.0 (chr-ID scaffold_9; pos 1448877 to 1450482 reverse strand)
atacccatatctattaaggtaagcttgtgagttttatgctgatagttttggttgtctgcattgttgtcccgtggtttagtatgttgccatttttttgacatgcagccaaggcctgttttggagaacatgtttttttaagagcttaagactctcttatagaaaaagatcttaggactttcatcttttcttttcttttgtttttggtttttaactattagttccctgatatattttttgcttgtaaaaatcagaatattggtaaaatggttattttctctgttttgtattttaaataggtaactcgtgggcagtgcagtaagtgacaatatatctaggggttaactatgtacctctctacccaacaaaataaataaagtttgaaaaagaaatttaaaaattcaaagggtaaactttatacctctacccaacagcatggacaactaaccaaattgctacctaccacaaccaaaataatgatgatgatgaacaacaagaagaggaagtacatttacaaagaccccatcttttcctcattttggatggcagatgtttctgatatgtgtcaatgccgtgaaatcgtgtttccactgattgaaaggacatactcgctttcatgttaccaagttcccaagaatatatgtgtcccagggattggaattagttgataggatagtgaaagaatggtctttctctcatgtatggacataaaactcttacaaatcgtagataacgccccaaaaaaatttcaaacatgatattagggaagtagaactgtttgagaagagttttttcaactgcacttgtttatgcatataatgagggagccaatccttaaaggatgtactttcttggcaggaaatctaggtggtattgtgaacaattgatgaaatttttggtttggttttaccaaatcggtttgaattacaattcgcctggacatttctgttcctatataatttgcgatttccaactcccacagttgacataggaaatgtcaataaacatctctcattcccatataagaacggcttatgtgacacccaaaatcaactttttatcaaacaaatagttataagaaagtaaactttgaaaaataaattccaatatactagtaaataatgtgcaaaagattttttcatcattttaaatatatagagaacaactaatttataagtaagagtttgttttgatctaatgaaatttaacttcttcttttttaatactttatttgtagttgaagatcagttcaaattaaaagcataggaactgaaatttatcaactctaaagaactgtagctgttatgagtttgagttctatataacaagttattaattgctgcaagaacaaagttttttaaatttcaacataagtttgaatagcaggctgtctggggtagcctgttatgtctttcttagtctggatgtattaactattaaggtgatatttattcttaatagttaatgcttctaaatctgtgttctttatagtaactgcagattattaatgaatttttgcaggtcaattttgtggactgcactccttgctttttaaaataatgaaatgttttgtcctcataggtatctctcgaccttgtgaagagcttgt

SEQ ID NO: 8357 - DNA, 1274 bp, Prunus persica
  Intron number 9 from transcript ppa000161m (locus ppa00016 1m.g) derived from phytozome v7.0 (chr-ID scaffold_7; pos 15769152 to 15770425 reverse strand)
gtttgcagttttgcaaggtgcaagaggatcttcaggtgaaaataagagttacacaatatttctgtatttatgtgtactgttttttagagttgtgacatttttaattgaaaatacatgcggatgtaggcatcattatattcctcaggagctcttgtccttgtgtttttttcccagttgaattgcacagcattctgaggaaatgctactttctaatgcctatgatttaggaatcttccaataacttgacctaaagataataatagcaaagatgcatgtcatgttcatatgtgaattttctcatcattcactagaattttttcggtagttaccaggaataaaggattcattaagggttctggtggtagataatgcactttatgttgggtgtacatgagatgtcttaataggtggtcttcaactaccaggagaagttatcgtggtctgactacttttctatttttctactatacttcttagttatggtcatttaaattgtaatggattctatacttgtcttggcatttcttgagagtgaaacaagacaagcaacggattcagatccatctagtcatgggagtggagggtttactaatcaagtgcttgttgataaacatatatgtacatcaaagatcaatgagttcattaatcattactggcaccttacttttctgttgcatgattcaataggtgctgcccttctttcttatcttttctcctctccagtttcattgaaaaattctaactaggatgtaacggggaaatggggaaaaaccttaaattttcatatttattgtatacttcttagaatactagggcaacattcatttcctttatatgctaatgatagaacatattcttggtaactctgtaggcatctttaggaatcaagcttggtagtcatggattttgatacatgatacatgttctgtaactctgtatatgtatctttgctagttgtcaactctacatgttctctaactctgtatatgtatcgtttttatttctgatgagaaacataatttaagtagcatgtcatgatttctgttctcctgaataatttttgctaacttttacattaatatcatgccctttttccccttgaatagtgttgtttctaaaaaatggcagacattttttaaacttctaaaccttcatatagttctttctgttgctgccttgctttttaatcagataagctaatagtagaggtattttgcagcatctgttttgaaagaaaagctttcagctttgggttcatctggaatattagctga

SEQ ID NO: 8358 - DNA, 817 bp, Prunus persica
  Intron number 7 from transcript ppa001002m (locus ppa00100 2m.g) derived from phytozome v7.0 (chr-ID scaffold_8; pos 358606 to 359422)
aaagtccggcttccaaacctccttactgggtaatgtttcctggattctatatatcttttttattatattgtctgcgttttctaagtcattcatgttattggaagcgcacgtctttaggctatgcttagtgctgtgttacaaaatggttatttggtttccaaaccagacaatgagtaaaatgtaattggttgccttggtattagagcttggatcctagcctccacaaagaaaaaaccctagcctccatcaaaaagaagaaaaacctagccccacccactcccctcagtctgcctcctatggaggtgggcctagtcatggccacgtcttggatgtttttggctgctgtttggtcagggttattttcttgttggtagcttgtatattcttttggctttattctggagttttgggtccactttttctgctgatctagtccatcctagatgcgtttttggtttctggttttggggggactatttcctggtacctttactaattgtgacacaaaatcgtcaaaaaatttagtttatattgttaatcctaggatttttcatttctatgtgctgttcacagcccacttggccattgcagttgcatttgcctaataaaattagcttaatcaatacttaagatatttgtaattgtaagtatgagcttaggacttggaaagtttctgattgaacagcaatgtagtttaatttacaccccatgcttcaactatggtattaatttttttttccaagttaattggttagtttcaattcaacatgtacttttgtattttccaggttacaaggcaagtctcaaatagttcagg

SEQ ID NO: 8359 - DNA, 2768 bp, Prunus persica
  Intron number 3 from transcript ppa022526m (locus ppa02252 6m.g) derived from phytozome v7.0 (chr-ID scaffold_8; pos 9592293 to 9595060 reverse strand)
tttgactaattgtggtttcaagtctaaccttcgtggtaagcatttcacaagttcttcgccttcagtgtgttattgttatttgttgttcgcatttgagtatggattccatggttctcatttattgaaaagttgtatgcttggttaatctttgtcatggactcacggctaatatttttcgagggcgttgttttttctttacagtttttgctggataaaatttgaacctataatcactcgttctttaatcttcatgctgatttgggaccaacagtttgtagataatttcttttgagtgtgtttgctgtggaatgaaattgtgttgtgttagagctttctcagtttgctgtggacttcttgttcactgctggataattttttttatttttttattctaacaaagtctctctttcttattatacgatttacacacacacacatatagaaatatcaacttgttttgctttattaagaacaagatctaaataggtctttaataaacatttcaagaactggtggtgattgagattgagattactttatatattggcagacgttcagtgctgattgttctgatgttggctgtcaggattttattagcacagtagttgcatgggtacgaggatataggcttcatccttagattgttgagttgcaaaaatagttgctcagctggtctcgacttgtttaattacgggacagctagagttgcatagtcagtcatagtgcatgagaagcatgacgtttgcttgaaagtgtttgttttctacacttgatttcaaccctataaagctctcttttctcgatcctcaagcacgcttctgttgcatatcaaaattgtgatgctgtggaattttctatatcgtttcgagaatttgaggattgaagttgttctcaaactttgggttgtattgttgtaatgctattataatttttttttttaagatcgaaatcatttcagctgctaagatggacggaaattaagtggggtagactttgtgcttctttagaaatgacgatagcagttaatttggtcaactgagtgcagaaatattattatatatttaggtccctccagagagctgtttctctaacactggtcgtcaaattagaaccccaaacttttaaaataagagtagatatgatcacgagtttagggttttcaaatgatttatgtgaagcttgctgggtttagtggcaggtcagggagctatggaaggagatatatcaccataaaagtgcaaaagatttcttgtcaggctcaaccataattgtttatggtatgtcctcaaatcgttggatttaatttcagtgacatgtatatgcacagaatgttttacatctccgcttcagtttattagatgtaacagaagaggcttgaaagttgttattgattcacagttacttgcttctataggtagtcccaaccagctgctcattgtggtggattggtttgagaagcatttctgctatggaggaggattttctgttccccttctactctctgagcttagcaattccttagttctcattaggaaattaaggactcatctttctataagttggttgtatactatgcataagatatttgagaattagactagtcgtttccccgtatgggcttttttttttgttggtatatgtttatccacaattgtggaaagcagtcaatatcttcttttctttcataggttttgtatatgtactttgtagttgaggtgtttctatttacgaggacacaatggtatgcattgaaattgttatgtgctctttatatgccttactggttgtttagatagagttttcagttttttaagacacgaaattctttcagttttttttccttttgcaaacacaatgcgtccttccaaccaaggaacaattaaccaggctaatacttaccttaggaggtaatttagctttccaaatcacctgggaaggtgtgaagagagaaatagagggattgtccagaaggtgcttttagaatgaattgcaagaaaacaatcctgaagactccaaactccaaattctcctatctgctctatgagaaaccaacttgactgattctaattcgataataatgctgaaagttcttctatttctaaatcgttcaagttcctacggaacccaaagtcccagctcaaaggaaaaaaaaaaaaatatcaacacaaacatttgcaatagtaacattatgatattgagataccctataagggcaaggataaagagaacaaaaagctgtttctcccacccaacactcttcccaaaacctcactctttccccatcacccaccttaaaacgacaacaaaaagagaaatgaagcgggtaaagaaatgaaacaaattatacaaatggaggttcttggttcctataaaaagaaattatacaaatggaacttctaattgaaaatgatatttgtaatgaaaacttaatgtcgttccattgtcccttttttttttttttttttgcttttcttcaatgttttgaatatgtgagattgtttttcttatttgttgtgcacaacttagtcttactaagcaccatgtatccttggaaaatacattctgttatgtttttctttgtgtgatgaagacttggtattttctttccttgatttttattctgattggaagcactgcataattaccaaagtcaagactcaatttggtttttccccttatgaattaatttgattcttgtagtggttcaactaattggttacttgttatgtgcagattcaggaagagacaattttctcaaagtttttgaa

SEQ ID NO: 8360 - DNA, 982 bp, Prunus persica
  Intron number 3 from transcript ppa007565m (locus ppa00756 5m.g) derived from phytozome v7.0 (chr-ID scaffold_1; pos 31353370 to 31354351 reverse strand)
gatcatcactgcccatttgtaagtgttgacatcttcttctcaatgcatatatgtcgtaatagacaattgtttctacagaatatcttgctgtatattgtaaatgcattggccattaattacttaagttctaaccatttgataattcttagtcccttggggaagcgagtcgaaagtgaagctcaatggaaaaagaaaatttcaactggaagctgtggtttttgtttttatttgctgtagattttcagtatggaggcttaagatactgaggatagaatgttaagaacaattatatatgtattgaagaaaataaaacagtaacaagaggtaaagaaggaagtaattttgcggagttttgagtcagccatctacttgtgacttttttgaactcctagagggcctctggatatagacctaatgctaccagttacaggagagtggaaatataaatttccaatcaccattaaagctaggaaaactagtgacatcagtggctttgatgaacaatatgttactcaaaggtaaaacacctacttctgcaaggattaaagaatctatgagttaatggaaattccaaggtagcttgataaaaacaatgtttcacaattttgttatgctcatatggaaactttgtttgaaattgaaatttagttcctctaaattaggacccttgttgaaatttaattcttagagtttgtttaactatggatacattaatgcttataaaatgaaatccttgttgcaagaaataaatatgtaaaaagaaaaggttttattgtagattctgacatattatgttcctttgttttttttttttttttttttgggtatctaaaagtccatcaacatatgtgcatacctgctgtgtgtctacaaagtatggtttggattttgagctcatgacttgcattctaacattaatgaatttttgctgcataattttgatgcagattgggaattgtgttggtgcagctaaccaccgaca

SEQ ID NO: 8361 - DNA, 2340 bp, Prunus persica
  Intron number 6 from transcript ppa007911m (locus ppa00791 1m.g) derived from phytozome v7.0 (chr-ID scaffold_4; pos 20495330 to 20497669 reverse strand)
aattatttgaataaggttagaaactccgtttcattgtgaatatgttagatatggacaaatttataggagtcttttggaagttcttgctcttgtactgttcttccacctttccccttctctagattagttttctggctattcccttgtcctgccgttcgctttgcttttgtgcattgcatctatcactaacagaaaaagtagtctgaacataagtaggcttttgtttagtctataaaatttgacatgttcggggacgagtggttctatgtacttttcagaggatgtatgggaaacccatcaagttttgttcagttttagaccctttcccgtctttaagattaatcttgttctatcctcactactaagttagtcatagaaagcagttttctaatgaatatatgctgcaaaaaagaaatcggtattgaaaatacatttgtacaagtcaaagtctgtagctgccttcggtggaggctttaactacaattaatcataggataatttcatgtcatatgatcttttcaaatttctgtgtaatgttcaatatagtttcaatagttaatatgtggttgccacatctcttactcatattttcatataaattttttttcttcactagagcggttaatgacattgataacatattacatgtcatttaaagagtggtggtgatgcaggacaaagagaaataatatccaagtaagatcaaaatggaaatttatggaatgcaaggagaaaattaaaagaaaacgatagaaactaatagcatcacaccaatagtgttttaggaatcacttacagaggccttaggcatcacacctagggtcaggttgcatcgtacataccttgagagaagcaaagctgatgtaactttattcaatcatcaaaatctgttctaaatgatcacgactagataatttatagaacctaaacctaagaagaactctggataaaaaggtactaaaatatccttcacttaaacagcgttaaaacgactcttcaaacagaaaacggaagagaaaccctaggtatatttaagtatccttaacttaaataatgttaaaagaaaacagtccaccattattgattgaacttgcccaagcccaactatttactatcctcaatgcacccgacccaactgtgccacactacggcttgagccttggatataccatgcctttgataaacctttatgggctcctgccacttttgtttctcctcagttggtggtagaggatattttctgaatgttgcatgtttatcccttggattctagtttggagctcaattgaagctatcaagcatggctcattgatgtaattcctcaggatagtttaattagttcaattcttgccggcaagaacacgattttgcacaagtttccagttgcctaagatttcctaggttatatttgttagaatatttcatatcttacattcaatgaatcaatgtggtagaacatagcaagcttgcctatttgggtcatggctggaatctgggctgcatattaagattcttaagaaatactcagttagtcaattcaattgaactcacattctgctattgacttgagaatacatgaaaatagttattctgaaatttccaggagtttgctttactgattcctctcttttatttatttattttttgtgaaatcctgaataggaggggcataatgaaaaaaaagaaagaaagtaatgaggtcggtattgtagagaataaagaacctaagggcccatttctgaggagtgatttcaaatatagggacttagttaagttttattatttatagctaaattgctcaattggacgggacggtaatagtccttttagatttgttttaattaatttagccttattatctcaactgaattctttactttaaattattccaccccatgacactgtaatttagtttatgtataatataaggcagctgttttttattaggtggaaaagcattcagatcagaaagaaagcatgcaatccttagttatgcatccacagcttttttaatttggtacaactatttgggactcatctagttcattacaataaaagatctataacttggcttgtcaacatttctgtaagcatcttaaaaaacataattaaaaggtaaaaataacttgagggttattctttattgcagtagtagtttgactcttgttttttgtgtgtgcatgaacatatatatggatacattcaaggatacatgtataccatatatatgtatgtttctttagaagaattaaaggaatctttgtattcatattctctactgaaccactcaactctgatttttcaggcgcttgatacgttcaatactgcagtcgtgtcccc

SEQ ID NO: 8362 - DNA, 3403 bp, Prunus persica
  Intron number 1 from transcript ppa003377m (locus ppa00337 7m.g) derived from phytozome v7.0 (chr-ID scaffold_3; pos 10632073 to 10635475 reverse strand)
gaagttgaggtatgatcccttacttgctgattcttgtgaaatatgggctaatgctttttcagaatggtaatttttctgccagtgttatgttcaatagatttaattgcttaactaagcataacctgtttgttttacattagtagtttcatacgaaagcatacaaggtttctatgttattttttctttcctagaaactgttttaatttttagttagtcaattctcaatgaagctctagagagctggagtgacttaagctgattctttcctttcttataccaataagcttcttttgtatccgtggattgtggctttcaagttcatttgagctctaatttttggttgttggttttgatgcacttccctttggtccagaggatgtgaaagaaaatttgatgatcttatgattggaatagagggattaaaaactttggcgttctgatactttatttagacatgtttgctggatttatcaacctaggaattgttaattggggcggggaaacaagtattacacatatgggcggcttagatgggcgtggggctctaagaaatgggtggctgaagtgagtgtggggattaagaaatgggctggattatgtttggagagatggagaaggctgggtcttgaggggactacacacatacaaggtttttcgtctgaaaccaatcttcataaataagacttagaaatgggatggcttatgcttggataggtggaaggagttggtctttgagggggctacccatgcagtttttagtttcaaactaagaagcatggatacgcggacttaggtccgtatcccgtatcagatacgcagtcgggtacgatatgcatcggatacgtattggagtcaacggatacgatctttgactaacggatacgtgtatcctaggttctggacacgagtatcagacatttcaaatacgtttctggtcaatcttgaagtcagaacccaaagagagggagaaggaaagattagagagagagagagagaggagaggaggaagaagaagaaaagataggacgtacgctggccgctgcgtatgagggagggagagcgagcgagatgaagaagaggagagatggtggaaaaagaaaaaggagcggcccaagctcgaggaagaagaagacctaatttttcattttttaattaaattctcaaatgaacgacgtcgtggttgtaaaaaacatagatatgctgacaaaaaataattaaagatatgtttatgggttttgggtcttaattaataatattaaaatgggcctaaaaagatatgaaacaagctatacaggcctaaaaaatataagaaccagaaaagaaagcccaagaatgatacactatatttataatttataattttatgttatttaaaatatatttaaaattatatatgtatttattattatattttaatttccgtatccataacgtgtcgtatcctagtttttggacatttgccgtatccctgtgttgtgtcgtatcgtatcgccgtatccatatccgtgtctgattcttaggtttcaaaccaatctgcttaagggctttcaaattttgcaggggccatgaccccctttcgtctctatataaagtttgctgttggttttcctctgtattttttttttctttttgaagtgaaacagaactttattaaagtaggaaagctgattacaaagagtggataaggaatccacaatctgaagaaaaaagagaaagtacaataaaaatcagctgaaactgattcccataaagttgcccagaacctcactgtgtcccggagttcatctacccccgcacccttataatcctcaaagattcttgttttacgctccatcctaatgttccagaaaactgccaacaagcaacccaagggaaatatcttcccaagggctacgacttgagcttctcaccaaaagatttgcatcccactcattagcagcctcctcaaatttactcctaatcaccttatggcacaatgaacttgtttctgttggattcctccataaccactaagcaagtaaaagctttattcctctcacttgaattgcccacatctaaacccccttcgtccttacttgtggccatcatctcccaccttactaagtgatctttctttccctccttttattccttcccacaaaaagcttctcattaacttttccaacttactaccacaaggaattctgagcagggacatataataaatagcaatactgcccaaaacagcttgaatcaataacagccttccacctctagataaaaatgcctccttccaattttgaagcctcgtttccaccttctccaccactggatcccaaaatttgagtgctctaggtctagggttccctccgagtggaagacccaagtacttcattgcccatctgcgcacatcacacccccatgattatgccggcttagcaattttctcacaacttgaagcatttaaacttttactggttatgaggtgagctttcctatgagaatgagtttctatacttgatttcctatgcagatatctatgcttgtctcttattgttagagcataaggtttaagagacttgaacaaatatgaggcatttgctatcttcgtcttagttttgctgggagtgagaaagggtggttagcggcttccaagggtcttttgtgttgtaaaatcttattcatttgtcttcagcatagtctttggtatgttttttggtagaactgcagattaaaatagtttagtccaggttcaaaaacgtcaaagttagtgtgataattgtaacagcttaattagaatgctgtacaaggttttggtggttcttagggaaacatagttccatactttgattacattggcggtgcgctgagaatccttgcgagggtaggtttcttcctatggttttaccaagtaagatcttgtcccaaagttggtataagctttagccatattttcttgtgagagatgttggtggtagtgccttttgttcaaattttagaagaggattaggtggtcttctgtataattagaaaaaaatagaaagaaaagaaaagttgatgagaacttgaactggacatattaccagactatttacccattcaatttgcctttgttggttctatactatgcgtagcttctgttaaggaggtcagcgagagagatgtaagcaattattttgttatacagcttaattgttttcacatgattatcactctcatattcttttctgtaagcaagaacctctttgaactttacataaggccatttatgtttttgtttagtcatttttcttcactgattatattcatcttagtgcctgcctgtgtgtttctttggctgcacaagagacaatatttcatttatgcacactttttcttgacctctgcagacattggttcgataccagttccctgttgttgtgat

SEQ ID NO: 8363 - DNA, 1305 bp, Prunus persica
  Intron number 1 from transcript ppb012714m (locus ppb01271 4m.g) derived from phytozome v7.0 (chr-ID scaffold_7; pos 16200423 to 16201727)
tcaaggctcttgtaggcaacttctctaaccagctggtaagtccacctcctattatgtactctgtctactctacacttccctctaaaaagaaaaatcctttcaattactggaaatgagaaacctaagcttgttatatcacagtgggttttgtagttttgatgatccaaaccaaagctttgaatccaacagttttttgtttttgtttttgtttttgggtcaattgaatcaacagtttagatagaatactaaagctgcatgctttactgggtgtcgaacaatagtacttttttgttgttggaaaaggtcgtacaacagtactttgtaaatcagtgatatcagttttggctgttctatgaagtatggaccaccaatatcttattgttgtaaatcaatgatatcttgcttgcttttttccctttttgatgtagttacttaccccattgagttctaaactgagttcatattttgtttgtttgttatctatattttgtgttcataatattttgtcttttggcgtcaaattaggttatgcaatgcaatggggtcttaatccttttaagtcccttaaacaccaatgaaaaaaatctgtagaatctgtaaaatggttaaggttttgaattgtttaacataagtgacaccctttcttatgaaaaaatcgttcctgtggtccttcaatttcactttcgttaggacaaatggtcctaccgtcaattttgttatcttttctgttaaatgcaggggcaaaatgatatttttgtattattcttaatttctactatctgaatattcatttcacccaaaaaaataaaaataaaaactaaaaaaccttcttcctatcctcgccattgcaagtagggtgggtatggtttgggtgggggtgggggttgtaggagctccatcagttgttgccgagatggtggattaattggcttggtgtcgggtggaggttgtccatggctttgttggaatatttatatggtggaaattaaaaataatacaaaaataccattttgcccaagcatttaacagaaaaagttaataaaactgatgacatgaccttttgtcctaacgaaactaaagttaaaggaccacaagaacgattttggaaattgagggccaaaatgcgaatctgtcaaagttcaaggaccacaaaaatttcagtctttgtgaataaacgttgttgttatgtttggtgattggctcaagattatatatttgggattttctcacaaagttcgtttctatctacatattcctactcacttttgtcgcagcaaatcccgccagcatttcttgtgcattttg

SEQ ID NO: 8364 - DNA, 835 bp, Prunus persica
  Intron number 3 from transcript ppa004463m (locus ppa00446 3m.g) derived from phytozome v7.0 (chr-ID scaffold_1; pos 28085458 to 28086292)
aaaaattctttcaaagtcagatttcccggcatcaggtatcttgctgttaactgaattaatctcaaattggggaataatcatatgaaccatcaattgaccaaaaaaaaatcatatgaaccacatcatctttatctatgttcattccaacttgaaagaaggttctgaataatagatctttcttaattagttgttgaatcgctatttgattgatcaaagtatgaaattgtgaaccctcattactgatggaatacaacttatctgtagaccaatcagatgactatttccattggctagagtccagtacttgattacttaggagtagtgtgagatgcaagtctcatgcccggttttgaatgagagaaagaagtaaggaatcctcttttcgactctgaatctaccactccagttgtactagatattttcaaatcatgtaatatctagctatacattccgtaccttgctaaagaagtaaagaaacaatccatgttagcaactacacattgcctaaccaattccctctcaatatgttcctaaaaaaatcctatttattcctgcatgtgtttccttccactaacaatcaaattgatctcagtatagctaccacatatgaaattgatcacatgttcaatttaattttttttagttgaactcagctacttctgaggcattaggctagttgtgcagagaactaatcttcttttttttctttttccccatcttccaatctgctgtacaacagataaaactattctcaattctttggaaataattcgtctgctgtcacttcttatgcataatctcattccatattgcagtaagatttttaaatccagtg

SEQ ID NO: 8365 - DNA, 3410 bp, Prunus persica
  Intron number 2 from transcript ppa013503m (locus ppa01350 3m.g) derived from phytozome v7.0 (chr-ID scaffold_2; pos 9207684 to 9211093 reverse strand)
atcagccagtgggcaacgatactgataatacggaggtttgattttttatttatttattttctcttccttaacttagataatatgtcatcttgctcgagatttttttttcttttttttccttttctaaaacataattttgcttctcttcttctttattatgtgtaatatatacgttcatatgtcgtaggtgtgtaaggtgaattccaaatgagaataagatacgcatcatgtgtattaattttttaggaatgtttttagtgatatttttggataatattgggaatatttcttcgttgaattgcaattatattgttttctgatttttttcgtacacagtaaaaaaccttcatggttattgtcaaactctctagggtttactgatgaaagagatgcaagaagaaatcacatagttcagtcctatctctgtggttgtattgagactttggatcagtttttttctattagtttcctgcttttgttcaaggattgaaatatcagctgatatatctgtcgacaccgatactggggaggtaaggacatatcttcccctgtattcacgatatatcccagataagtgcgatattcccgatattttgccgatatccccgatatttgccgatacccataacagaacccaaaaaaaattcagaagttttgaaagcaattgaagcaaattgaaacccaaagatagctaatctttgcccaaaaccctataatttattaatatgaagaatctatgcacagtccactgcccacatacctccaatccatctgaagcggacatggcgatcagttttagatctatgagcataggaactagacctagtactaactcaaatgaatcttatgatggctatggttctgtcatgtctgattatagtggaactagttatggagctcaagatgatgaaacagattatggacctactagttgggttaatcctaactatcccatatatgggaggacagtagggagctcaagagagacctatgtgcaccatgttcaaacatggcttacaaactgctcgggttacatgacttggtatgactattgtatgattctagatggttgttcctcattgtttgaacacgtaaaacccatacgaaaatcctgatctaatcacaaacaccaacaaaacacagttcacaaattcatcagttcatcaaacaacaaacaaaagaagaatttttcaaaagctttcgagacatgaacgtctaaaaagaattagagcaaaatcggagaaatagaatcacaacggagctggccatcgtgagctcggcggtgaagctggagctcggtgggttctgggttctgcgggttgggagatggggggtgggtttcaggttgggttgggatctgggttttgagggggtgggctaaggaggagggggaatggattgcaggagagagggagagactgaacaaacacaaacagttatccccaatcctgtgtagagagtccattcaggtatacctccacctttacattatcactaaaaaacaataatcaagctttctctttcaattcaatgacacagtggaagtggagtgaagtaagaactccagcgaacgttacaagaatccatttttacaaacagaaccaacaaaacaaaacaaaagagacagagacactgaaagagataaaccagttataatatctaaaaacaaaaccaagaaaactggcagtgaacacaaaaagggcaacataaattcaacaacccattattgcaaacttatccaaacacacaaaaagagtataaattcaaagacccgtttggtgcatgcagctgaatttattttttcagtttttcttttcaattttacaaactgtaaatagagccaagtaaatcctatgtggtttctaccaatcacaaattgtttgatatggatttgtattgtaaacttgtgaagatggaggtagggttgttagggttgatgatggatgaaggtggagttggggtcaatatggatgaaaaacccgaaaggacgcttttacccgctcactttgacagataaattgacagagttagacggtaggacccaattggaactatttatctagttaacggatgtaattttcttaaaaaaaaagttcacggacccaattgcaactgggggccaagtttagggacgtctatagtagataacccaaaactcaaagaaaactgtcaaagaggctttgttttatgctttgattttggttgtcctgggatagttcatgttttattggtaacggggctattccagtcaattttgagttgtgaacaaatggatatgtaccaagtatttctaaagcacttgggcgagcttgatttgagatgatggatccatggctaaaatgagctgagaaagactgagaagatgccacagaaaaatggaaaaaaaagaaaagataggagagagaatgaatattctagaaggctgtagcatttattaccgaaaaatatgctttaattgttattgaaagaattagtttgtttaatctcattgtagcctactctaatggttgaaaacgtgtgttgaaacttgtgtaaaatttatggtgccatgatatatacattgatgcactattagtggttgagatttgatctcaacagatttattattatcttttaataatacttgtacctgaatttattattatttacctgcatgtactacccaaaactctccatctctcttcctccatgcccaccatctggtacatctccatagcctcgatgtgcaaaagatatcttgctgaaacactctttttgtattgcatcacatattgagcttgacatatatgatagcaaatgtaaaggaggctgcttatatttgcatgatgcatgggtatgcatctaaagggctctccattgctctgcgcattgcctattgctaggttatatgtagttgataccatttatgttgacaccatttcatacgtggattggaacagggcaaggcatatggagtttgagaaaatagccagctgatagaaaaattaagagcataatttccactgaattgaaaaggtccatatacatgaggtgcaccaaattaaaaattagtctatgtttgtgtgaaataatgaaatagtgaaataaaacatctaagaaatttttctaagaaaaacatgtaaaaccttatcccattaactgtaataaaaactgcaagtcggaaaaagcatacagttgtctgtaacacaattgtttcttttgcttatttggcttggtttctttgttaaagtcttggtgttcaaaatcatcttccacaatgcaaatgatctcacagtttagtttattacataatggagctacccatttatatatttgtttaattagatgatattttacttattattattatttttttggtttttggtgttgggttagagatccaaagaagccttggtggagaatcaacagca

SEQ ID NO: 8366 - DNA, 2231 bp, Prunus persica
  Intron number 2 from transcript ppa007548m (locus ppa00754 8m.g) derived from phytozome v7.0 (chr-ID scaffold_3; pos 5692062 to 5694292)
gatcacaagtaattactaatattttcagttatatgtcaattttttatattgtgaattctgctggttactcagttaagtttagcatcatatacttaattgattatagttttgcttcttcttttttgggtgaaagaacaaacaagagttatcattcttgattctactatttttaaaatttaaaaaaaaaaaaaccataaatcaaaaggatactgttggttgatcgttggtttttgtttctaaacaataaaaaattttatttgtcttttaactttagatttctgatatctcattttgtttaaaattctcaattgaaatgattatgaggatggcataaagtgggctaatatggttataatttttccctgatgtttaagtgctagtgtagatcaaatgtctggatgaggcattaaaatggttatgactgaggaagagaccacttcagtgtttgagcttgtagttgtggattcaataatatttatggatctttgccataatcctaagggcatggttgtagtataaataattactacctattttcttcatagaatgaatatgtggtcagacacagcagtaggtatgcgatgatttagattcttcttcttgtaatgataaatacacttgtatgctctatcaatgaactacttgtgccattttgttaaggatacagttgtgaaacattttaggtacgtatttccttttgtaacatgtaatgactaatccgaaccaaataaattttcttttctttttccttcattttagagaagctataaaaacactaattcttttagtgcacaaaaggctgtgagaattgcattgaacattggaatatagtaagaatgttagatggtgaaagagactatgggagtcatagtgctggttggttctcaggggaagtgcttcttttaatgcacaaaaggctgtgagaattgcattcaacattgaaatatagtaagaagattagatggtgaaagagacatgggagtcgtagtgttggttgattgtcaaaggaagtgaaactaccaacagtgttatgttctggaattttttgaatgacacctgaagaacatggggaaaaattagttgcagctagattattgaaacttggaagggaaagataagaggacaggtgttatggctgattagggcaagacgtatgcagccaaatccttatttctagagaggccatttcttcaaatcaaaccttcgaacatcagatcacttggagcaagccatattgttgctccatggtgaaccctcatacgtactgctggttaaaattattatttcaatttgttgaattgcatcactgccatgaggatctagcaataagaaagagaaggacatgcttgtacaagttttatcatgtatattcagttgattggtggagtccattactttttcaaatagctaaggagtgtataccagtttaatttggcatagaatagttataagtcactccagtgttcgtcaggatgaattgtcttcagttttatttggtcactttctgtgctagacataaaatcataagtaggtgcagacaccctgcctggttgggagcttcctagagaagcccagttgagacaactgtgcttaaaagactgattccaatatctttatgtacttatattcttcaatctattaaacagggttggaagaatgtactttgtgttggtcaacattgtgcacttcaaaaacatttctacaaaaacaaacttttattgaggtccttaatatcattatgattagcatcaactataagtttgtcagagtatgtttcttcaccgtcttgagtgagccttatcaaggagttgatatttttgttcgagtaatctcttaaatagtgatcgcaaagtatgagtatagtttttctctaaattttaatcataactaaaagtagcttcttcaaaagggcacctgtaattacttcccagatactgagacttctgtaaattatcaaaattttctgaaatgcttgatcttgttgttgtgcattggtctttccttaaattttttcttcgcttgatagtaatcggtggaatttcctgtagtgctccatcttctgtagtggtagtgttaatctgtaggctgtttttttttttttggcctaaattaaacccaaaattgtctcttgtatggactatttataattctgaatgatatctcgattcaaattaattctcaatgaaatctatacagattgcagttaaaaggttaaaggtctggagtaacaa

SEQ ID NO: 8367 - DNA, 1917 bp, Prunus persica
  Intron number 1 from transcript ppa017363m (locus ppa01736 3m.g) derived from phytozome v7.0 (chr-ID scaffold_12; pos 128266 to 130182 reverse strand)
gtttaaggtcagaacatattctatataattcatagttattttttttcttctctcttatgaattagctttcatatatatgcccttttaaagacccttttttgtttgtaaattgtgggaatcggccgtgggcactctatagtaatttattaataggcatgatctgctttcaattacagttcaaaggtcattctgctacaaactagctaaaataataaatcacaaaggcatctaacattacatgtcatatgcttataaaagacaaaaataactgatttcaaatttttatatactattccccatgatctatgtttctggctccgccttggtgtgtaaaatataatattatgagatatttagtgatatacccatttctagcactaatattataaataaactctacacaattgaattcctataaacaaacccaaaaaaaacccaaaaaatgatagctggccttattgaatttaatattgattattaaattactttgatgccctattgagtgctttgggtatttttatgagattttggggttgggcttgttttaagaaattgatggcagttttgtaatttataagaagttaaaagcttttttgttatgttgtaaatgggctttgggtgtgtttctaaagtccattttatgtagggtatttttataatttgggcccccatattgggtataatagtgaatctccctaatattattcgaactttttctctttgtttttggtttgctattggtttgttcatgaaggtgtcaaacttgttttggtataaacgaagtgctctaagtctaaccaaaccaatttcaaactgccctcgagctttatgcgcatattcaaatgaaggcctgcacgcaatcaataaaagcattatccactaagcatatgggttcatctttgttctctacatcattcatcaatattcatttgtcaaattgtggcttttccaacgtttgcattacattgcatcagcagatagacggatgctgtcttaaaaaaattaaagaaaatcggagttactttatactttttcaacttatacaaattgtaacatagatgaaaataaattgtttgggctgaaatgagtcattaaacattattttagaatcatgctgtgtattgagagcatgttttcgttacaaaaagtgtaaaagaatcgacaatcatgctctctattttttagttaaaatttagctaaacacatataaacattattttagaagctctctataaaattttaactccaattatgctataactatcttttaattggtctatctctataaaaataataacatacaaaatagttatcattaattaaaggtttaaaatattcataaaataaagcatcattaaattataggatgccacaaggagtcctttctcttttctcaaatttaggagctcctagaagtctccctattttaggaggtggatagggagtatggttggagttgtatttttccaattcctccctaaaatttgtttaaggaggtcatttagggagcccgttgtagatgctctagaaaggtggtcagcacagttacgattagtagtttattcattccaatattgaaaactaatgcttcaaacgcattttctaatcgaaaactagagcaaaatagcacgagttaaactataacctttaatagaaacgtcaaatgcagaatgaaaagaaaaattggaataaaggtcggccctaagatgtcttattcaacttactttatggtcagcatgctagtcttcttgttacctctgctctccaatggtttgggtttgtatggcttctctcaaatttcaaagattcaagggggaattattggaaaaatagagtaataatcttttactcatatgaatatttgtgttcaacaaaaatgtaggaggtcgagactattgtattaccccggacgaaaga

SEQ ID NO: 8368 - DNA, 984 bp, Prunus persica
  Intron number 4 from transcript ppa000162m (locus ppa00016 2m.g) derived from phytozome v7.0 (chr-ID scaffold_3; pos 1245752 to 1246735 reverse strand)
cgcacattacaggtctcaggcagtgggttggccaggttagttaacggacgctcaccccttcccaccttaccccctattatgctccgaggtatttgaaagaaaaggatttagatttgacaacaaaactaaatttgctaaagaaaactagaaaacattagattgtatgaatttgaaatgactagatgtagcacatttagaatggatttgaaatgactacatgcaaggagtcatttgaaatccatttgttttccttcttattcaaatcttggcatgcatagattgtagtagtctaaacaaacaatttaaccttataatatcatctaaatccctaggatttgaaatcactttatccaaatggacccttagtttcacttttgtagataaatcaatacatgtaagttcatgatgcaattcaaacatgttaggacatgtttagtttggtggagaataattatcgtgtctgatttatagaaagaaaaaagtcatgtatagaagagcctgcaggggttgtacaggattctctgtatattgtagtactcactttgtctttctgtccttcaactttggcaagttttcatatgcaaggttttctacgtaattcttatttttgtcaaagattatccctgttctttccacaatggccttcctgtctctcttcaaatggttatatgtttagggaatctcctcattgcatggtctgtttctcagctctcttggtgtgccttgttgtggcattagcatcatggttttcacttttattttcgtaaccatgatgctacaaagagttttgattacttgctgataagtcataatatatacttctaacagttgtcatattgttggcctttaccattttttgcatgtacacttctttaggaaaattgctattctttgttttggatactccatcagatgttgattttagaatataattaatttcttttctactcacagagcaaagcgaaggcagagaaaaatcaagca

SEQ ID NO: 8369 - DNA, 2705 bp, Prunus persica
  Intron number 1 from transcript ppa009697m (locus ppa00969 7m.g) derived from phytozome v7.0 (chr-ID scaffold_6; pos 12222795 to 12225499)
aaggcaagtgttgcggtcaactctctctcatatacgtatatgctgagtctgggtttgttgtcatatgaattgctaaatctgaagttcttgtttaatttttaattttaattttagtttatggtataagtcaaataaaacttaaattctgaatcaataatcagatactttcttatttctagtctgttaaaggctaaaaaattcgggcaaagtgattattataataattagtcggtcattcaagtctctaaaccaatgtaattatcaagagcgttgagcactttcagaactctataaaagatgttggttgtacgcatttgattttatttcctagcacaaatcttaataactttagctactcctctcactcgtctcacgaaattgatggagtcgtacacctgtaaaagacactctggggctcaatctaggaaagtagaagcatcgtagcagggttttaataaaggaattcagtcattcctgttgtgaagaaatcatgtcgtatttgtacatttcttaccttctcctagcaggacgtggaagtataacttgtactgttgtaccctaattgtcatgaatcctgagtttgtaatgaagaaaagaaaggaatctcttatttttggtccttgtttccttgctggacttaattccagaactaattagagatagttattgactttcctttactggatagtcttgggtctcaaggctgttcacttggggctaaacaaactctgttggcctacccaacgtcctataccgttaggatcttattgatattgccacgtcaatttttctctttttgggtgttcgtgccagtagcactcgtcaactttagactggcctgcttttgcacccctatacttgttctactgttctctacttctgattgggggagagggaaaatttaattcaactcctttccgtatgctgacagttggcaccgatagccaaacaactcagagtctgacagtttatgccgtggactcttgtaacaacgaggcataagtcttaatttcttgaggaggactgttcattcaaggatctagatgagttcagaaattagtcagcatctctccgtttgccaccttcatggtgaatacggaagtatggtgcttcgttgccaagaattcccaatgtactaaggtatgaacaactcgcacggctttgtaagctagggataggtccggcggcatatgcttaaccttgaggagggctggtcctgacagagtggatatacatgacactggtgagtgttctcttctccttccaatgccattttattctgggaagtgataaatatgctccacaggatccactttcccactgattattgaacatcttgaagtttggggttgaaactctttggatttggatgtagttagtgagagatgattggttgatcctttaggcatcctgcatagacagctattctcgaatcgaaggggagacagagatggagatgccggagacgaatgtgaggactcaacaataagctaagtatacctttgtatcctctcaaatgttactccattctcttcttaggttttgctcttccctgtagctcgccacccattcaacgggctcctttggcttctccaatcttgcccagagcaatttgttctcacgtgatgctcctagggtagggtgattggttggggccaaataaactccttttccagttgggctccaatagctggtattgccacattactttgcctaatttttaatattcgtgccagctgaaattgtccacatgttagctttacccaggcttaattttatattccgacatgtacacccccatcctcggattcagcaagattgaaacatagctattttttgtttaattcctgggctgtatcatttgtcttttaagatctgctgtgctttctttagccaaatcttcaaccaagcatgatctggtattgactgttttgccaataaagtttatctgtaataatatacataagagctaaatgttgtcatgataggagcatagagtgcatgttatgttgatctcattttatttacattactatgtagatgtgaaattgtttgatgttatatttgggttagtggtgtacttgttatggtttacatttttatattattctacaagcttgagaggcatatgactatggaaaaattatttattcattgtcaatggtagttgaggtaaatccctaaatattaacagataccaggccctctatatgtactcatgagggtaacaagggagaaagtgatagagggtcccattagggtacctccatatgttcaacaaacaaaagaagttgagttttattagtgggacatagttgagttagaaacctttgtcatctttccaagacattttgtaatttttatgtggacaaaaccgtaattgctgctaacaaaacattttagcttgctgtagtccttccgtgtgatccccatcttttgttagtttttttttttggcactgtcatatttttgttataacattcctatgattttattgtcactagcaaaggttatgatatagaagtgctcacctgagcgggccattggaatccaacggctgtgttggattagtcgctcaggtgagggcctctatgttatgacacgccttaagttcttttcttgttgaaattttgaaatgtgtatgcttagggtcgcatgcttgttttgcaggtcaagggggtgatacatcaagatcctattaccag

SEQ ID NO: 8370 - DNA, 1972 bp, Prunus persica
  Intron number 7 from transcript ppa002681m (locus ppa00268 1m.g) derived from phytozome v7.0 (chr-ID scaffold_5; pos 2502709 to 2504680)
gaacacggtttgagtaggtgttttccttctacaatgtttatttttatttttatagagttgctctaatagcttgttttaaaaaaaaaaaaaaaaaaaaaaaacagaaacaataagaacagaagtatgaaacggctctgatgcagggcagcggctataagctgcagtccagtgacccaaacatacccaaaatacagataatagaagcataaagcaatagaattgaagttggaacgaagataattgagttctagggcaaaatcccaacagaaactctatagactaacgtctgaaattatattcatcaacaaaaactccataccaagagtctctaactagcctctttatactagaatacagaaaacctaattgacataggaaagtaaaaacctaaacaggaaattaaaccaaatcctagtaagaataggaaaacaaaagaagtaactaataatttaaagtaaatagaaccctagcccaattgactgacgggcctaagtaatcttagagagctttgtagatgcttctgcatcaggctctcgactttgtatgctaaccatgctttggtttggttatctaatttaaacttgattggcctgaactaatggtatcagattgaaagaaagagtaaatattggtgtattttttgaaagaggttaatcatacccaaaaaaaaaatggattttgctgtttccctattgtagcaaaattctacaatttgccatataataagcccccttttaaagttgtaatttgttttaagagtaccatttttattcattatggatcttcattggtccaaaaattcccaaatggtcttggttaaagttagacaattcaaccagaaacactttggcaatgaatggagaggcccgagccaaggcttataattcctgatgtgggagtttatattgtgaacacaccgcttcatgtgtgaaccgtattgagctaaatatgtgcatcaattatatagaaaatcaatacatcacttctaatagtattctccagaaatgaactttgaatcatggggacaagaattaaggaccaaaatcgaggtaaatcgtctatgttaccagcactgtgctcaagctggagagtagatattaactattcccagctttctccaaaatagtaatgatgttggctaagtgataggattggagccctttaattttgtattagtgaagaatgagttattcttgtccgtttatcgcccataggaaaagcaaactgagtgccaagatgagatttgaaacaacataagagacgagaactgagatttcagatgagaagattcaaggtgaacatatatcataaaatcctgatcagagctgctctctttgcttctttataaaaaaaaatagaactacaacacctgggcatctgaaagatccataaaggcaaaaaaatacctgagactgatagtgagtggcgggctggttgctgagagctgtgatgacgtcattgtttgtgctactgtgctgcactgggttgatgaatcagaaaaacagggaagtggcttcaagcagtaggttgatggtggttaaactcttgtttgcaacactatgtttaaagtcattgttttagagagagcatgacaagcaaatggcctgagtgagttgtgggtttagtggttttaaggttcaggttttttgttcttttttattttttggtggcaaaagagggctttgtggtggctgtttttgggtctcagaagtacgctgctctggtaccacactaaagttagagcatctaacctaaaaccaattggcaatgagtgaaaatgcgtataatattttatgtatgtaattatgtcacaagggtgcagaattcccaaagtgagattttatattctcaacagcctaaaatgcgttcgttgttcgctgttcatttttctttttcttttcttttgtgtttctagtttagaaagcatgagcagtcatatttttccattgcaggtgggattgcagtttccagt

SEQ ID NO: 8371 - DNA, 849 bp, Prunus persica
  Intron number 5 from transcript ppa003990m (locus ppa00399 0m.g) derived from phytozome v7.0 (chr-ID scaffold_2; pos 2167414 to 2168262)
gtggaacaattgtgagattcaccagtggaggtattatttaactgcgttcatatgtcatagatgctttcagtgggccatcctgaatcttttcaattctttggatataacaaccgacatggaagtgttgagggtgttggatatttgtggacatgacatttttgttacccacgtcccaataatttgcttgatttattcaagaagattgcaaaagttttaagtctttctgtaaaaatggtaaattacaacaagaatacataattatttactattagtggcccttaatgaaaaaacatgcatggctgtcccttacatgttttgggatttccatatttgacaacccatatcaagttataaaatgacatccgtattgtacctacaaatcatagtgattgacttgacactggagtcacaattaggacctatttatatggattctgacaaccttaacattaggaagaagccttggacaactgttggatagattttattttatttctttctaaaaagaaacccgaaatttattaacaactatggaagtaggatggataagaagttcatcatatccagatctacacctcaagcgagcatttattacatgcaattcaaaagtctcccgagagagattaattgcactacaagggattatcactctaaaatgatgacaaagacataggagaatcttttttttcttttttcttttttaaatctaaaagtagattgaatttgtccgccttttcatctgttttctggttgtttacatctttagataagtaacagctactgggagaaattacttatcatccaactcatcgttatgcagaacctactggattgctgattgattctgca

SEQ ID NO: 8372 - DNA, 941 bp, Prunus persica
  Intron number 4 from transcript ppa008904m (locus ppa00890 4m.g) derived from phytozome v7.0 (chr-ID scaffold_1; pos 31780324 to 31781264)
gacgcttgggtgcctttaattctactaatctgcaggttcgtccatggcctgctatgactaactttattgttttgtgagttattatcgcttaggaccttaagttcttacaactttactgaacatttgtaaaatggtatattggtaattctgaatagtttagccggattggtgatcttaaaatggtatattggtattcaacatatgaagatatgatgatcggagtggcgaggggtttcgactatggggtgatcaagggttttgtggcaatcatggcaatgctagtgacatatataacaacatcctgttatcagaaatgtatacgctcctagtaattacagccatccttttgataatgaaccatttacaactttcaaaaaggaacccgtttcttgtttgcctcactgggcttataacatctcattcttattcatcaatgcgtcatctggttgctgacaatttgggaggaaaaggatttgtagtataatacaactggaatttgggtgtagaccagtaaaaagtggaagagatttggtttctgaagtatttgtgttgtgttgcatattttttataccagagaatctaatacaactgaagtccctatcacatcagtttggcatattgttggcgttgtaggtattagattgtaacatagtatcaattatatgctatgcagagtgtttttgtagatggtacttggctatgcgaataacacgtgttgtaaattcatctaactgagttcattattcaactagcttacaactttttttcctaacgcaagaggcaattgtatcaggtccttttgctttataaaacatatgcagaaacttgctgaaagtgcttcatcttgtcagttgctttaaaattctagtaatagttgttgctctgtgtaaaacaattgaaacgtgctaatatagcattgatggcagcttgcaaattcttcc

SEQ ID NO: 8373 - DNA, 828 bp, Prunus persica
  Intron number 7 from transcript ppa000612m (locus ppa00061 2m.g) derived from phytozome v7.0 (chr-ID scaffold_6; pos 17757306 to 17758133)
gtgagagtaaaccaagggtccaacaaggttggcaggtaaggataagttacttacacatttaatgctggcaacaaattttttaattctagggctatggaattgcaaattcatgtgtatttaaggatggtagatacgtctgggaatctgatgtttcattcacaagtgaaatctggtgggacatggatagatatagatggtgatggaatttgttttatatggtttcaccataaaagatattttctcaacagttttgagtttttatatttttagaattaatttacagtgacaatattaaagatcatggaagcaagttatactgattctggttatgcataagaaagctatacacatggtcaaacctaattaggcagggggttctacaaatatttgatgtctcgttgtttcaaactgttactaacaaatttttgagatgtcagtttttaaattatttctgatattgccaagtttctagaacttattttgaatgaaattataaattgatgaaaattatcaatgtaattaggtatgggaagtgttgccaaagtcctcaaatcctacctaatgatttcaaaattgtgtagcttggtactggtaatttaaataattatattatatgcaatagttggttatataagcatactcagaatacacagtttatggaggggagcgctatttgggttccccttccaacacttagcacccctgcagcacgtttaatggggagcactagtagtgctctcctttatggattacttttgtctttccaaatttttctgtttgttcatactttagtttgactttccaacagactttggaagaaaactcatc

SEQ ID NO: 8374 - DNA, 1860 bp, Prunus persica
  Intron number 1 from transcript ppa000937m (locus ppa00093 7m.g) derived from phytozome v7.0 (chr-ID scaffold_1; pos 5621465 to 5623324 reverse strand)
gcctcgaggagatcaagaacgagactgttgatctggtatatatacatatatgtttcttcctcattttcctactcattttctcaggaaaatataggattcttggttttcttcatgtttttgttgttgttagtttttgcttttcttgagatgggttttttttgcttaatctttagaccaactgggttttaggccatacatggaattgtttcctttgcttaacaaattttgagttttgcttgtttcatatttggttgatgttcagatctgagtattgaatttcttcacatgtataataatatatacttctatttccaaattgattctttgcaagtatatactttctttctttttcgagctagctcgaaccaacaaagtggagaatgaatgtcacgaaactatgtttgtttcatgtttcttaatttcttagttgcatgcatacataacaagtcttttaagtcataaactttgcacctgggtttttcatcacaaacctttttcttacatgggtacatctcaaaattcaaagttttcaattttctcaccaaccaagcagaccatataaaatatatcttcaggtagtatccaaattgaatggatctacacatgggactgacagagaggggttgagtccactagggttaatacgtttgttttttaatttaatatatcaatataagttctctctctctctctttctctctctctctctctctctctctctctcctccctctatgtgccctgtttgtttgctttagaatttgggagtacctttccgtggtactttgggcttttccctgtttgagaaattctctttttgtttttcttaaaagaattgaaccgtttcctttgagctaactctcacactcagcatcctcaccagccctgacaccactcatctcttcctggattttaaattaattaaattaaaagttattttttttgtatttgtattcttctctcatacctctcttgcccttggactattttgttatttactctcgtatcccaacgaattttttcgggtactcaagcgcgtgttgaacacgcaccaacaggctccggcgttgaaaagttgagctgcccactgacacaaacagtttttattttaattattttaaataaaataaaatgcatatgttatgtatggcgtcggtcaacacttttgtgattgggtagcatcccaaggctagaatttagaataccataatctgtacacttcgtacattgagtgccgagttgactcgctcgattcgaccgtcggataaatattccacattaatccccaaaaataaaagaaaacaaaacttgatttgattttgattttgaggtttaaaatttgtaaacagatgatagagaagataatatctggaatatcttgaggggagatgggttgatttggtactttcatgcattaatttggggtgggatctaccaatctagaaaataaaattgtaatggatttgcgggtaatattaatgcatggaaatatcacatgtggacctcaaaagaatttcaaaccaatgaactggctatactcttatttgcatgttacattacatgttctcatagatgtgattctccgaccgctgtgattgtggccaacacttgcttgtctaacttgtaccaactatcattttttttctttggtatgtacctgtaacagctataatttggttggcttctttttagtatatttcttatgaacgttgttttacatgtatcgtatttactgattacgtcggtacaagtagtattaccgtatgaagattgtttctggattttccttacatatcccaattttcctaacaatgagttggtttacaggagcggattccaattgaggaagtctttgaacagtt

SEQ ID NO: 8375 - DNA, 369 bp, Prunus persica
  Intron number 2 from transcript ppa003170m (locus ppa00317 0m.g) derived from phytozome v7.0 (chr-ID scaffold_1; pos 8856946 to 8857314 reverse strand)
gtttcatatatgtgagtttttctaaaagattttgtcttttgattgtaatttttattaaaatttgtatctttttgtgagcatttctcttcaattcttgattgtagttaaattctttgcatttgtcgatgttacttactttcttatcagttaaaacttagctaattatagttgtggatgtacttaaatgcttataattagattcaaatttgcttttcactttgtactgtttcttgctagtttatgggtgcttaaggttattacattgtttgagttgtatgaatgtgatcatgtgaagcatccaattggctgcctctcattggtgtttaatgtgcaggtacctccgaggggaaggacgccgcaagctgagac

SEQ ID NO: 8376 - DNA, 1080 bp, Prunus persica
  Intron number 3 from transcript ppa001491m (locus ppa00149 1m.g) derived from phytozome v7.0 (chr-ID scaffold_6; pos 4940358 to 4941437)
agcagaaatcagagtccaaaggttaaatttccatcctttcagctggaacaacgcttattctctatgctattttccatcgaattacatatggttctatcaggaattgccattagtatttgttttaatcgaatgtttatcatacaagtggacaaaagtaggattttgttattaccaatttattttagattagtgtttttaagtcatcacaacttatgaatgctggaatgttggattagttcaagttgccactttatgcctacaaaactcaggttgtcaagaaaaaaagtgatgtggtttttaagagttgggagtttgcagtggcacctctgtgatattttagttgttgatttaaataagtattttcaagggacacatggctctagtggtagagcacatacctgacactcattgtcagagtttgacttgcttttccctctgccacggaagagacatgtttcgttgtaaagtggatgttttatgtaggggatgcgtacatttagataaatgactacagtcgtatatatcttgacttgatcatataagactcaagtaggtttgatagaaagtagtgtcaaattaagaatgctagtttctgtgttaatatttgataatgaaaacttttgtgatttaaggctgtccagtcttcagcagatggggtgaaggggaggaggtgttagagagtataaaatctctcgtgggggtttgtattaggtcagggctttgaaattttggattgagtatttacttacgatcgtttatatttatttatggctaattatattttggtttttgtattctgttaatttgtattattattatggattgcctgcatataggcctttttagtaggttttggagattttgtcatattgagtaagaatattggttcatcttattttctccttgttctatttcttctctttctctctctctctctctctctctctctcacccgtcctagatcatatgctccttcatcaccctgaatttcaggaatatgctttaaagtcaattccttgttgagttttgcatttaaaatctttaacatttatactaacttgaatgttcattcattttcag

SEQ ID NO: 8377 - DNA, 1732 bp, Prunus persica
  Intron number 3 from transcript ppa025999m (locus ppa02599 9m.g) derived from phytozome v7.0 (chr-ID scaffold_1; pos 142992 to 144723)
caggtagtcattagaaaacttctttactggcctttttaacaaaatttctggatacagagtcattattcattgtgaaattttgttgaactttacaaaacgaattctgataacacctctagaagatggttcattgtttattattattattattttatatttgtaagaaaactagttattatattagatgccaagggggcggaagtgggggaggtgtgagaaaaggaaaagtactgggcagcgctctgggcttctgtttctcctatttttaggaatacatccccttcaaccatttttcatgattggaaggctgcagtgtcttgattaggattggttattttttttcctcatagttgtagatctctgtactagtttcttgtttctttctgttattggtggataacttgtccacttttctgtatggtttttttatgagtaaaatttctacttttcaaaaaagagaaaaagaaagaaagaaaaggtatcgtgattggaatcatggagaacagccagcaccttagcattctggtgaaattaacatcgaatgagattttcgttggatttggttttaaagtccagattctctttatgtcccaagtttgcagatttttcatttgtatactggttctacagttgtttaatagtagctctgaaggtagaggatgcagaaaacattgatcactcgttctttcattgttcgcattccctaaaattatggtggaggatgttgggtgctctcggagcggagtgggtgattcctaaagggtgttttgagctccttagtatcaatatgagggtttcagggaaggggaatagagctggaatccttcgcgattgtctagttcatgctattttctggaatatctggatggagcgaaatcgaagaatttttcagggtcatataggagtaagggttgaggaattatgggacagaattaaattttgggcatccttttgggcttcggtttcgaggcagttcaaggactatcactactctaccatcatgagagacatgatggcagtcttaagatgattttactgaagttttgtgttttttgtgttttttaattacagaatgttttcaatcttagtaggtcagacaatctttatttttggtcttcttgtttgatcgaggatttttcctcttgattatcaatacaatgtttctattcaaaaaaataataataataatgaaacttatctgtcagtggcagattcagtgctttgtattggttaataaagagtttagtttcatttactcttgtttatagttaggtgccaagtgatgcaataattgattggtgttgcttttagagtacacaattctatgcttgagcaattggattcagatgtctctaaggggaatgacatttgatgatgggcagttgggtttatggttttataaaaccagctgtttaatgtgggagtgatgattatgctgaccttttttcctgaaaggtgactatattgctgaattaagcaccattacatccagtaaaagttgtcattaatttgggggtaacatccccattgctgtttgttgcatgtgtcctcaagtcatcgggttcttcataaagttattgtttccttactttttcaatcctggtttggtcaatgactcaacaacaaagaaaatatattttcatccatttgttatacatgagcagtactgattccaatttctttttatcttattccaggcaatattgcaaattatctcaagtttctggaagtt

SEQ ID NO: 8378 - DNA, 901 bp, Carica papaya
  Intron number 2 from transcript evm.model.supercontig_55.1 4 (locus evm.TU.supercontig_55.14) derived from phytozome v7.0 (chr-ID supercontig_55; pos 84545 to 85445)
agaacttgctgccgctactgataatttctctcccggtaccattccaaattttggctatcgccttctgcaacttctttttctctctgtttttctcggttaccaatcattttttttttcgcttgagcatgctataaaatctaaagtcttaacatttcagccccatcaagagaatttttcgtcttccaaacctacgaaagtgcgacttagttcatgaaatccatttttattctataaatttatctctatttttacaaaatcaagtttagattacacatgttttatatatatataaatttccagttttcagctccatccgtttaactttacatctttgaaacatatgcattccaattgcaactggtacaagagcagtcaaagtaaaccacttaagagaatctgcatggaagactgctttttgctttttcaatttcctctgcgcatgtatacataaagatacatatatgtattatatgtgcgcatgtaaagagagaaaaggaagcaagtagtgaaggtaggaccaactgggttgacccatggaatgtgaaaatcttaaaggaggttggcaatctgggatttggtcattggtgacttaaagatacgtgtaactacccattgcccattcaagtatggaagaaactcaaatttggtattctttgacttttatatatgcaggacatatactaataaataaacaaacaacttcaaaaagatttaacaattttatgtgaaataatagaaaaagttaaactacagatactaaattgaggtaaaagaaattataaatactgaaagtaaaaggaggcaattttatgtgaaaatcttctggtttatttttcttctcttttttttttttttttttttgacttgttcctttaactctgggcattatttggtagagaac

SEQ ID NO: 8379 - DNA, 1271 bp, Carica papaya
  Intron number 6 from transcript evm.model.supercontig_103. 95 (locus evm.TU.supercontig_103.95) derived from phytozom e v7.0 (chr-ID supercontig_103; pos 711797 to 713067 rever se strand)
tcggtgctgtaaattgggacaccttgatcagacaggtatttcatttaaacttctgaactctctagcatacttcattaatttcttaactgagggactggaagcccttaagttcccatcgtctgatgcattacccttacttcatacttagtagatgtaccaatgaacttgtattagtttggtcacaaatcttgctattgtctgtttaattatggattattgttacaatataattagcaggctattgtaataaagcttccatattatgtttttgccactttgttagttttctttttgggttagcatattctatttttaggctctgtcccattaccttataaatactgcacaagttcttcatgggacattaatacaatacaaaacacctgtgttatttgcttagggttcatctttttgtttgccataggaggactcactggaatagtcccagcaaattctgggctagacattgctctccatgatacttattatgtggttgcacatttccatgatgtactttctatggagccatttttgctttatttgcaggatttcactattatgtgggtaaaatctttggtcggacataccctgaaactttaggtcaaatccatttttggatcacttttttcggggttaatccaaccctctttccttatttatgattcaataagttataaaccttacaatactttattctatttcaattataattcaataagattgcatatctagaaaactcagacttagtttactggatctggtagataatttaaaatcttgaggatgagcagatgttataaaactgttggcctatgaacttgaagcagatgtataattctcacattattgagaaattgagatgatttgaaatttgatgcctctcaattttttgttgatttttctttttaattttgtgttaaaactttctgtcctacatgaatgagattcagacagtttgagctcaataccttaacctttgaaacaatattaaataataaagtgagatgactaatagtactcacaaggtcaagcaaacaagaaaaccccacttattttattctgagtttttaatgttttccctcatatgcaagtggattgcccatgggtgtggagaagcaggcccaatcatgggttacagggatatatatattgtattctaacaatatcaatgtctacaggttctaacgtccatcattttggtatatgtattcttgacgaggctaaggtgaactttgtgattttactcgtattatctatcattatgcaggcat

SEQ ID NO: 8380 - DNA, 1401 bp, Carica papaya
  Intron number 1 from transcript evm.TU.contig_35010.1 (loc us evm.TU.contig_35010) derived from phytozome v7.0 (chr-I D contig_35010; pos 810 to 2210)
ctctcccccttacgaccacgaagtttcatattcaggtaccttcaagtgacgtacatgtatctgtattggatttcttcaattttctgtggattgggcagcctttcacttgtctatattttgtattttagatattggtttgttgaaacatctggttgagccagtagttgggagctttttggatattgtgtctttctttcatatttggttgatatttctgtttggtttctgggaaagttttgggagaaagcggaactggattcctccattttatgctctttcttaattgctacctggaatgacaatgagataaatttgtaaggaattgttatgacaaatgcaatgaagaattggaggaagagaagtctgatgactttggtggttaatgtagcattggctagggtcattcaccaagaggacaaataaatgagattgcagatgtaatatattagaatgaaaagaattagaaatgaatttaattctcttcaatgtatcgattagtttcgacttcatagattgagcttgtaccccaagtaatttggtttggtggagtaggacttctttgctttttgtacactgaatctgcctgacatcttggctgttgctgatttctgtattactgtttgtaggggtggtttttggaaatggaaatggtctgtaaaaaaagtttacccgaagatgcaattcttggatttattttgagttgcaataatttgttttagacttgaatttgtgaaatttatattgatacatgttgcacatgtatagatatatgtatgttgttctttaaatattctttctggaagtccttatacaactctgtacttcttgaatctattatgttaagttccatacttgatgcactgttttgaagttcatgtttggacaaaatggattcaacaagaaagtgtataagtcattggcaaattcacaatgtagaattcattagcaaattcacacttatatttaaatcaaaacatacttgtaaatagattccacgtatttgtgaaaattatttgtcccgaacctagtgcgagtgatgttcctttccagaaactccatagggtatacaaatgatatgggtcatgaggatgctgaccattctaagttctgccatcagaataaaggtttaaccttttaactttagtagaagcctctaagcatatctaccttgtttcaatataacagcagacttttgttggctaaggatcctatatagatgggagctttttctaattttctctttctatactttgggtgtcgaggttataggtttacttctaaaatatctgcatctgttaatatggagatagcctttttgtctatatgttgttctgttctttttttggagaatgatgcttctggtggttcatacattcttttcttcttatataggttactgtg

SEQ ID NO: 8381 - DNA, 5087 bp, Carica papaya
  Intron number 4 from transcript evm.model.supercontig_36.1 10 (locus evm.TU.supercontig_36.110) derived from phytozom e v7.0 (chr-ID supercontig_36; pos 854863 to 859949)
acatattcaacctagggatacgtaggtaagctatttcttggtattcgatttaatgaaagagctagggaggattcttttgatattgtaccttccttatgatatacaacatgtaggagagaaataaagagtttactggcttggtttagataaggatcattgcatacaataaaatgtagctaaacttgacaaagttgagaatgattgatcagtttccttcaatgaggactttctctcaggagttaatatgctgatacaatatttgacagggatttatagtaagttaagcaaatgttttctactttattaattatccaacttcatgttgtggggcaatggttgttggtcttgacatcaaggggtccaaatttgagttttcctaatggtaatttgacatggaaaatagggatctctttttcctaatttattttttacttcggtttagcaatttcgtttaatagcctgtgaagacttgaaatttctagataaatatctaaactctttggctatatagggcgagtaatgtagggaatgtaaaaggctaatttgtctatttaaaaacttatgagaaacattcacatctagagtttattagatatcacacctaaaatatggttcttaagcattgcatttcagatatgattgcatcacaaactcttagaataacacaattggtgtcaaaggtatgactagaaaagtaaatatttgtagtgatatcgtatcaagagcctttctttgagtggatatctagagtttattagtatcacaagtaaggtaggattcttaagaatcacacttgtaaggcatttgtagtggttaaatataaaatattaatttaactaatactaaaaattctaatagaaaactaaaactaaaaaaattaaattataaataacattctaaaactagtaggaacctaattttatcaatcatattacgagaaattatagatataaataaaatcctaaaacaactaaagacctaattttatccgtgttattgcaatcaattgtagattgatcatttatattattggaaaaaattttaagaaataaattagttttaaataatatttttttttaaaatggaagaaaaaatgaggagagactaatagaaagacttaatttttcatttgtgattattgcaaaaaatgttgaaatatatgggtatatatatgcactaatacaactcttaaaattccaaaaaacacatattataatcttaacttcataatcataattaagttaggatttgaaccatttaaaaaaaatcaaaagacacatatttatatcttaacttcttgtaagataaaaagtatcttcttaatttacaaattattatttttaactttttagtaatacaaaaaagttatcttaatttgtaaattattatttttaactttttagtaaaataaagaattttcttaatttgcaaattatgattttcaatacatacaatttctattttattgagaaaatttaatttaattcgagagcacgagtttaaaatatagaatttccgaaaaatcttagcaaattctaattgatcattctgtttagaagtaaaaataatggaaagacacatgtgatgcctacatgcccaatcacttccatttggtcgttgcatgctaactattgaagattaagatagttcaactgatgtaagagttaaaatcgcatggctcatagacaaatattgtgcaattccttcaatccaaatatagttcaagtaaattatagatatatagcatatgtgatggctgtagcactagtgaatccacccttatcacaagaggataaaatagaaattttcctttaaaatttttaattcctttaaattcccttcatttttcttccaatttggaggaatagataatttggagttttaaggtctatactaattattattttttatctgaacaagggaaatgagattgaacatcctttccttttctttttcccccaaattccttcaatccaaacgtagtataagtaaactatagatatatagcatatgtgatggctgtagcactagggaatccacccttctcacaagaagaaatgatccaaccacctgactttaggtttttgaaattgtggtggttcaactaatctaaaagatcatgtggaatagtttcaaatctttgatgttcataaagaggatccttatacaataaatgtgcaggacttctcgggtagcttgacagtggtgttcgattctgcaggtgcattctttaatacaacaatcattgttaacccatttggtcaatagtatagattgaaaactctacctgttctgcttaatccaaaacaaggaaatgcaatagatttggcactgaaagccctatgtttaccagaaaaagaaaaggtaatgaatgaccttagttaatagattgaagcctcctccttcacaaatctcttcagaaaaagagcctatgatttcaattgtctctccagaaggcagagacgttcatcaatgtagaagaattatttaacactcagtttgaagttgagatcctagccaaaaaaaaaaaatattctaccgaatcctctaacttagacaaaagaatccctgggccagtgcaaaatcttctttctactcattaggcatcttgagtacgtgaagtgagtattctaatggtagcttgagataggcaatacataatgacaccaaaaagatggaaggagaccataaataagaaatcaaaataattttgttgatttcatacaaaattggagactagtggttttctaccctgtaggtgcattctttaatacaaaaatcattatgaacccattttgtaatggtaatagattgaaagtctagctgttctgcttaatacaaaacaagaaaatgtaggagatttagcactgggagccctatgtttaccaagaaggaaaagtaatgaatgacattagttaatggatagaagccttctcctaaacaaatctcttcaacaaaagagtctataattccaaaggtctacgtcctcgcagaggcagagacattcatcaatgtagaagaactatttgccactcagtttaaagttgagagcctaacaaaaaagaaatatcctataaatcctccaacttagacaaaataatctgccgggggcggcaaaaccttcattttactcatttggcatttgagacttgtatattcctttgagtacgtagattgagtattctaatggtaggctgagataggcaatacattcagtgacaccaaaagatggaaggagaccataaataagaaatcaaaataatttttttgatttcatacaatattggagacttttggttgtccttcttgaattgcttttcttcaaagcccagtattgcttttagaaaattagtatctgataattcatgtcctaattggtttttccaaacattttcaattgcaaaaagcgaattcagttgctatgggaaagtgactgcattattgctttctaaaaaaacaataaaatttgcttccgagagaaacaaatgtacacataatccgtcaaaattaatatggaattgattgagatattttaattttttttaaaaatataagttttccttaaatacaatacaattgttataattttatctcttatgatctgcaagcaattaatatgattgtattctcatagtatcttgtgcattattatcaaacacaaataagttgtagactgtctcgataatattctacgaaaaatatttgccaaatattacaattacttttgatgacaaagaagcttttaattgcaggaactaaaataagcttttctgaaaataagttttttccccaaaacacaattaatatgaagcctaaagtttgttatcagcttgaataagatagaaggccatgttagaggagactatttggatttatttgttgattgtccagaacctggaactgctaggacaagaagacttgaactgagtgtgaaggttagtggtgttaaaattagttagcaactgaataacagatataatatccggacccaagtgctactaacctaacaactttttgaactcaaatcaccaaccttcaaaagtttaaactcaagttattggcagtatgtggtttgagcttttatatgaaacttattaatcatatatcttttcaatgtggaactgatgtattacaataaaactacacaaagaactcaccagaaacgaacataaataatggcgggattcgaatcgggtccattcatgaataagaaagattatctctctctcttctgatttttttctctctctcgctgcatttgttagcattgatgagcaagttgaagatgtacactgcagaaacaagcaatttgctgaaggcgatatggtaatgattttcctacctaaaaagaaggttccagttggttgagtatgaaggattacaaccattgacatatgatcctaagaagctattggaggaaacaaacaataatgcgtatttggtggggatacttaaaaactaggggatttcttgctcttttactgcagatctcatcttttattaccactgtcctagatcattttgttagcaactagaggactagttttcaaaagagaggaaagtgatgtggagaaagaggatttgatatcacctaatattgttgtcacttcaatttttattgctattattttcttagataagatttttgtcaagttgtccatcatggactagaacctacatcttaagggtttagcagttctttttcttttatgaagtctttaaacctttacaaatataaagctctatggactgaagaagacaaatcataaatattgttaggcttcttaaataaaattttggtattccttcaattttttatagttggtaaaagctaagtgtgtttggttgtttgtctctaagtgtgtttggttgtttgtctttcttgtaatataaagatatattcactattccacgatgtcagaatctcaaccacaaaaatgtaattcctcctgcctttataagtcattcaaatttgttccaactgaaggcaactgaatacttaacctataatttgattgttaagtgctcattaagcaagcagaccttttgaacccagtactgattattgctttgtccattctacagga

SEQ ID NO: 8382 - DNA, 1523 bp, Carica papaya
  Intron number 3 from transcript evm.model.supercontig_119. 2 (locus evm.TU.supercontig_119.2) derived from phytozome v7.0 (chr-ID supercontig_119; pos 11212 to 12734)
ccatatagaattgataatttctcaaacgaggttggtggttgtgtgtgtgggtgtgtttttcttttctttttttgccaacaaagaaagaagattcgttagatgagaacaattacaatgacagagaatatggcatcctcctgggaaaacatggacagatcctttgtgttcttcctattattcctttcggcattctagtgtttgaccgcccgggctccttcaacaatacgatcttgtctcaataaggcccctattgtttttgagcttggaaagcatttaacaactctgcaatggacagatcctttgtgttcttcaaattggttattgaactttcatatcttttaagtatagtaacaagaatttttttctataattcttgaatcagtaaaatcagtgccaagtaacctgactttgttgacgatgtcaaataatctgtctaagtattctttgattgtctcagattctttcatcttttgcaactcaaatttccttattagatttagtgcttgcattcctcgtatcctctcacctcctgcatattcttcattcagataatctcaaacctcctttgttgtttcaagagtcataattcttgtgaatatggttgtttaaacagcagcgaacaaagttgctttacgcctttgacattttggtctttttttctttgtgacttttgatatgagctacagtgggattgttcgggagcagaggaacttcgtaatcctctttcacagcttcccatagatttaaagcttccaagtacatctccatacaaaacccataagtgagcaaaaacagcacctttgtaaaaacttatgcctctaggttagagacgcaaaaatatgactcccaaataaataaaagaacttattcaaaaccctccaagccacatcaaaggttagagtaatgtaactgttttgactacactggcggctatatccaaatatcttccaagaatcaagagttacttaatgatttgatgttttagtttctttcttttttgtttctttttctctttttttttctttagggggtggggggtggggagaaggaggtggtgggtaatagtaattggttattacactgatatctataaccagatatcttcaagaattatagttacttaatgatttggtgtttttattaataattttttttgttttggggggagggggacaggtggtaactgttttcactatactggtggctatatccatctatcttcaaaaattagagctatttgaatgatttgatgtttttttcttgttttctctcgtgggcaagaaggaggtggatgggtgctttcctttattgtcatgctttcttcatggattgacattatttctgagtcttgattgctacttttgaagatttctaccctgttgagctaacatacacttcagccctttcggcacatatgagattgacactgtgtctagccttgttttacaattaactacaagttcttatcttatatttattgctttgtagaggctaaggatttatcaacagaagtgtgaaacttt

SEQ ID NO: 8383 - DNA, 1004 bp, Carica papaya
  Intron number 10 from transcript evm.model.supercontig_27. 89 (locus evm.TU.supercontig_27.89) derived from phytozome v7.0 (chr-ID supercontig_27; pos 1053460 to 1054463 rever se strand)
tggaagcttctttggcaatttgtggcatctgtaatgtatgtagctatttttgttattcttttactttaatgatctcattgatggtctagtgttatttctatctcatacatattgtatgttaatttgtgatataagctttctggttagagaagatcacccatcaatcaagattgcaagaatggggactctaggatattgtttctcagttttttgattaaaagttcatttgattaaaaagagtttgtagtcttggcatgcttgacagttattatttatataaacttcagatgttagggtctcatagcattgttgatacttcttagttctgctcctggtgattaaaaatccaattatttttcagctttgaattttagacttgatttatgctttgtgttcccagtgaaaatgatttggagatgcaggttttggcctgtgctataggttgtattctgtgagttaaattgtagtgatggtagttatggtgatagtgatgatatcttgctaacctcaaattgaatttttggctgataatggcttggctggcatataaactagactatttgcagaggaaaataaataaaaatttttagtaacttgactttaaatccaagaaatctctaatatatctagtcataagaaattctgaaatttccttgcaataatatttacaaaatctttcctgatctcagaataatgcagaggcctaaattgaaaaagttactattcctgaacgttggtataaaattaaggcaatcaattatttgagatgtgattatacacttgattaggttgcataatcggttcaactgatttcctttatagaaggcaagaactgagtcttattgtgcaaaattagtgttctgaattcttgcatgagttcctttattttttttccctcccccctgtcatcagctttctggtaatagttgggtgagcaagtatctttagcaactctgacaatatatattttttttctgctctcccccaaaaggatccacctgaag

SEQ ID NO: 8384 - DNA, 1317 bp, Carica papaya
  Intron number 3 from transcript evm.model.supercontig_123. 54 (locus evm.TU.supercontig_123.54) derived from phytozom e v7.0 (chr-ID supercontig_123; pos 710846 to 712162)
cccgagttggggaagcttgagcgtcttcagtatatgtaagttttgatttatttaaattaatttattgccattttccttcttctaatacttaagataagggtagagactccttggaacatgtatatttgaaaaacaaaatttccacttttcaaaaattaaaaaaaaaaaaaaatcaatcatttttgaattacttatggtactattaaaaataatatgaacataaatgtatgcatatgtatatctgtatctactattgacatgaagtaactcatatggtatattttttatgctataatagcaagcaaaaacaaatttagaccgtttatgaacataagaacgttaattttttttaattaaatttattgtttgacattaatttttataaattataaagatctaaatagaacttaataaataaaattaaattttatgtttctttactaagttttatcaattagctcaataacattaagttaaaaaaataaacagcatatctggattataaaagtagtaataatacaagtataaataaggagaataaatgagattttttaaaatagcattgaagatattttttattttttaataaatttttacatttgatattatatatacatcaatagtaacataaggaaagtacatcaaaacaagaatatagtccaatatgaattcccaagttcttgtaaaagaaagtacctaccaatcattgaactaagcagtgattatatataatagatgggcagggaaaaagtcaagtattagtcaatggttcaattggcacggtcaagaacagtttgtttataaaattgactttcatatatgttagactttaactcaagatatataatgtttggagaaattgtttaataagtatataaactactatagatatttcactatttgttcactgtaaaatttcattctttgatatttcattccttaatataagcattgactaacaaagggaataactacaaggttttttataatttgaaggagatagatgattgaggaaataatctttcttgtcctaaaataagtagtacaaagaaaaaggtagcagcactgtaaattgcatagggaataccagcatcgctcgtcaacaaaatttgaaattaccatatactacatgcagtcattaaaattcagtgggcatctaccttaccagtcaagccatgacattgtggagtacgttggtcttggtgtaaaagatgtgtatgatttgatgagacataagcatttgtttttatctttttcgtgggataagacataaacatttaactagtcagtgtttactgtgattgcagggaactctac

SEQ ID NO: 8385 - DNA, 1974 bp, Carica papaya
  Intron number 8 from transcript evm.model.supercontig_69.6 3 (locus evm.TU.supercontig_69.63) derived from phytozome v7.0 (chr-ID supercontig_69; pos 744431 to 746404 reverse strand)
tggagctactctccccagtttttgaaagtgaagaggtatgtgtgtgtaagagttgggttttatttgcagcaattttttctatatataaataaaagtattgttaatagagctgggagaaacaaaattacaagattagaggataaaacatctctgaaaatcctccttactagaatggaggcgaaactaaccgaggaaaaggtcagtacaaaatgcatcctaattcctctgtaacaaaggcaaagaaatttctcagacaaccatgagccttatttttatctaccctctttgtggcatgattctgagtaggtaactttgttattccaagagttgctttctaccttgcatattcaaatgactaatatgtcaaggagaataaagatctcctaatgttttagctggacattcttgccaaatttagtctgttccttcctcaggttagtaggccattggcattagtgagggctgagttggggttagtttagacatgtagaccaagatttatgggagattagggaaacggcaaagctagacattgagaaaaattttccatttgaagaatggttgactatgtattttactgaatatcacggtataaaggttttctaaaatagaaaaggaaaagacaattatataaagtatattttgcccagataccctttaacttaattaacaagaatacaattttttagctctccccttcaagttaggaaataaatattgtccatctctaacttgccaatgatagtctgaaatgttggatgttcaaatatttaaccaacacatctactaattgtgacctgatagacgtgttgagtacatattaggttactgtcaagttctctttgataaaatgtctctcgatattttttatccagtcatgttgtactagattatatgtaatatttatgaataattttttatcatagcatagatgcatagggtctcccacttgattcttagattttttaaaattatttttatctataatagtttacgtaccccttggttattacttgaaattctgattctgcacttaatctaatctaacaattacattttgctttttactccacaagtaattaggctacccctaaataaggtacaataacctatgattaatctctatctaccagttacttagcagaatttgcatctgtataagcttataaaagtaatctatcactcttcctgaataagattccttatgaaaaatagtcgaatgtgtattttattaaatatcacaactttatatatacagattttctctaatagaaaatgaaatagataattaattaaatagggtgtattttgtccttgtatccattaacttcatttatataaagtacactttctttaatacacctttccaggacatttcacacacctgctttaattgcaaacaatatattgcaaaagtcagaacaccaaaatgaggcatgttgcgcagtatatgggcatggtgaaaaaagacaagggcgaagaatggtggtgatatatatatatatatatttatttatatataaatatatattgagagcatgaatgctggtgattttaagtggaatatcttttttgtgataatgtgaaccctatggttggaaaggaacaacaggattttggagatcgtatcttacgagtccatgttctcttggaccagatgatgtttctggcttccttatgagctaaggccaaatggcaatttactgatttatccatttcagtgtgataatattgttggtttctgctctaattacgttctggagtttatgtataaaggctataggggatagtttatccttcgacattgtactttatcttttgtttctcttaacgatatttctttttttatcaaaaaagaattaacttggatatagtccaatgatcctaatatatcacaaatactcaagaacattttacaatctggtttaggctgaatagttccttactgcattctctgttcacaggtccgtgcat

SEQ ID NO: 8386 - DNA, 781 bp, Carica papaya
  Intron number 8 from transcript evm.model.supercontig_441. 1 (locus evm.TU.supercontig_441.1) derived from phytozome v7.0 (chr-ID supercontig_441; pos 3026 to 3806)
gttggaaatatacatcaatttcgagttctgaggtatatatatcatgctgccgtttcaataaactcaaatataacttaaaacttttatattgacatgcagctcatagccaaatgccacatcatcttcttaggagaagaaagcttgaatgggaaggatttgctgcatcatgtgttatagtgggagcacccatgcacttggtggtgtgccatgcacagtgcatgtgggatctgtttgccatgatttaaagaaatgattgatgcaagacgtttagtggttaaactaatttctctagaataatttagaatggacaggagatatgttggacagagtaataacaggaagaatgaagaaagaaagagataatagggagtaaaaccttaacaaataattttttaatgcatcattcgtctatgttccattgtttgtatctactagcttttaagagtggatttgttacaactagtgaggaaaattctaaaaaagaaaatctagcagattctaattcttgtaatattcaaatctacctaaattagaatttaaaatattataatgccaacataagctaaataaaaaaataaaaactaataattattacaaaaacttaattaaaatgtactccaaaataatatcttttattctgcatcaatgaagctgcattaccagtgagggtgcttgatttagttacaaactgaattctacaaatgttcccataacgacatgcatcaaagcagcatatttttgttttttattttaaaggctgagaaaggaggattcaaaacat

SEQ ID NO: 8387 - DNA, 2959 bp, Carica papaya
  Intron number 7 from transcript evm.model.supercontig_88.4 (locus evm.TU.supercontig_88.4) derived from phytozome v7 .0 (chr-ID supercontig_88; pos 74924 to 77882)
tggcataataaaagaggtatagtttctcttttgcatattctatcatacatcacattttcttgtagctgacatgcttgaattccactttgatgtttgaatggaacttgaacttgcgcatactttctaacgaaaggaatgatgtacttaggctatcatcaatatttttttttgttgaatattgaatattttctaccttttcaacttaagtttcattgtagattattcagaaatttggcttcaagtaggttggtaagtgtttgcagtacaatctctacacattaatttcaagattcaataaatgtcgggtacattaaaataatttggcaggcatacatgctcaataactaaaattatatttgtgataatgcattctttctttcatactacttagccaaacaaaggattgcaagtagtttcttttctgttctttgtcaattcttcatcatccaaagaagaagacatgttttctcttcttttcttcaaaatgccctagtactaatttttaaattaatctctttgtccccttagctgctttgtggataagcgatgttcattaggatgagttattcactaatctgccctatacaccctttttgagaccaaaaaactggtgaaaataataagttgtaaggtggatatggattgtatgtagttgtacctgcagtggctgtaggcaggtattggatattgttattactcgtcctgtaccttttctgtcctgtttattttccttgctctaaaattagtctgatgcctttatgtttttacatatgtgccgttacatatctgtgttatttcataaaaaaaaaattaaatatgtgtgttaagttagggtttttcattcagtctcccttctcacattccacgtctcaccaccgccaagccttcacctcaccatctatcctcctctcttctttcattctcacagggctatcgcactcttgtcagccaagcaaaccgtctctttgcggttctctaccattctctcttcacacttcacagccttcttgtgaagtcacaatccctctgtcctcatctgtttattgcatcgtgactagtaaccaatagacaccaggcaaattttccacatatggtggtctcagccatctcctagaccatcattattcctttgcagcttgcctcagatctaggatctaaatgtgttagtcatgaaaggtgacttctatcttgattttcttgagttaataaggttgttggtcagaggtggtatgctctagattgcctttttctactgcaccagtgaacatacctctgcaatttttggtttcctctgtttcgtgttgctttaatttctgttttgttgagttttctttttgtattttcttaggcaaatctcggtaggttttgtctcctttgtaattttgtactctgttattagtgtaattctgtttccatttagcttgtgaaagtacataacttataatgattgtacgttataatgattgaattttgtttaattgcttttggttttggatttgatttgtaagttacatttactaatatttacgcatttatcttaatcttggtgcattaatattctgagaagtttcttttcccttaggaaagactcttaaggtatactagggctactgagatttctaggatttgtctacaacccgggcagtaaagagggtaaagcatatggcagaggcatgggtaaatggttggttacttatgggacaggtgatagttggcgggcattaaccgtcggacaggggcaattatataaatctatacctgcccaaggcatgggacaagtacatgtgaaggatgtatctaacagggtgggtatggtaaggcgcatctgacccatgattatctcaattttgggttatttgcaaatctggggttttgagttttttttttgttttcttttgggagagtgtgggacttttggtttgacaaccttttttttgtatttgagggtcattccttttgttttctatttaatgtgggactttttgttttacaacctttgtttcctatttaagagtcattccttttattctactcaattagggagggtttgcaaaattgcaaacaacctactaaaatcactcatttaaatacaaagttaaatgagtttggatttagtatacaagtttgggttattttcgagttagaccccttttggcccatcaaaaaattgtgtccaaacaggttaaacctgcttaacctatttaaacccgttggaactattagtttgcatcttgctattattcttttgccaatcatttttgccctcctatataaggcacttaattttatgtaaaagtattttttttttggggatagaatttgaaccaaatgtcttctttaaaattctactcaatgctcttgtacccttttcttcttctcgtctctcctcctcctaccttttcttcttcccttttttttccctctattccttctcccacttccctcacctttgcttaaactcttcctgggtcctttctccccaactgctcatctcttgttatccatggactttgttgagctggtgttgtcattaccatactagttagtgattgtgcaattgattgtcctacatcagtccctctgccaagctgtaacgaaggtattgcaatttggccttgcatgttcttgacaggttctttataagtttattgacatcaatggataacaagtccaaataatattcctcttccctgtctccattttcttctaattctctcaactagttactgcacgataattaaccctgcacctaaaatgtgtccctttgaaaagatggataggatgttatttcatctgtaaacgtatggcataatttgtgcttcaatgatatttctattattggatcagctaatgttaatatatattcattttgtcatttactttattacatcaaatagctcatgaggacacacaatgatgtgtaggattctgaaactaaaaagcctcgtgtgaagattta

SEQ ID NO: 8388 - DNA, 4166 bp, Carica papaya
  Intron number 16 from transcript evm.model.supercontig_5.1 47 (locus evm.TU.supercontig_5.147) derived from phytozome v7.0 (chr-ID supercontig_5; pos 1154183 to 1158348 revers e strand)
cccttgttgtatgcaactttgacctgttctttttatgagtttagatatttttcatgtatgcttgccttttcttttaaggctgatctacttgctactctaccattagccttttggttctttggtttgtttcaagctgcatctttaggaagcttctataacagcttcatgcatgtgtccatctgtccacatttacctaggttcaattatgaagtacgcagttctggatgccttttaaaattttgtgaagtgttaatcgggttgggcttggtcaactattaatgaaatgtgtcaagagatctgtgataactggggctcaaggtgaaattgatatatcctattatgataatactattgcataccggtgtccaattcttatatttactgattcacttcagcatagcccattgatgttggagaatattgtcttgactcaatttttagagcatagtagcagtattagtcttgtaacacttgtactatcctgaaggtaaccttactgctacaattaaaaaaaatgtctataccattaactggttatcattcacttcttagaacatactaggagtatattctagtatagtgacggtttgatagtgttgattttggagaataaatatttgctttatttctgattcactttacattgttacaatttgagtatatatacaaaatttttacctacaaataagaaaattgacataatagtagagattctaattgaatacgtaatacaaaaaaaaacacctttgactaattaggcaacatagtattctattcaacactcaccctcaagttgatgtaaagatgtcacacatgcccaacttgtagatcaagttgtaatgatatttgttataaagttctttagtgaagacatctgccacttgttcacttgaaggcacatgatataagtataaggagccatcaactactttttcttttatgaagtgttggtcaatttcaatatattttgtccggtcatgttgaactgaattatgagcaatgctaatgactaccttattgtcacagaacaaggatatacttctttctttggacagttttaattcttctactaactttgtaaccataataattcacatacctcttgacccattgctctatattctgctttagcactggagtaggcaaccacactcaatttcttactttttcatgtaatcaagttacctcctactagtgtgcagtagcggtagttgacattctatcatccggagatccacctcaatcggcatttgtaaatgtttttatcttaaggtgaccattttttaataggaatagactttttcgttgtgtatattttagatatcgtaatatgcgaaaaataatatgtaaatgaggctcacgaggatcatacatgcactgactcactagactcacagtatatattatatcaggtttgatacgtgaaagataaatgagtcttccaagcaatctctaatatctcctcaagtcaactgatgtaccactacttacttcaagtttgtgattgctttcaataggagattctgctgccttgcaatccatcataccaatcttttctaataagtgcaagatgtactttttttgagaaatgaagattgctctattagatctaacaattttaatccccaaaaaatactgtaattttacttaattctttatttcaaactcttgaataaaaagttttttctatcgagtcatctcctttgtgtcatctacagtcaccacaatatcatttacataaataatgataagagtgactctaccctcacaatgcttgatgaacagagtatgatttgcattattttgttgatatccaaaagagatcataactcttctaaacctttcaaatcatgtttttggagactgcttcaatccatataagactttcgttaatttgcaaatctttccttgggttctttcatcatgaaatgcaggtggaattttcatatatacttcttcctctaagtctccatggaaaaaaacttttttgatatcaaactgttgctagtcttagtcaagtttagcagtacaagacaataatattatgattttatttatcttagcgacatgggcaaaggtctcctgataatcaactccataggtttgagtaaatcttttggctactggtgtagatttgtacctttcagtttacctgtctgatttgtattttatagcgaacactcatttgtaaccaatcatcttcttttcctgtggaggtgaaataagtttccatcttttattttttgccaatgctcttatttattcaatcatgatttttttccatttgagatctctttctttccaatcttgtgaaataaatacagaggaaacagataaaaaaaaacttctatcgagggaagataaagagtcataagaaagaaacaaaattggacataggatgtttagtacaagacctgactcatgttataagagtagtgggtttatccatatcatcagataactcagaaagtaataaaccaatctatggccagataaggatatattctgagtaggttcccaaacattagagtgaataattataaaagaggtaggatttctatggttactcacatgatgtgaactctttttatgtttagctaattcatatgtattgcaaaataaggaatccataaagaaagaaggacatggcaaccgtcaatgcgactggagtattttcctactgacatccgtatctttgaagacagcttgattctcagttacactttgacttttattcaagatatataaatcattctgtagtttactagtgtcaatcgtcttccctatttgaagatcctgaaggacacaataatcacgaaaaaactcaattttacagttaaaatatctagtaaggacactaatagataaaaaactgttaggaaaactagatatatgaaggattgaagatagtgtaatggtcggagtacaattaatagaatttattctagatataggagtgtatgatctatctgcgatatgaatattttctcgttgagtgtacagaaaataagttagaaaatttttagaagagtctgtcatgtatctgttagcttcagagtctataattcaagtatcagaattagacatagtagggatatgagcaatacatgagttttccatttttgacgtaccaatagttgatgaatggttatctgaacttggaacaaccaatttctttactcatatcatttttaaagatagctagagatagagaatgaaaaatacccaattgctaatctcaagtagatagaaaggtcattgatcagcaccgaggatgccaaaaaatggctcagctcagcagctcacgtcggctttggaaacaaatggtagccgcacgctgaggaagggcagatcgtgaccagatcgggcggacctgctggcagatggcagaacttgctgggagttcgcgggggggaccagatcgcgacaatgtgtggcagggaggacaaaaatcgcgtgcggccgcgtgaaacttgctggcgtgacgcggccaaattcacgtagctgaggagaccgattggagagcggatgtgaaaccagaacccaaaggaggccgaaatgcgcgcgcgaccacgtgaggagcaacaaccatgggcgaaggaaccagaagatgggtcgggttgggcgtgtgcgaacaagagaccgtgcgcgaggaagcagtacaaacagccaggtgcgactggaatagagggatcgggtagggcggagaaggtcactggaatgggcagcaggctgccggtgaggctaggattccgtttgggtgggtggtgagaatattttagggtttgaaagaaactctaaaattaaaactctaaaatatctctattttactctgatattatattgattttggactaatgaatatttactttatttctgattcacattatgttgttacaattgtggtatatatacaaaatttctaactacaaataagaaagttgacataatagtagagattctagttgactacataatacagggaaaaatatctttgactaattaggtaacataatattctattcaatagataacaagttttattgatttaggtattttcgttcttgtttgaggacgagttcccatcatgtaatagttagctgtttggtcatatttcatggtggataggttaaatcattttcttctgtggctcacagggaactaat

SEQ ID NO: 8389 - DNA, 5537 bp, Carica papaya
  Intron number 9 from transcript evm.model.supercontig_9.23 8 (locus evm.TU.supercontig_9.238) derived from phytozome v7.0 (chr-ID supercontig_9; pos 1600310 to 1605846 reverse strand)
aagttgtttgtgatccttcctatctgcctaacaaggtaatgttattattcctgtatgtcttccatgagatgtaaaaaactttcagcatctctttccttcacttttgccctcaaataaagatatagatgcactcatgaagaaggacatgttagcttttgttagaatcatgggccaaataaatgtgtatgcatagagagtctagcttaaatggatatattgttgataaagattttatgttaagtagaatactatattatttagagttctaataatataattatttcctattaattagagttcaattagattaagaataattagtttatatatatattttaaatgtaaacaaaacaagcaataaaaaaatttaaagtttattttctctaaaaacttcatggtatcagagcgccggtaaaaactgcaattgcacatttgcaggcgtggtaaaaattgaagccacacattcgcagttgttagtaaaaagtgcagctgcacctccgaaagcgtcggtattaatatacaaccgcataaccataagcgttggtaaaaagttgcagtcgtacatcctcaagcgctagtaaaaaggtgcagtcgcacattcggagacgttagtaaaaatttaaatcgcacatccagaaacactaataaaatattatagccgcacatcaatagatgcatgtaaaaaaggccacaacattacctttttctgcacacgttcagagatctgtctggagaagacgagccaagtcgactttgagccgttttagagctgagtttgagctgttctagagccgagtctgagttgttttagaactaaaccccagccttttagagctgaaccaaatcttgctccattttttggctgcttggtgtagataggaggtctatttttcattactaagtattttttcttcttatttttagcattctaaaatggcagaactaaaaaaggtgagtgttactagttttaataatctttcattataaatcagtcccgtaaaaattgatggaattaattatcttacttggttgagattttacttattgttcatcaaatctagagagttgtaaggttacattactggtgaggtgaagaaaccaaatgttagtagtttagaatataatagatgggactttgagaactcattggtaatgtcatgactcataaattccatgcaactctatattgtcagaatatatctgttgcttaacactgccgaaaaaatatggaatacagcatctctcacatatttacagataggtaatgacgcccagatttatgaactccggaataaagttcatgacacaaagcaaggagagatactatttctcaatatttttctgaattaaatggattatggcaagagttagattactatcaagattttcaagcggagtgccctgcagatgcagtcaaatttcagaaattgatagaaaaagagtgaatttataattttttatctggtttgaacaccgaatataatcaaatatgggttcaagtagagtgccctgtagatgcagtcaaatttcagaaattgacagaaaaatgcgaatttataattttttagctgatttgaacaccgaatatgatcaaatacaggtccaagtgcttggtaaggatccttttccttcattaaaacaaatttatacttatgttcagcaagaagagagtagaagaaatgccatgcttcatattgcaccaattgaaaaagctgtattagttgctcagtttgatcaatccagagatatatagaactgtgactattatagtaagccaagacgcattagggaaacttgttggaagttgcatggaagaccagttagaggttggggaggaagaagaggtggaaccacaagagttcaaacaaattttgttgaaactagggaaacacctggttcactatccattggagccttttccatagaagaaattcaaaatctgaaacgctttctaagtcaacttaactcttcatcaactgttggcacattaaatatgataaaatcatgtattgttcattatatttccactcctgataattggatcatagactctggagctaacagacatatgacaggctcttctaaagaattcttaacctattcttcttgtactgaaggtgataatgtccgtataacagatgggttatatactcctgtgtcaagaataagttccattaattgtactcttattattacattgtcttcaattttacacgtgtgtagtttttttgataatcttttatctattagtgtcataactagagatctcaactgtatgattgaattttttcctaatcattgcatttttgaagattttcaaatcgggaagagaattgacactggtagattgtaagatgacttatatgtcttgaatagacatctgaacttaattggaaatcaagcaaccattgagaataaagaagtcaatatggagatactacaatggcaccgacgattaggacatctttccttttttgttttagaaaaattatattctaagttattcaaaagaacctttatgaagtttttattttgtgatgcatgcgaacttgcttagaggaactcttatcatttaattaataatagaagtattgatcattttaaaactattcactttgatgtatgaggacctactcagaatacttttctttctggtcatagatgatttgttacctttattgctaaaaacaaaagtgatgtattttcatgttttcaatctttccttaaaatgatatgtacacagtttgatgctaaagttaagattctgcgaacggacaatggtacagaatatatgaatagtgggttctgtgcctattggagtcaaatgggataatcatcaaacaagttgtgcctacactagtgaacaaaatggggttgctgaaagaaaaaataaatacatattaaaggtagctcagtcactaatgttcataatgaatctactaaagagttactggagagatgcagttctcttagctgtctagcttatcaatagaatatctttgtggatcctgaattttaaaagtcctatggaggttttgtaagaaaaaaattcctacattgttcccccaaaagtatttggatgtgtgtgctttgttcatgctagaaatgtaggtaaactagaaccttgagctcttaagtgtgtatttgttggatattcttctacccaaaaagagtataagtgttatcatccaccatttagaaaatactttataactatggatattaactttagggagaatgaatcttacttcaactcaaacccaacacctctttagggggagagtgagaaggaagaagtgatacctaattgggtaacgattgagaatcatattcagggggaaaattctattacaaagagtcttaatcaagaaaataatggtggacgtctagataaatcagacttgaaaaggtattaaaggagaaagaagtctgaaaaagtcattatgcagtctgtcccaggtcaataatcttctttggttctagaagatattggtgagttatctttttcttgtgatttatcaaataaacctattgctattagaaagggaatgagaacttgtactaagcaccctatatctaattttgtttcttaagactctttatctccctcctaaagagtctttgtcttgtctgtttcttctgtatttattccacaggattggagagaagctctaggagattccaagtggaagaaagccatgattgaagaaatgaaagtattgacaaaaaatgaaacatgggaacttgtttcacctccacagggaaagaagatagttggttgcaaatgggtgttcactataaaacacaaagcaaacagatcgattgaaaggtacaaaactagattggtggctaaatgatttattcagacctatgagattgactatcaggagatatttgcacctgttgcgaagatgaacacaattaagatacttttgtcttgcgtaactaatcttgattgagatttatagcagtttgatgtaaaaaatgcattcctccatggaaacttagaggaagaggtgtacatggaaattccacctgaatttgaagatgagaggatgtaaggaaaagtttgtcaattaaaaaagactttatatggattaaagcagtcttcaaaagcatggtttgaacggtttaaaacagttatgatctcttttggatattaacaaagtaatgaggatcataccttgtttattaaacatcgtgaaagtaaagtcactcttctcattgtttatgtagatgatattgtggtgactggagatgatacaaaggagatgactcggttgaaggaatttcttgctcaagagtttgaaataaaagatttagaaatattgtaatacttcttggggattgaagttgacagatccaataaagaaattttcatttctcaaaggaagtatatcctaaacttactaaaagagactggtataatgggttgcaaaccggcagaatcacctattgagagcaaccaaaaattgcgagcaggtagtggtacatcagttgactttggaagataccagaccctagttggaagactcatttatctatcgcataccagacttgatatagtatatacagttagtcttttgagccagtacatgtatgattctcatgagactcatttatatgttgtcttctgcatattacgatatctgaagtttgcaccaggaaaatatctgctcttttttaagtatggtcaccttaaaatagaatcatttacagatgccaattgggctggttccctaaatgatataagatcaattataggttactgcacacttgtagaaggcaacttagttacatggaaaagtaagaaacaaagtatggttgcctgctctagtaatgaggcagaatatagagcaatgacccaaggagtatgtaaaatattatggttgcaaaagctaatgagggagttaaaactggttaaaaatgaaaaactattcctgttttgtaacaataaagcagcaattatcatcgctcataatccagttcaacatgcagaataaaacatattgagattgatcaacacttcataaaagagaaggtagtttgtggctttctgtgcttatatcatgtatcttctggcgaccaagtggctgacattttcactaaaagattatgcaacaaatttctttagaacttgatttgcaagttgggcatgtgtgatatttttgcgccaacttgaagagaagtgttgataaagattttatgttaagtagaatactatattatttaaagttataatagtataattatatcatataattagagttcaagtaaaataaggataactaatttatatttatattttaaatgtaaacaaaataaggaataaaaaaattagaagtttattttctctaaaaactttatatataaaataaatgtctaatcaaaatttgtattattacaattatatgatccctggtcaagagttttgaagccaattctagacttatctgaattcacatgtcaatatcatgatttacaattattttgttttaacaggttaggaaggttggtaaggtggccagggcaattgc

SEQ ID NO: 8390 - DNA, 2309 bp, Carica papaya
  Intron number 1 from transcript evm.model.supercontig_46.1 66 (locus evm.TU.supercontig_46.166) derived from phytozom e v7.0 (chr-ID supercontig_46; pos 1629260 to 1631568)
gaggttagttagtttgttacttaattgcacactctttaagttcacacaaaatcgccacacacttttctcacatctttttagaaaacgacgccgtaccaaactccattctctttgttctctgaaattaattgttttacagtaatcttctccgtgtttttttaaattataaacgtaatttttttaatacattttatggaatttattcagtgggaatcaagtaatttcgtctcgttacagtattgtggtttgcgtaggagtagaactgcatttacagagctagcagatagccattaatgcgttgatgggtttcttgggcattgggtacttcatcctcttcgtttcgctaactctctccggaaatttttgaaaaaggaacatgaatttttttaaaaaatttgtgtttatgattaatatatatatatatatatatatgttagtaaatatattctatacaaaaaaagaatcattaacctggatgaaaaagttttccaatccggccgttcaagctcttcttgcacgtgccataaaacgacatttctataccatgcgcaacaataccaaacaaccccattgtttactaaaatgcaaatgttcaggtcttcgtcatcatcataatcatcatctgcagaatggataaaggaaagtaaaaacgtctggttgttacgtagtaccagaggaaaaaaaaaaaataacccacatgggttctcgtgatctttctctgtctctatcttttttagggtttttattccttacaggactgacgtttattccctgtttggaacgatcccattaacttagaaagctgttggaggctttttgtggtttcatttctttgtcactttcttcccagaacttgtttgtatataatgtgttttttgaaactaacaagaggctggctgactggctacccacaaaagtgaacccactttttccctcgccccaaacagaaaaaaggaaaagaaaaagttaaaccaactttttcaggaaaaaaaactatccacattttgaaaaaaaaaaaaaaaaaattaaaatttcccatattgcctccacgaaggatccccacatgggctctggttctctcctgtctcttttactttatttattctttagggtttttttacatgaaatttcttctgttagttgactttgagaatgcaaagagagaaaaccagaaactttacatggctgggtcggtcatacatatattgcatgctctgataattttagtcctctgaagcacgcgcattcagatggtgataatggctgatatgtgttagactcgtgaggttacttagtgggaacagtcgcttgctttatgacccagaaatttaggagcatttactaatattatttttaaataatttattaggctgctttgctgcataacaatgacaaactttaattattaataattgatgtattaattaactttagttctatcatatacatttatcatcacactcatggattaccttgtgtgtgcttgtgtattgaagtatataaaccgtgtgtgtatatatatatatatatatatatatatatgaaaacagtaatactggtcactgtcttgtgttattaataatggcagctgacatctcagaattaaaaaaaaaaaatacagaggaagctatcctcctcctttaattttaatactgggttaggtgttagattgcggattaatattcgagaggaaagcgatggtatacagtagtgatctatatactttattcatatatatatatatatatacacacacacgtatagagtactgggtaggagtcagattcatccctaaggagcttccgtatatatatatattaactatataaacactgtttgatatattctgtttaatatatacacctagctaaatttagtggaactgctctaagtggttttaagaaataaattatgggaattaaaattttagttaagattaatccagattaacaggtgattaattagaaaagaggtatgacattaatttatgtaggactcgcaattgatgaatcttgcttttgaggtgcctaacttctgcagtcctgtttcacagtcatgtgcatgcccccacctgcacagtgctagttgcagagccagaaagcataatttagtggaaaatgaattcccccccccccccccccccacctcttttcttttttgttttttagatttgggtttcttaattaaaaattattagtagtttaattagctaaatccggtttaatctcggtgtgcaagaaattaaattgatgaaatatcttgaaaatggagcaggaccagggtgttcatcagttgcatacggagcatct

SEQ ID NO: 8391 - DNA, 1477 bp, Carica papaya
  Intron number 2 from transcript evm.model.supercontig_25.1 96 (locus evm.TU.supercontig_25.196) derived from phytozom e v7.0 (chr-ID supercontig_25; pos 2046216 to 2047692)
ctctgattctgcaggagatttttaaattccatcgagtatgctgcatttcttctatttttgttcgtggtagctcaatttttaatatatttcatccttctaagaggatagattttcctggttttatgtttggaagatttatttattgatttattttggtttcttcagagagagaaagaatgaagttgcttctgacctacaatgttctaaacgagttctcattccaataataaaatcattttccggttttgttatctccagaccattgtcaagaaaggatttccatttgataaccctagctgaatagggatgaagtgtaaagcctcatagaataataaaatgatttatctgtgagctctatatcttaacacctcgaccatcaacttgttcatctaagtaacctgtagggtagtacaagcaatgcaacttattcatccttttttatggttttctccattgtcattgtaccaatctattctgtagagtccatacagctgtcatctgtgtaaatacttcttttccgttggataatgtcagaggctccaaattttcaacaaagttgatccattaaattatggtggcagaaaatggaaatatttaaaatccgtttatgatttgctgcataaatggcagaagtggatttttttcctgtatctgctttccttaaatatcttgccagcttcaaaagatagaaaaggccaccttaataatttaagtacatgggttgtggattcatgttgggaacttttcatgtgttacaacttaatctctatatatactcgcaccttcatcaaggtcttcaaattagatctacctgaggaactgacatgttgatgaaacggggacagatttgggtgaacaggtgttacttatgcttgaatgcgaagaatcctgcatccatatccttttgtggtgtcctattgcctatgagttgtggcgcatgatttatgtccttttgggaattaattgggttattgcggtcggttaaagagaaaatttgggcttgggaaagtttatgtaaaaagagagaatttgtaaagctgattccattgaccattttctggttcgtttggaaagagagaaattgtagggtttttgagtgtaaaaagtagaaagttttagattgagagatagatgatttcactactttgaatttattttgttagggtatgacattattagggatgaagattttgggaatgtcattgacatactaaaacagttgtaaatcttttgtatatgagtggtgtttccttggtatcttattaatatattttcacactttttatttcaaaaaaaaaaaggaaaaaagatctacctgaggaacacaatttgttaattttggaatgttaaagtctgaaaagtttccgattgaccataatcactgttatgtgatttctaccataatttcaatgttgtaatattcttggttgtctgtttgacaggatcatatacagccttacattacaagtattacatc

SEQ ID NO: 8392 - DNA, 1478 bp, Carica papaya
  Intron number 11 from transcript evm.model.supercontig_128 .50 (locus evm.TU.supercontig_128.50) derived from phytozo me v7.0 (chr-ID supercontig_128; pos 359826 to 361303)
tcaatctgttagtggacagtacatatacagttaaggtaagttctagaaatctgctgtgatatactcaaggattattcacattatttattttccaagtaaattcctttagcagatattaagtaggtaatgaaagtagatttcatggttatgtaattgtatgttaggtacattatctggagggtgtccatttttattagaatgctattttcattcaaatctttatcttatctgccaataatctttaaatgggaatatgtccttacccgtaaattttccttatctctttcatttttttttcttttgtttttggtttttttttgcctggaggacatcttatcctctcatgtcttttgtaatggctttccccctctttaataaagtttcttttctttttttttaaaagaaaaaggataaccatttttctgatatatttgtcacataccagtccaaatattgcatatgcagtttgtgtggtgagtccttgctgcctacagaatgctttattacttgaaggatactctgaggaaatgaattaagttcaaaaaaaataatagactgcttcttgaagtatacacagatgtagaccacgttggatcaccagttgacaggagatccacctctgagattgtacttttctcgaaggaaatttagtgattaaagtaagtagaatatagtagtttattctagtacagaatctaagttcaggactatgacccaaggaatgtgtgaggttttgtggttgaagatgatttagaatacttgaagatccaatgggatggacctatgagactttactacgacaataagttaacaattaatatcttataatacagtacaacataacagaactaaatatattgaagtagacagacacttcatcaaagggaagctggatactatgttgatttatactccatacacgccaaccattttacaacttgcagatgttttgactaaaagattaagtaattctgtatttcggatgattattatcaggatgaaaagggatagtatttattcaccagcttgaggagaaatgtttagaagtacaaattagggattgattagggtagagagtatattagtaaaatactctggacctttgtagtttttgtaattaatattatttgcttttgttggtactattcacttgtatatgtaatccctaatatttaatgaaatatgtgacaattaattcttcgacagaatagaatgaaaaaactgctttatgtttgatgcctttttctttcttttataactgggaatataccttagtgcctccacttattggtctacaagtatgtatttcttaaaatctggtatattagaagtgtgctaattttatgcagcttcaaatactgtctttggtagttcatttcaggcatacttgtaggatgaattatttaaacattatcttggaataagatgctaattatgattcaggtcggcgattttggtctttcccgtttaaaagcaaa

SEQ ID NO: 8393 - DNA, 2353 bp, Carica papaya
  Intron number 1 from transcript evm.model.supercontig_96.5 2 (locus evm.TU.supercontig_96.52) derived from phytozome v7.0 (chr-ID supercontig_96; pos 802809 to 805161)
gatttctgctactgaggttgtctctggtgtctctggtatgcagcgtctctgcttttcacccaattaagatttttcttcgacttgctgctttatagacttgtattacactttttaagtttgtactaggaatatttgaaaggtaatgatgcaaactgaaaacattccttttgctgttgttatactatagatcagtagaaagtattgctttctaaaaggaaaaaaatcacaaataaaaatgtcaagaatatcagaaatgaattcatgcttaaaatcagtgctgagaagtttgtttattacttgtgagtttccacccaatccggggatgtaattctatggcttcttttcatcattagatcaatctctctacaatgcaacctcctattggttcatcttacaggagttggacttctgatgcagaatgaaatattttggctgtagaaaatatttttttaattattattaaatctgaattatataggctactcataaattgtagttagttttagtaggttttgaatttaactgatctttactattgagatatgttacttgttgattgtgattaggtttgtaattagttcataataaccgctgctaacctagacaataggagacaaagatgaactaaagaatacttccagggttaagttcctcattacctttgtgttctctgttctgatccatttttgttttctagcaagtactatttatctctctatatttcctttttttttttgagataatctctctatatttccttatcttagttcctgctcttatgtttgtcatttgtcctgttcttttgttatcttactttagtttcctctaactctatagtattttgataagttgtttccaaactgtacttgtcctacatcaattttgcttcagaacttacatgtgctacatcaatttggtctcaagtcctacttgtcctatgtgatggggataaagccacccgaccatatggtttctctatggtttttctccaaaaaaattggaatcttgtctgctgtgttctttgtgggctatttgatgaattctttgacttcagaaagtttgttgattccttgaactctaccttctaaatattgaggatgttgacaatataaaggactagaggccaattagcctagtgagtagtttctaactaataggcaaggtgcttgcattaaggctaaaagggtggtcagatcaattgttgggaagcccgatagacttttttgaaggctgttactctttagatgccccattgattgccaaagagggagtaaattcaatcgtccacttgaggggaatgggtttgatgtataagttgggatgttgaacatgtaaacaactacaaacaagtggcttggtttttctttgagcatcttttagattcctcacaatatggaagaaatatatttttaagatgtataatctcttccacatttgtagttttgatcaatgatggcagactaatttcgtacactcttttaagggattatggaggcttttaataaagcactgatgtaggctagagattcgtacttgatccaagactgaatattgggagggtgggagaagaaaagtggtatttcacttactttttgccgataattctcttctgttttgcaggtgaaattgggacaaattgtgtaacctcagatgcttgcttgtatgccttgaggtgttttctggcattaagtctactcggaaaagtctgctagttgcttttggggaaatgtgagagtcctaggatgtcaagttaacaagttgccaattaaatatccaggttaatatgtcaaatagagctttagtagatttcctactacctttctttagataaaagagttggctgataccttcttaactcacttaaatattgagagttttcaagtgttgccatgagcaacttttcatgtagccgaaaaaaaatcccttttcgtaaagctgttaggacatgatgtttttcttgttattgtttagctatttatacggaatgacatttctcttttcctattatgaagctagaagctcttttaatttatattgaggctaagcactcttgaggattttactaaaataatctttcctaatagacctttttatacccttgattttgtttgttttctgatgggtttgcctttatccattttaaaagctagttgctgcttgtttgtggctggttcagcacaaccatttctttaagcttttggttggggtcctgcaatacctgataacaggaagctatttatgaagttatgttgtcaccttaatagaactatattcttgtctatttggttcccaaaaaatatacatagttatttctggtcaatgttgtgaaattttttaggtgcatcagaagaaa

SEQ ID NO: 8394 - DNA, 1460 bp, Carica papaya
  Intron number 2 from transcript evm.model.supercontig_1042 .1 (locus evm.TU.supercontig_1042.1) derived from phytozom e v7.0 (chr-ID supercontig_1042; pos 2109 to 3568)
gcccgaccgccattcagtacggttgtggtcatcaggtccttcctctttctctttcactctctctccctccctacatatagatattagatatagatatagatatgtaacgaaccaactgcatcaaatgtttcgaattggtagccttatttcatggtcacttattaattactatatcatataactgtttgtaccaaagactaaataatttttgactaaaaatacttttagtctaacaactattttaataacacttttaaggctcacaacacagggtaacactagccctttcagtctacataattagttttgcctctactacacaatgatttttattcataaactccatgagaaaattctatcttcctctggctatctttgaattttctttaggaaagaataaattctttagtttttttttctttactgaacagaaaactgcatgaaagtcgattagttgtagccaatgatgtgggttgatgatatatctatactctaaaaagtttaaatatttgtagattttcggataattgacgatcacatgtgtgtcatttctactaaaaatttctagtcatggcttgacccccaatattgaatttcgtaacttaaagtggattttactttgtaagtacgttgtcaggaattcttgctttttcagaaaactaaggtgctaagtatagtctttccatcatttttagggtgttttggacatgaacataagctatttgaagagctatagttgattctgaaattttctaccgtgggtttgctttgtaatattcatgacttgaatcagtgacaaattcaagttagcagcaacccgcttgttaatgtgttagttttataagcaaacgcacatgaggttatgtttccttttctttttcagagaaagaatgggatattcttcctcttctgaaacatctgttgattgctggatttagactttcaaaatctggaaaggagatgaaggaatggaggaaaaataaagtgcaagcattttttgcatatatgaaacgaaactagacatatttgatggttcatcatgcctataaaaatagtcaaacagctagttagaatcttatttcaaactgcagaaggaatgagttacccaaaaggaaaaaggattctatggaatagattcattaggcatgttccaagacatctctagtagaatatcaaatcaaaggcactatgaggtatccacatatattataatcatatcggttctgtgatggtcatccttagatgtgagaaattttgaactggaaagaccgtgctgttgagaggcttactctaaggaatacaaagtcataacttgttttttgttagtagatgtgttgctgcaatttcaatgtactttgtaagctacccttattgcctttttttttatcatcttttcaatttattttctgtttttactggttgcagacgtattctgagtttcgtggtcataattttacgct

SEQ ID NO: 8395 - DNA, 1620 bp, Carica papaya
  Intron number 10 from transcript evm.model.supercontig_103 .58 (locus evm.TU.supercontig_103.58) derived from phytozo me v7.0 (chr-ID supercontig_103; pos 431087 to 432706)
atctggagcgagttctttcttcaaacattctgcaggttagtttatatatcgaatagtttggaggagctatttctatatatttatgtgatgatattacctcacctttaccaaagtatattagggacaataaatcagaatttagttgcaccatttgataaggtgtgtcagataaggaagaaaaagttgtgtaataattgaatatgttatgtaataaacaaagatctgtttatgttagggatgtaatttttattatatgtggtagttggaagattatgtgagagtttgtatgttggaataagtcttagataaagataggaggtggttgggataaaatctggaaataacttccagaataatcaaacttgttttttgcactatataatcatgtaatcaaacttgtagtgtaacatagcttcagctttaatcatgattatagtctctaaatatgtaatagattagattacattgcattatattacaatattattaagctgttgtgagtttcagagctttttcttagtagatattctccttattatagtcttatttttctaaaatattttttttttgagataatacttattattagtcttatatttttacgtaaaacagatcacatcttctgtttttggagtcagtttgcaaccaagttttcaatttagacagttctctcatgcacttttccattcaagcaagtaacttatcataatgagagtttttcagctcaacagatgggcctaatactgacaatggcttgaaaagatatcttcctctcatagatggggtttgaaggataaataatcagatttcttttctgaagcatatttttggtatttgtttccacatggatcactattcaagctaataacttgaccttagtgagtggcttcctctcataggaagaggattgcagaagcggttactgaggggagtttgacaattgaccctgttggtcattgaagtgacatgcaggtcctcttgggatcataattggtagtgtctcaaaatagcgtttcctttttgggtagacaattgcacatagcggattatggatcagtctgctgccttggcaacctaacatgggagttacacttccattaaatctcaaaggaagttggaagtgattagtcagtgtcaaattttcagaatttgcctagttggtgttgtaaaaaggttgttcttgcatacctacatttatgcaatatactcatattttgcagctggttattggcattagttttaggggtttctgtttcagtcttaaaacttaattccatgtggaaatgttatgttagtttattgggtatttacttttcttttttctttttttttttaatttttggggaggaataaaaccaagattaatggtattggttgatttatgtgcatgtccaactcttgtttggttccaagttcttgtttgccagctgcctgcttatattcttctccagcagccaattttttcttaccattattcttaatacagcagctgagatagtaaagattttcttttatacttgtttttattttcgaagtagatcatgtcgtgttttcattttaactatgggaaaacacttcgattgagctattttttatgtgcccaggagcaaaaacttcaag

SEQ ID NO: 8396 - DNA, 1418 bp, Carica papaya
  Intron number 3 from transcript evm.model.supercontig_33.1 7 (locus evm.TU.supercontig_33.17) derived from phytozome v7.0 (chr-ID supercontig_33; pos 121298 to 122715)
attctagtgagtcttctctcaagttagctttatcatgtaaattctttataattctttcttataaatcatacagcttggtcctcttcgatgagtaatcatagtgctcgtgttaactggctttgggtttttctgatcaaaatctgtcttgttggagtctggtatgaatcttccttaacataagtccatagatcaaattatgagattgaatgagggataggtacttattgaatgacttggagtcttatctacaaagatatttataagatttccttcgtaacctttattaaatgagattgaattaagacaattactactgacagagttgggaaataatactactaatataaataggaaaactaaaaagtaaaaagaataaaatcctagagtactaaaattgtaataatagacttctaatggtacagtaattttatacttaataaaattatgattttcgaatctatttgggcaatctagagataatatatattgcatcatttttctctagttggagaaaacttgttcatgagctttaaaatggtgaatgatgtaaaacattaatcgtcaagttttcccctaaaacttagaaaactttattttcagtttctcttaagtaccaaaaacaatgaaaaggcacaattgcttagaagtgtatttaaaatttggggcaagagaataaaaatcaaccgattgaccaattgatgcgtcaagtttctcctggtatgaaacttctgtggtgttgtctttttggaggaaagaatcttgaccaataggaaccacattggtggttctttttgctccacattttgtttatttcaacatgcaagttattcctctttggacattaactcgtgttcactctatccacacctaaagcaaataattcccttttctttaggagtctcaaaaattgatgttgatccattcttaacttactcttttgattcaaaagtattcttagtggtggattccataagtgaaaactcaatgtttcttggaattcaatatatattggtagagaattcttttagctctgatattgccttaggatttggagataaaacctagacactactccttaggcattatatctaagaagtcttaagcatcacaaataagagtttggttgcatttgacaatcagaaaattatggtaattctcaaagtattttgttgaatgactaaagtctgtctcaaaaagtgaaattatcaagaaatttacgaggcttcttaagtaacctagagctaatcctttttgcaacagtaccatatatatgatatttaacatgcatcataaagtctgtatttttgttattcaaattgcttttttttttttgaagctattgaaatccgtcatcttagctacaattcttttgaagggtgtatgacttctggttgtacgatgctctccaggttaagaga

SEQ ID NO: 8397 - DNA, 1381 bp, Carica papaya
  Intron number 3 from transcript evm.model.supercontig_64.1 20 (locus evm.TU.supercontig_64.120) derived from phytozom e v7.0 (chr-ID supercontig_64; pos 826920 to 828300)
ggtaaaccactactcttttgacattttacttttaatttgataatgtagatatatacatatccagaatggggtgtcttcgatctcaaggttgtaactaccaacttaaatcttcaacaccattaatgtccttcttggtagaagatttcctctggacagctaattgggatgtggataaaggatggagagaacacagtaaaattgggtattagagcatggtaaaaaagaaacgtggaagtgcaggtaaagcttcatcaagtgtcgggtggaagaaatattcttgtgttgctgtgagtaagaaacctagcatggagataatgtaagaacatttgccagtaaagcttagattgacctaaaagggattgacctgaattgtgttatgtgtagagggcatgtggagtcataggagcatctggtccagaaatgtgagtattcgaccatggtacggaaaatcaggccattgagatgtacacagctattgcattcttgttttcatgattggttgcaacataacttgggcaacgcaaatgttcatgtaaggcttggtttatggtgcttttatggggcatttggagtaaaaccaatgcatatagagtgggagatggtaggagcatgttactcttgctttaaagtcgcagacagctttctatgagatggagcaaataaacaatccacaggacttggaagggaggcagctttcaaaatgtagtcatttttcaacaatatcaaacctggaaactaccacctgaaggcttctagaagcttgattcagatgtttgttttagtgatagggaatggatagggttggggatgattttagggactgccggtgaaaggtattatttgttggcatgagacggattccatcaccgagcacagtggagatggcagagatccttgcattgaggtatgaattggaagtagctgtatcaagaagtatccataatataataggggagggtgactctcaaaaactcttttcttcacttttatataaacctggggacgtttcagagtttgggccattaagagacaatgtattagatatccacatgtttttttcagttttgtttctttttagttcctagatgtaatcatggagcaattatcttagttatggaggcttatctgtacctaatgttgttttgtttacttagaagctcctgattttgcgtgaataagatgatgttctcttctcatgatatagtgaaatattctcttccaaggaagaaaagaatttcctccattaaaaaaaaaaaagataaatgtttgatagccttctctcctctcctttaattaaaattatgctatatacagagtaccaggaacagttaaaactaaagttctttatgatcatattgcaggggtttaccaatctggttgc

SEQ ID NO: 8398 - DNA, 3633 bp, Carica papaya
  Intron number 9 from transcript evm.model.supercontig_51.1 25 (locus evm.TU.supercontig_51.125) derived from phytozom e v7.0 (chr-ID supercontig_51; pos 1235075 to 1238707)
caaaactcattgtgcagcatttgacatcagttccagtgagcataaacattatttctagcttttaatatttacattgactgagaaatggaagtatgcaacctgtcttagcaagcagatcagaacattaattggccctttaggataatatggtgcctgaaaacccaaaattatgaagcaagtgccaattctatagcaaacttctcccatggtttaggttgcactgctacaagcattatgtatgcaattatgttatctgtctgggttcatatatgattcatttaataattcatcctagtttgatcatgcccgaattttaaaccagatacatacagagagagctggatggatgggatgatttaggaggtcagtggagcaattctcttttgtagcctaaactaggaattgcacattctattgctttggaagaaaaatgtaggcctgaaatcttctttggtataactttttatgttcagcatataggcttacatataattctaaatgtagaaggaaatcctaattccgtctcaggacctaagggtactgcagggtattgctgaaataagcttataattacttactgctaagttgtttttagctgcttagatgcatctatatcagctctaacttgtaactgctcattatcaaaaaatgaatacatattgaaatctcttgaccctgcaacattctgcaaacccttctctcttctttaaatctttcctttcttcatctctttcttatttcatcaggattcaggaacttgacaaatgatatcagaatatttgtttttccaccattctttctactcctccatgtaaactccaatctattttcttcaatttcttctcttctttatttcctctgtcttcttccaattctgataattctctcaaacacaaacataaaaaagaagtgccgccacaaatgcaaaatcaaccacccaattctggatatgaatttccatcagaaataggatgagtttaaaacaaagctttccaaaacttgtttcatatgatggagagaacttcaattggagaaggaagctgctctacgagagcctaaattgagtggacgagaaatttgaggaattgaagttgatgtagtgatcaaggagctgcagtgtttcctctccatctgtgtcagcttcaccgagcacgacctgactcccttgtttggaacaaaatcctccatcaccagcttgtcctcaatcctgcttggaaacactttacacatggcaagttcagatttttcatttcttggagcaagtccatatgcagcttagttgttattcgtcacagaggaggtggatctgattgattcatgccaggaggaaatcaagacagtaacttttaattcttctcctgaagtggatgagccaaatcaattgaagataacaggtaaaatcattgaccctgaatcaattaggaaatcaaacgtggtagtaggaacgtaaatggggaaactaatagcaagaaggaaaataattgaaactggaaacaatcaagttcacactaagtgtttgttaaaactaggcaatcaaaaaattggatagtgtgtactgattatgagaaaattgtatgtagtagttgtggtttgaccgatgaccagatatatatgattctatccatataaatgtccattatctggaaaaccattggttctcaactttatgaaaaataaagtgggcatttacttctgtcaagtttgggagggttttgattctagaaatgcatctagcatcctaattaaaggaaacaattcacctccaaagtctgagttcaatcttgatctgttcagcacgctaggaaagaagcaagctttttgcgtcgtgactgcaagagatgaggtgtgggttgcatcaaggagaaggattcctgctttaaatacgagtgataaggtcctttgtagaaaatcctattgtagtgctcatgacaaagtattgattttttaatcatatttgaaccggtccttatctggtatcattatggccacattacagagtagcaaagaaccacaattcatttacggagaacctgaaatgcagcctggcagcaagcaagaagaataaattttctatagaggttgagaagacaactcaaacatatgcactatttaagaaaaaattgacgactctgcctaagattcacatgggttccccttttgatgtttgggtgcatgagatttcaccattcttatcagccatcaggtgcgcaaaattctcaagttttgtgtcagatagaatctggaatccaacccctcctacactaagactccttgcctccaagctcattcctcacacagttcttgtcacctgttgtttttgttggagaatgggctacaagagtcaactagctgcaatcactttggcagcagacaataatacactcatgatggttcttgatggaattcctgggcaagcactatgtgtagttgcaggtgttatgtcgctcatagactcttcagttgatctcagacttgaaattgactagattgctgggaatgaaaaatataaaggaagcttaatatattgtatcaacaataaggtctatgaagactttgatgtactggaatattttgaagataccagtgagtcaattgcttctgcaataatagaaactggtgttatgtctgcacctaattgtatatccatagatatttgtccttgaggacaaagataatctttcatggggaggataatttttggatctgagagtaatatcaggtattgtttatataacaaattgtatttggatattctggggattttaaattgttagtagttagaaaaattggttagtttactgattcttagcttataattaattaccactaagttgtatttggctgcttagatacagctgtttcattctcaaaatgatgaatacaaatcgacatctcttgaccctacaactttctgtgaattgttcccttttccttcaaaacaaaaaagcctaagacaaaacttatcctaaatattcagagaaaaatagtaaaattaggaataatttggccaccttatggcaagaggctctttttgcaggactatggattctataacttaaatggaagcataggattttttattaccaccacttttatcgttccgggagttgtgtgaaaggtattttcccaccttatcggccaaagctaatggaaattaccacgatcttgctatttccgagcttcattggaattgggaggcaataattttgttccccacaggaggaatggatgatctttttcatgttatttttttctttgcttgtgttctaatttccttatttgctcttgtgagggggatgttttattctccacaattgtattaatttcattccattcctaataatacttcttctattgaaaaaaacacctagttctctatggaaaactaaaagttcagaaaactctgatgctttgagggatagtacttgagtgccataactaatttaacttcctaagtcaaacttcctttaccatcatcccatgaaaccaatgcttgtggttggacttgcaatttcttttctcttctagaacttccaaaaataatttctcattgagggagtttaactagcttcttggttaattttgtatttccatccaggtggacaacgcatacattgtggatctggacagtct

SEQ ID NO: 8399 - DNA, 1430 bp, Carica papaya
  Intron number 1 from transcript evm.model.supercontig_140. 24 (locus evm.TU.supercontig_140.24) derived from phytozom e v7.0 (chr-ID supercontig_140; pos 397978 to 399407)
gtcgccgccgagaagcgtctcctttctctaatcaagtaactgcccttttctctttcttctttgattttttgtctgcctgcttttcttgtctgttctttttttgaaagaaatggactgttaatcagccaaattgaattgaattgaattgaatgaagcatccgaatgatcccctttaagaaattgtgagaaacgtaaaatttagactttctgggagattctgggatttcgaatcctttaattcatttgataccgtcaatcggcatgtcgaagttgagaaccctagctgcactaattagagttctcgtatgatatctttgcgagtataagattcatctatcttgtcgttgagaaaattgagagaaggaaaaaggtcgattcaatgagaagtatatgccaacctatttcttcattaatttcaattgtttttctgtatatcttgttacattctttgctgggtaattggagtgccatccaattattttacctggacatttgacatttatcattgatctttactttggactttggaagtaaagctacaattctcaaccagaagtataatatacgaactagtattattattataaaatcataaaataattagataattagaggaaataacagacggcttggtgcagcttgcctgcgctccaactagataagaaaggctcttggcttccgtggctgttgcaagtgatgtgtttgcaattgagacagccagtgatgttggtttttaccaaatccgaagtagggtttactagccatttttgaatccaatggctagttatactatttgaaatcaataatacttgtgatactttggtcttagtaagccaactgtccagattctccatcatcatctttttctgttccgagacagtttgttccctatctaagagtgcttcaatggtcgttggattagagtgcaaatgctggtaagatgaaacacatttcaatatgaataggtcgaatttggctggtggcaccaacagcaagctgattgttgctgctccttcctttttctttagatgtactattaaaatttaagttttctatagtaaacattcagttaaaaggtacagcaaaagaattataatgtatattaaattttatttgttcatttaggtttttaattaatatactcattttagatttcaggaaattgcagtaagcagtgagtatacaatttaaaaaatactgggggcaatttttttttttttttttttgagataaaaaagtagaaagatgtattgaagtataggcaccaaggggatgccacccatgtacaaaagatttacaagtcagtgagcatatcataagtacgaagcattaatataattttctcttatcaaatttaggagaatgatttagttgctcaaactcagaacaagttggactgatggttgatctattgttattcaggaccccgt

SEQ ID NO: 8400 - DNA, 1657 bp, Carica papaya
  Intron number 1 from transcript evm.model.supercontig_17.7 6 (locus evm.TU.supercontig_17.76) derived from phytozome v7.0 (chr-ID supercontig_17; pos 954675 to 956331 reverse strand)
cactgcccttccgcagaatcagaaagaaaacaaaagtaaatactgtttcctgtaaaatattctttaagttaacattttttcttcctatatttgtgctgcatactacttaggaaacttacactaaaaaagtacaaataggaggcattttatttcaaaaacaggtgcaagttttcaacatttgcttaggattctgcgtatgttgtactatggtgtggctttcttcatagattgcagattcaggaaatgagctgttcagaataagctaatttgtgaaactgttaaaatcttgtgtgtgtttacttttatacttgttgattgcttgtgtgctaattttttaaaatgtttcttgagagagttttaaaatgattttattttgtagtttgagtactacattgtttcttttacatccattactttcttttatagaatggttgtttctcaaggtcatgagcgatttgaatttgaaataagtggtaggttatatgtgaattaattatctgtgacttagaaagttgagttgtctgttttctccacagactatcagaattgcttttagtttttggatgtgtagcttagtagtgaacttgattgaagacctgctacatgcattttgggacttgttagtagtggataataaatttggaacttagatatgcagggcatatttgggagttcatggcaccattcaactgggcctttcctagatgttgcaagaggtttgattgcattgagtattggatatatgggcatgctctcttgcaatatttcataccatgttattgatgattctggatatggtactcaaacctatatgaatttcggtcctccatctagtctgtaaaatactcctctatgttcttgatatttaaagttcttcattttgttctctcttatttccttagatattttgaatcttaatccaattggtaaaaacttctatgaccttacatttgaggtcatttctctttattaacttttgcatgccaagaatacaaataataaaattgggttatttcgtatcagattaagctttcatgatattcattaacatttgaatcttctacattggtctttgacatttgatgttagcggttagataaataaattgcacaaagaacaacatctgctgaaaactctttagacatttttgacattattttaggagcatgactatgtcttgcatatagcaggtgtgaaaaccacctggagttctatctagttcacttttaggtttggccaggtaaagaaacagaaaatttctcttgtaacttcagcttgtatcatatttagagctttgagatactaaaaatctgtttctcgagtgtgtgaattggcttccattaggctgtcttaatgagggttatggtttgagagattaattttgtcatcacagattacactgtgtttagttatccttttatttttctttcactgtccgcaagcttattatattttgttcatctttttggccgagcagttttatgctttgatcgacagtattccgcgtttctttgtcactgtgtttcttgagttctgattaaccattttcaaaggaaaaaaagatcatcagttgctgttttttgatatcatattcctcttagtggtaattgtattgcctacagggaagaggagcaattctgccagggtctttagtgcc

SEQ ID NO: 8401 - DNA, 810 bp, Carica papaya
  Intron number 6 from transcript evm.model.supercontig_84.6 3 (locus evm.TU.supercontig_84.63) derived from phytozome v7.0 (chr-ID supercontig_84; pos 503815 to 504624)
tagatcttgtttgttctggactggaaaaagttgaggtttgcaattttacactactagcatcttgaaaacttatatcacaaattgctggttgagctgaaatgtatgagatgatattagctgtggttaatctgtaggacaccctaaccagcatagcacttgttttgctgacattttactttgtattagtagtgtaaggaacttagtctgtgctatttttgctttagcagccccaagtgtccccatcaaggtatatcgtttgtagatgacgaagatttggttttggtctggtcgacttatttggaattgaaaattaatcttatgacatggatgtggcctatgtagagtcacaccaatcacttgaaaaaggagtttagtattctttatctcctttttttttcaaggcttcctttaggaggattttctcctatacatccatttagttgtttggttttcattcataatttccttaattcttgttcttttgttttattcttagatttgcaaatattcacctttgtcttagtaaaacttctgcgaattttttcatactattgaccgttctctcttttgggacaaataatattcatttaacttaacagtgacttgaaaaataatataggatatcttgatgtggtcactataccgtgtcgcatttcctaccgacgatggacatccaaagaatgtcttttacttgtgaacaagggataaagaaactacccaatactattttcctgtctctattttgtcttgattgtataacaaggatctaattgattggttattgcaattactaggatcaggaggatattc

SEQ ID NO: 8402 - DNA, 1604 bp, Carica papaya
  Intron number 4 from transcript evm.model.supercontig_4.22 3 (locus evm.TU.supercontig_4.223) derived from phytozome v7.0 (chr-ID supercontig_4; pos 3862187 to 3863790 reverse strand)
atttgctgtttgctggtacacaggtattccaactggatagttcttatttttctttttaagtttgcgttcttgacatatttatcaaattgcatttttctttggggcttttggttcttccatcaatcccaaaaccgtgttttccagtggggacttgggaatttttttttttaaattttaaatggaatatggcattaattttttgtgggacatgataatattgatcttcaatgtaagcttcagaatgaatagtaagggactcttcttggattatataatacacaaaaggctagatttttaccttgtgcttgccatggattataattaattagaaattgattttattagaattttaatttcaatttatctcaagaaaaaattggaattttaatttcaattaaattttcaattacatagttaaatgaaattttaagcagacagtgttaatcttattaggacttttagttaaacaatgttagtttcagtagacatttagctgagttttttattcaatatagtttttaattggactgttagtaaaaaattttataaaaagtttaactttattgaaaatttttaaattaaaaattagtagaatcatgtaataaatgtttaattacacaattggtataattgtgtggcagaaattttcactccattaatacaattgcaacatgtcagttttaatctcagttgcattttgaattaggcaattattaaaatttttagttatgtcagatttaatttcaatataattattaatttaaatagttaggtaaattttttaatgtaggaaaatatttttaattacagttagtagaatgtttaatcaggaagacgttagaatttctaattagacaatcctctctgattgttactttgataacatacatatattttctaaagaattaccttcttgaattagtatttaactatcaaatcataaataattgaaaaggtgtagtgtaaagtttccattaatcctcaatgccaaatcaaatactgatgttgaaatactgatgttaggaccactaatcgttggtggtttacttcctattatttaggtataagataaatttaattgttatttagatctgttaaataaggagtttttagtttggaagatattttggtttccagccagacgacatatttgattacgacttaaatgcatgcgctaagtaagcagcttttattggaacatgtttgatttccaaattttcaaatatatttaggatttgaatttatttatatatttcaaaattcatttgttttccaataaaaaaattattttagctaaccagttaatacaattgctacacatgctgatacttaaataatagtatatatgtataacatagatttagtttgtgctgtatgaatctcccatagtagaagtttgctcctgccattttatttctctgactcgtatctgtgggcatgtctgtatcaagtgttaatatatataggttttttaactaattgtaaattcattagtgtaattaaattacacctccttggtgccatcttatatatatatatatatattcttgtattttccttcgcaaaagaaaatgttgatatttattctgatctggttttgtagg

SEQ ID NO: 8403 - DNA, 9814 bp, Carica papaya
  Intron number 2 from transcript evm.model.supercontig_41.4 6 (locus evm.TU.supercontig_41.46) derived from phytozome v7.0 (chr-ID supercontig_41; pos 1090298 to 1100111)
aaacttacttggattgggaaaagaagattgaactagtatgtgtgtaatacccggacccaaaatttggcccgagattaatcttaaaaaaataaaaataaaaataaaaataaatatatataaatataatttttatacttataaatttttatttaatataaaaattagaaaaaaaataggagaagaatgaaattgaaaataattttgggaaaaagaggtgaaaatttggattcggggatatttttgaaaaaaaaaacagaaactatgggtcaaaacgtaatataaaaaaatgtgccatgtaggactgcccagtcagtagcctcgatgaacgagagcacgtcgtgtggcaagacacgctgattcagtgccatacgggaggtcacactggcaatccgcgtgccagcaatcggacgatccagatttgttcccgtgtgcgtggacggttcggatccgttccctccttaagcgtggttggatggtcgtgattaaacgtgatgaatggtccagattcgttccctctttaaacatgattgtactgttcagatcaaatcacgatgaaaggtccagattcatttcatctttaaacgtgatcggacggtcgagatcaaacgcgatgaatgatccagattaaagagagacaggtataaatatctcatttcacactgaaccctaatcctagctgctagccccccgctggagaagaagaaccagttgacagacaagggatccgacgccgcccgccaccgtgccagagccagctccaaccaccaaaaaaggtaaaagttttctcattcgctcgaaatttaattttgaacacccttatggctaaatctgagcaaaaggactaacgaatgatactaaaaccatgggtaaagcctggcaacaccgccgcgaaaaaatcaaaaatagccccgatgagtcccttctcgattatcatttcatgtgattttttgtacattatattcaccatcctgttttctaaaggttgatcaaagaaaaatacccaaccgtgaagttgagctgatggagttgccgcaccgaaaaaatcatgtcgtcagtaagtttttattttttgactttttcggccaaccgaaaccccttaacatgttttctcgcagagatgagtataaaactggtcgaaattggctaaaattggccaaaaatggctagtctgagacaaattgccgcagcaggtggtaatgccatcgccagagcacggctgtgccgtcgtgccggaattctgaaatcagccaaaaaatatttttaataccaattttggatttttgcaatatttctaggtacttgaaacatgttttaatctccaaagaaaaattcagggaacctcggtactgccagtaggcgtagctgaaagtttagtatttcgtacaccaattcggacaagaattcctcactttattttctattatagaattgaagtctaattataaataatacagaattttgcataatctagaaaacttcgatatttaattacatgttactaatgaagctggaacctgttatttatcactattcgtcctgttttaactgattgtttgattttataattttaaatgtatgataatatactgaaattggtaagatgatttagttttgtttccttgatgcatgtattatttgtcttgcatgatttacagttgaactgtgaaactggaaattaaatgcaaacggaaaatttggtcaagtgaatgaatgaaacgattgtcttactgaatatcctgggagatactggacggaccgggtatatagaaaactctaccgtgaacattcccttatactggatggggtatcgaggaaagatatttttggctctcataccggacggggtatggggatagcctaattcacccttataccggacggggtatttagggatggtacttttggcgctcataccaaacggggatgaggatggccagttagttgataagttttgttataggttcacgcgtagtgggacatccctatagaccctcaaggataccaataagcaaataaaaggagagagttgttgttctggctaattgaatatgagattatgatatttttatgttattgcctctataggttggttttttgaaatctcgctacagtaggtatgcaataaataatttaatttatgataaatgaatttacttaaattaagagctccattagttatttttataatttttaccaactttcatttttatattggtgaatagtatgacattcttactgggctagtgtagctcacttttttattaaacatttcagatcaagagaaccaagatccagatctcgatccacaagagagttgcgaataggatgcccagttgtttactttccatttatttctttgatttttcgtttgttcttttagaatggtcattcttgtagctctattgggtattctaaattattgtgtatggaatgtaaaccctaactttattattttacttctgcattcaatttatgattttattttcttttaggttccgagtcgttacagttggtatcagagtcgtgttcctcggaaccattccttacacaaaaaccttggaaaatacaaaaaaaatgaatcatcactcaaccattccttgtgaatgcaggtacagatagatgaggagagaaagacccccactaaaccgagcaatctgggagggtttgtttcgagaagatgttgaccgactatttaaaatgatggagagactaattgctgtccagtaggcccgggaggaaaggaggaagctacctaaccctcccccgctgccacaggttgagccaccccagtacggccctgctcctccacagtactatctggcaccaccacaatatggtccagtgccccaactacatcatccagcaccaccatagtatagcccggtgccctaactgcataacctgacaccaccaccgtatcatccagtatcaccacagggccatccagtccatccccagcacaatccagtccctcttccatgggactcaattcctcccatgatggacctaagctacattaagaggtataaaagattaaatccatctagttttataagggtatcctcttttgaaaaggccgagtactggttagctgaaacagaaaaggtgttcacaactcttggggtgattttcgaacagagagtcatacttgtcacctacatgctggtagaagaggcaggccgttagtggcaactcaagcaggccaccctgcccgttccagtcacttgggaataattcttgatggccttcaatgcagagtacctcctagtgcatctatgacatctaaaggaaattgagcttgcaaacctagtctacgatgatatgactatattagaatatgctcaaaagttcctagagttgggtcgatattcctctgagagcatgatggatgaaggcagaaaggcaaggacgttcgagtgaggtttccatcctgatattagacagcagctgtatgtgttcgaactctgtacttattcgaccattttggccaaaacacagctagtggagtggaacctttgcatttttcctccagttgtaaggaaccttaggccctcggtttaacaccacagactagcacctactgcacctgtttagcagaataagagacctaggccaatgactcaggcttctcctcatattccaacaataggacgcgataggacttgccaacattgtagcaaggatcatggggaccgaccctactattggctaaaaaatacttgccgtatatgtgggagtgcctagcattatgcgagagagtgcccgagaaatcagaaataggccagacctcctatccaggatagggtttataaccttactcaacaagatacagaacccaacctagacgtgatacggggtacgtacactatctataatcatcttccacatattttgattgatactggtgcctcacatttatttgtttcacatgcttttacatcaaacttgaatgtattacctgaaagacttgattctttatcgtttgtgcctactcctaggagtaagacactactacgggaagttatatacagagcatgtatcatagatataagcattaaaaaattaagtgtggacttaatagagattgacacggggactttgatgtaatcctaagaatgaactagctagcggctcatcacgccaccatagattattttctttagaaacttgtattcaaccatcctaatgaagagtcaattacaaattaataaaaaaatttaaacattattccctcatgtcaattttttctattattaagtgttttaactcggctattttctctaactaggcaaacctaagaaagaaatttgtattcgagagatttaatcgtccgagacttctcagatgtgttccaagatgaaatacccaaactactaatggatagagaagttgaattcaccatagatcttcaaccagacacccagcctatttcggttgtcctttactgcctgagtcgtgttgagatggaggagttgaggaaacagatcaataaattacaggataatggattcatccgacatagtgtgtccccttgaggtgccggagtcacatttgcaaggaagagggatgagatattaaagttatggattgactatagaagactgaacagggtcacgatcaggaataaatatcccttccctaggatagatgattttttgatcagttgcaagatgcccagctcttctccaaaatagacttgcattcagattaccattagataaagatcaaggcagaagacattcccaaaataactttttgaatcaggtacggacattatgagttcctggtcatgtcatttggactaacaaacgtaccagctatcttcatggatttgatgaacagggttttcagataattcctgtatcagttcgtcattgtatttattgatgatatcctagtctattcaaaaagcagagcgtaacacactcactatttgactcaagttttacaggttttcaaagaaaagaagttgtatgcaaagttgagtaagtataggttctggttcgagtagactaccttcctatggcacatcatattaagagatggaatgtcaatgaactccgaaaaaattgaggcagtgcttagctggaaaaaattaacctcagttaagataattcgtagttttatggagatgacaggtttttaccgcaggtttgtggaataattttctagcctaactgctcctttgactcggctcacaaagaagcatgtcaagtttgaatggaacgagaactatgaaatgagtttttaagaactaaagaagtggttgactactgcacctgtgttggccttatcgagcaggactgatagatatatagtttataatgatgcctcctacctggggttgggttgtgttttgatgcagcatgagaaggttatagcctatgggttcagacagttgaagagttataagaaaaactaccccacccattatttagaacttgctgcgattatccacgccttgaagacttgacgccattacttgtatggggagacttttcagatctataccgatcataagagcttgaaacacatattcactcaaaaagatctcaacatgcgtcaaagaagatggatagaactcctcaatgactatgattgcaatattttgtatcacccgggtaagggcaacgtggtagccgacgcactcagtagaaaaagtgcaggtatattagctcacctaatagtttcataatgaaggataataggggccacacaacaggtacgacttcaggacctgaagaaggttacatgcttaacccacttgactgttcaacctgagttgatccagagaataaaggaagctcaatctgccgattccaccctagcagccctcaagaaagatgcagaatagggagtgaattcagaatttcaagtctctactgatgggttgcttagatttaaggacatgatgtgtgttccatgtgacaatgagctcaaagggatatcatgactgaggcccataactcaaagtttgtcatgcatccaagaagtactaagatatatcaaagtatgcgacctcgattttggtggaatggaatgaaaagagatatggtcgactttgtttccaagtgtttagtatgtcagcaagtcaaggtagagcatcaatgcccagacggccaacttcagccattactaattctggaatggaaatgggaacacatcataattgatttcatgacaggattgcctagggcacgcttgggacatgatgccatttgggtaatcgttgaccggttcaccgagtcttcccacttcttggccatcaagatgaccgactccttggacaagctagcaagaatgtatatccggaagatagttaggttacatggagtgttagtgacagtagtgtccgataaggatagtaaggttatatggagtgtcagtgactgtagtgtccgacaggaaccccaggttcacttctgagttctggactagttttcaacaagccatgggaatgaaactttcccttagtaccgcattccaccttcagactgacggacaagcagaaaagatgatccgcacactggaggatatgctctgagcttgtgttcttgacttcaagagccattgggatgatcatttacccttaatagagttcgcctacaataacagctaccaaacaagtattcacatgctccgtacgaagcattatatggccgcccatgtagatcgttgatttgttggaaagaggtgggtgatataaaattgttcgatccagatcttgtggagaagactacagccaaaatagttaagatcagaaagaatatccaaacagctcagagtaggcaaaagagttatgcggatccccagaggaaggatttagaatttgataaaggtgatcgagtgttccttaaggtcactcatttcaagggaatcagtaagtttgaaaagagggaaaaactaaatccccattttattgggtcatttgaaatattagatagaattatactgctacctacagattgacactgtctccagaactattcagggtccataatatgtttcatatgtccatactacacaagtacaacccggaccactctcacatcttggcccacgaggccttttcactatatgaggatctgttcaacgaggagatactggtgggtattctggaccataagagcagagtactccacaactgagaaattcctttcgataattctatgaaagaatcatacacagagagaggccacatgggagctagaatcagacttcagagcccaatatcccaaactatttgattaaatgagagagagacaaatttgaaggaccaaatttcttttaaggaatagagagttgtaatacccagacccgaaatttagtccgggattaattttaaaaaaataaaaataaaaataaaaatatataaatataatttttatgcttataaatttttatttaatgtaaaaattaaaaaaaattaggtggaggatgaaattgaaaataattttagaaaaaaagggtgaagatatggattcggagggtatttttgaaagaaaaatcagaaactagagggtcaaaatataattaaagaaaaatgtaccacataggatcgtccagtcagtagccccgacgaactggagcgcgctgcatggcaaggcacactgactcggtgccacataggaggccatgttggcaatctgcatgtccgcgatcgaacggtctgaatttattcacacgtgcgtgggcagtccagatccattccctcctcaggcacgatcgaacgatcgcgattaaatgcaatgaacggtcaagatttgttctctctttaaatgcgattgtacgatctagatcaaattacgatgaacggtccatattcattttttctttaaacgcgatcagacggttgagatcaaatgcgatgaacggtctagactaaagagagatgaatataaatatctcaattcacaccgaaccctaaccctagccgccaaccccccactagagaagaagaaccaatcactggaaaatggagccgaccaccgtttgccgccgcgccggagccacctccaaccaccaagaaaggtaaacatttttccattcgctcgaaatttaatttcaaacactcctattgccaaatcggactaaaaggaccagcagatgagtcagaaattgctggtaaaatctggtggtagcaccgcgggaaaaaccaaaaactgcccccgatgagccccttcccgattctcatttcatgtgatttttctaccattgtattcaccattctattttctacatgttgtccgaagaaaaatgccgaaccgcgaaggtaagccggcggagccgctgcaccgaaaaatttcaccacaagtaagtttttgttttctgattttttcggtcaagtgaggttacttaacgtgttttcttgcacagatgagtataaaactggctgaaatcggccaaaactagcaaaaaatgcttagttcaaggcaaactgccgccagagcacggcggtgccaccgtgccggaattccaaaattgactgaaaaagttttttaacatcgattttggagttttaagatatttttgggtgcttgaagcgtgttttaatctccaaaggaaaatttagggaactcaggatcgtcattaggcgcagctgaaagtttagtgtttcagaaaccgattcaggtaagaatccctcaccttacttcctattatggaattaaagtctaattataaataatacaaaattttacgtaatttagaaattttcaataattaattacaagttactaatggagctagaacccgttatttatcactgttcatcatgttttaactgattgtttgattttacagttttaaatgcatgataatacactgaaattggtaagatgattcagttgtatttccttgatgcatgtaccgtttgtcttgtgtgatttacaattgaattgtgaaattgaaaattaaatataaacggaaaattttttggtcaagtgaatgaacaaaacagttgtcttattggatatcctgtgagatagtggatagatcaggtacatagggaaccctaccgtgaacgttacctcataccggaaggtatatcgaagaaatatatttttggcactcataccagatagggtatggggacggcctgattcaccctcatactggacggggtattgagggattgtacttttggtgctcatactagacggggtgtggggacggctggttagttgataagttatgttatgggttcatgcgtaatgggacatccctatggacctccagggataccagtaagcaaataaaaatgagaaagttgttgttctggctaattgaatatgagattatgttatttttgtgttattatctctataggttagtttttgaaaatcttgccatggtaagtatgcaataaatgattttctttatgatacatgaatttacttaaattaagagctccattagttatttttataatttttaccaaccttcatttctgtatcggtgagtagtgtgacattcttactgggatagtataactcacgcttttattaaatatttcagatcaagaggattaaaatccagatctcgatccataagagggttgcaaataggatgcctagttgtttactttctatttatttctttgattttttatttgttcctttagaagggtcattcccatagccctattggttattctaaattattgtgtgaggaatataaaccctaactttattatttcactttcacattcaatttatgattatatttccttttaagttctaggtcattacaatttgattgcaataactacattaaatccaagaaactataacttgtcgttgttgttttgaagatt

SEQ ID NO: 8404 - DNA, 5344 bp, Carica papaya
  Intron number 2 from transcript evm.model.supercontig_167. 2 (locus evm.TU.supercontig_167.2) derived from phytozome v7.0 (chr-ID supercontig_167; pos 111373 to 116716)
ttttgagaattaaaagcaagagattgttggaagaggtactgcagatttgtgaattctaatctacttttttctctcttccatgggattgtgaactattagaatcaatttttgatttttttgagttccataatgcatatggcaactatagccatgaggtctgttgtgatagcaattgactgttgtattgtttgtctggagggaacttatacatttttattatataaagctgggctggtgttttaaatagcatgacttatggttctatttttagttttatctgtactagaaaaaatttatcgtgtaaaattatcaaaaaacatatagaaattaaaatataaagctagttttgtttcagagaataataatatattatgtaataaggcaataattcgctccatttaatttgagtagacacattcagaaaaaaaagttgagtggagaagtcgtgtagttgctacttaagttagtagaaggatgcgtcttctcctttctctctaacttcttttcaccaccatcttcatcaccctttcttcttattcatttcttttcaccaacatcatcttcatcactcttccatcttatttgttaatattcaagtactctagtcactagactatgtagaatgattcaatatgaacacaaatctattaggactcactgacttgagtgtctaacaaccttgcaattgtggttgtgagaaccctatgattgtggttgttataaatccatgtagttatggattaaatttagctcttctttttctatctttctagcctcctttgctatcttaagttaattcgttattagagcttggttcgatgcaggaacatgaaggttactaggcctccgtgcttttgctgatgtctaaaactgatgaaaaataaaaatattttagaatggacatacctcagtagtatggggtatttactttttctgaaaggaaaaaagaacacaattacaaagcaccaaggtggtgtgacccatttgcaaatatctactcatctttctatgagaaaagatctagatatcaacaaactcacactcatcgcagatgggatgacccaaaaaccaaatatttggagttctaaaccaatgattgtgacctatgagtgaaaggggttgtaaggtttctaaaagttctattgcaaatgattcagataatagtgtcacgaatgatggacataaactttcttcctagattttgcatttgtgatacccttccaatcacaaatctcatcctttatgaagccactagcaacctaacttgaattaaggagactaagaatagaatgttgagccttctggttttaggagaccaaagcataaggtggcttggtgattcaacatcatcttgacatagaaagcaacattctttactaagttgggctattgaagagaccccataaatgcattggtgggggagaatgatgggttacataggctttaattaataaaaaaaactcgagtcggggtgtttgattcaactgacaattttcttctccctgttttgtttgacgtattaatttattgcacaaacaagcatatttaaccttttttttttttaaataaacatatttaacttttattagttgtgtgctagtaataaaatccactgcttgcacctcctggttaaaagaggaagagaaaatcttgctgacaattgcatcttttcatctagcaagtgaaacacaacgggaaactggtaaaggaggagactcaacttttgtgagtcgtggtctcgtggatagggtgatatcttctccattttccacgggggacaatcatgaggaacaattggaatatttagacttgcagtttcgcttcactgtagttggtgatattatggttttattagttttagtctttaattctgggtgattatggggaaattgaccgatttttttgttgacgccaagtcctctggaaattttagaggagatattagtcccagaagtttggtcattttggaattctctatttgtaaggatatttaattcgtttggataaggagtgctatggttgaaaaaacttctttctcttttgcttagacaacaatgtcaaatctttccactagttattagatagccgaataggtattttctggttgagagtaatcaagaattcttgggttgttttctcgctttgttaagatgtaatggatgacggaggagaaacgccatgtttgttctagaagatagggtggggatcggttgaaggagtttgaaaataccactggttgaggtatctgcttcgagaaagaaacaacaacttctgaggagagtaacggaaatattgggaagaaagaagagtcggtagcgggcaatgattctcgaaaattgatggaagctttcattgaggagcagcttatttccttaacttttgaaaactcaagttcaattttcaaaacctttggtatcaagtgagaaataaagtgtgggtaaagaggagggttttctatataaagcaattaaggaagatattcaattatttgacaatcatttgcttttaattgccgttgacttccgagagtttagaaggatccaattgtagcagaaaattcgtaaggatatagcggatatagagtttcatttttgaaacttttttctagactggcccagctggtgaccagaaggttttgtcgtcatgcatcgagaagcccacagaatggaacccatatctttcccagcctatgtaactcaatcattttcttttaattgcaccgatgtccaaggggttagaagcattcattgctagtggaatgttcttaaaaatgtagaggggcacagacaaaatttctgttttcaatagaaagtttccttttttgaattttttctagattgggccggggcccagttagtgaccagaagggctgatttcatgcgttgggaagcccacagaatgagacccatatctttccaagctatgcaggttcagtggatggaaaaaatttattaaatttaacctattctggagtactagtagcccaaacagcttcaaatcagaaatccacactgtgttgaattgttatctccaaagaaggtaacaagactcatgatgtgacttagaagctctctaactggtgaggctaaagatttattatcgagtattcttagagaagaagaagttttggagggtgaagagacatcatttaagtttgcaggcagttcttcagtttggtcaagcttatgcttccatgaatttccacaaatccatcactctaggaactgttttggaggaagagtacggtgactcagttcctagtgctacatcttttgatgtggaggaagatattgatgggtacctttttttgggaagattcttggaggaagaaatgggtattgaagacccttttcaagctagtaacaattaagatatggaggcaaagacaaattttaaggctggagggactgaatatgctatttgatgctcaaattcctggttatgggtatgtcccttggtttcttgaagcttccaacacttttctcctgtgtaccttggtttcttgtagaaggtagctgaatatgccgtggtcttactgtgatttggttactttcctagttgacgtggtttggagtctttagttatcatttcagagcccttagtggtgcgagattcaagtataatccctcttctactttcacctgcagtaagcatatcacttcttcagggatgacatctcttccttcccaggatgtaaactctcacctgatcatattcttcactgagtcctgccataaattggtacagtctatctttctcaacaagtcttttcaagactgctacatctttactactttccatattgattctagaatattggttaagttcttgccataatgttggcatagatgtctaggctttgaaagtcaaatcacatatctaagttgcatgtttttcctaagaataggtttctcggattgagtcccaaatctcctttgctgtaggtagatatacaactgttgccattgaattccaaagtcaagccatattcatcatttttcctcgtctcaaacatcaaaagtgagatttcttgactttggtccagtgccaaagatatgacttagctctctcctgcccttgaagggcggtccgaatcagttgcaatcaactcaagtaatctatgccattgaaatagtaagcagcctgattagttggaattcgatgttgttctgtgctagagtttcccattggaaagtttgtttcggtagattgcggcgtaacttccgatatctttcaaaggaatgcttaggcaattaacgccaataaaaaaaaatacagttgggcggggatcacggctggcaagtggtgtgcagaggaatggaatggttggtttgcaggagtggcctgcggctttggattgaggctgcaggagagagggagggctgggcaattgagatgcagctggtggctggcttggcctggcagaagctgtggagatgcaggttgcttttgttgctggttttggtggcttttctgggtataggcacgcggttctggtgctggcactcctttagctgcttctggctgcgcagcttggaggacagggccggctatgaaggctggattgtagtggcaggaggctgattaatggttgcaggcggctcgactgtggtggccgtctatgaaggctatcccctctaaggttttcttatttcgacgatgaaggtcgtacaaggtttgtaaaaaggtttatggttttttataatctagatttttgataccatgtagagaatgaagtatgaattttcttgaataatagtaccctatacaaacatgtttatatgaacaataaaagaaaacactcttaattatatgagatgggtatattactgataaaccttttaccctacttattatacaagaacttttccaacactttctttgttggaatatgagtgatgtggccggagcgagatgctgaacttttagagatcgtttcgccaaattttttattctctgagataaattctgttttggcttcctttgggccaaggttcatgggcatcttaaggagttatctttgttcattttggcagacattagcttgctatgctttgtcaagagtaaatggtcttctccttttttcttgttttttatatgggaggatatttgatcccccatcttcttgtaatcctatttctcttattaataatatttctttttccataaaaagaattactcaacaaattctggttaccgatagataatatggcttgcttattatattctgtgtgttctctcttatggtccaagaaatgaaaattttttctcaatacataataatagtatgatattctcaaaagtgattagctttatgcagcggcggtgttgtttggaggattgg

SEQ ID NO: 8405 - DNA, 1999 bp, Carica papaya
  Intron number 1 from transcript evm.model.supercontig_20.9 (locus evm.TU.supercontig_20.9) derived from phytozome v7 .0 (chr-ID supercontig_20; pos 52559 to 54557)
acgagatcgtggaggtaaggatttggttgaatggaatttcgtacaccgtatcatgtttcttcttttttggtcgaatatgttaagcctagaactaactttttagggttaaggcttagagcgtttacgttgtgcttttaaattgataagatgttgatagccgtctacaaactcaagttccttacggtagtttccggagttcttctgtgaggttgctgctctgattgttgttacatttgtcttgcaaggtttggtttccggtacctggaaaatgctaaagtatttggacataattgagatttacaaggagctctttggtgtaggctttatgcttgcaattttaatagaacatgtcacaatttatctttggcaaataattccaagtggtcgtggtctcagttgttttttctttgaatttgattgcaatggcatggattaaattctgaagtacttaaccttctttttcgttccctctctttttcagcggggagggtacttttgctgcttgagattttcaggactcagcattgagaaggttttagttgttgctggtattcttaaacgtcaaactcaaatgtgagcttagaaaagcatttactataagtttgttaggagctttgctgattaggatgcttctgattttggcacctttaagttcgtgccaccgtatctccaaacttgtatttgtgattaagtccaaaaatttattttctaaaatctttaattcatggaatgcattagttcctttctgtactttgatagcatttcgttttcttcttctgcttacactcttttttctcattggaaaattgtaacttttatagaaattgcataagaaacctcagtttctttcttgttaactttcagagtatgttttcggatggattcttgcacttgatttatgttggccttgtatttttttttgaaataaaaagtataaagtgcagtattcataaggtacctaaagggtaccactcatttgcaaaaaatttacaactttattaatatatctatgacattcccaaaatcctgcaccctataaatgccatgccccaaaatcaaggatccaaaaaattgaaaccatctatccttgatcttagatatctcattctcaatacctgaaaagccttgttgttcctttctttctataacactcaaaaaatagtaggtggaataagctttacacattacatttttttacataacccttcccaagcccaaatctcttcccctactgagcccgcaataacctaaaaaaatgttggcgttactctgtaatattctgctctttaataatcttcttacatatttaaacaagggaaggtattgtctggcatactctgcatttgataggtgatttttctcctactacttttgaactgctaaatggtagattaaagaatttatggattagtaattattgtctttccctctatattatacatttcgcacaaaatgtggattagagaattagtagtcaaggattttgagctgcctggtgagatggcttaatgcatgataatctttttcgtatatcgggtatttggttgatactggggctcagtcttttctgagaacacctccatcttcaataatgaattactaccttcatctctggtgggcaccctccatagaagggcaatggaaactaaggatagtaggattttcaagcctcaaatgtttcactaacaacatgaaaaggaaggtggatccctcgtcttggtgcattcaaggacttttaggtttcagggtatgagaccaacatctccaatagggaaagaaggaaatgatagtggaggtttttcaggtttttactgctgaagtggatttcaaaaatctaacaagttagaagtgggagctttcaatgtggctaattgttcgcaacttagaaaaagttattttcgtttcttataagttattcattatatgcagcttgcagcttgcagcttggaaaagttatttttcttcttataaattattcattaatgccagcttgaaggtg

SEQ ID NO: 8406 - DNA, 2145 bp, Carica papaya
  Intron number 1 from transcript evm.model.supercontig_74.7 3 (locus evm.TU.supercontig_74.73) derived from phytozome v7.0 (chr-ID supercontig_74; pos 782668 to 784812 reverse strand)
gtctgcggagcttcttctggagagattatatactggtaagtgtaaatatataatcgataaatggacattttacgctcatatgattattcattggttctttatatgtctttgccctggtctgacatgtttgaggtttcctgagttcttttgagtttgttatgtgggtattttgattattttgaggagaccattgattatgaaattagttccagtgatatataattcttcatgtttttgggaaaaagaaaagttaaaacttgtgaaaggaaaattcttagaactgagaggtggaagataaggcaagtgaattggtttgactttgaacttaacccgacaattcctcgtgctaagtaaggttgattttgatatgtgaactaccaagcctgtaacccataatgtcaaaaaggtgtttgatgaaaggctctctcaaaaagagatggtgctttagtgtttaatgtttataatagtatctgattttttttttcaaaaagatgcttttattataattagctttatttggagtttcatttatagcaaattatcccacaatccaggtgtggtgaatgccactttcacttaattaacatccaaaccgtaaaacagaatatggtatacagagtgaagcaagtaaccttattgatgcagcaaagttctagtatagaaaagggatatgtgtagtgagttttaggtctcaagaatatttgtacggttgtatttctttagcttctttgctctgctcctatgttggtcaagcgaaagacctaatcacttcaagctaccatttgtttttggaatggaaaatattagttaatattgtacaagttgagtccaaacaaaccgaaaactttagcttggcttactcctttcatttggcaactcgtatgctcaaggtgacctgtggcgctgccagtacagatcttctgatctgataagagttggaaattgttttctaaccgtgtcaaacaactttttgaaatcattaaacttttctcttgacaccacattatttccacattgaacaacaattaaatcacttacctaccaaccacttggatgtatatttcatgatcgtgaatccgggctaaccaaccaagcatgaagttgtcacttgctaagtatacactaaagaatgatgagtattctttgccctgtttagggaaaatgtggaaccatttacctttttattccttattgttttacatgtctcaaattaccaattaaactcctgttaattaattaccttcgaagctcctatagttaataaatctagattacattatcacacagcatccaattcagttgttggcttaggttttctgagaagcctgattagtccgttttatcatagtagcagccttctatacccttgaagattaggtggttacatgatgacatctgcataaaatttaaaggctgttttcttccagcatgaaacaaaaaattttagtcatttcttccagcattagacttgaacttgtaactttgatgttggaagagtaatcagaaatggcctgcagtattcttaaaacaaggaagcaaatcatttttcatgggtaaaacccacattatcttggaagataattgaacataattttgtattatgattaggctatgtttgcaaccaatgaactatgttttctggaatttatttgaaaatgtgtactcagttcaagttcgagagaatgaagattcatgcatgaacaaatatcaagtagaagaactgaaatacattttgaattctatagagttgaatttctattctcgcagccttgaatttcaatctctcattctttaactaagaatacgtttttaaatgaattcgacaaaagtaattcatttgttccaaaaatacccttagatgttcagtctcacttgtcagacttctgtttgaagttgaagcttatcatttggatcaacgtcctgcttccacacattgaagctcatgtccacatgctgacaaccataagaaagcatttcgatttaatcctgacctgtgtgattagcatagcatcacgcattgttatgtaaatggttatctatatgaaagtaggtcttcactaaatctttcttgtagagtttccattggattttgctttatgagaagaaagtttttctatcccaggaaccgctctgctgaaaatctat

SEQ ID NO: 8407 - DNA, 2284 bp, Carica papaya
  Intron number 9 from transcript evm.model.supercontig_765. 1 (locus evm.TU.supercontig_765.1) derived from phytozome v7.0 (chr-ID supercontig_765; pos 3222 to 5505)
ctgctgcaattgaggcagcagcattttctcagcaggtatgttagtcggtaaaatctcaattttattcatggtaacttctctttttgttttatgtgtccctaaattgatgcctaagatgtcaggacaagtagagtttgaaaccaacttgttcagggatagtttgtatattagagagatagagggcagaacacaaataggtgtaaatcatagaccagagcaaattaagtatcaaaggtgaagaattacaagggagaaatagacagaacgaatagactagacaaaactattactagaggaaagaacaaagagaataacaggaattagaacctagcattgataattcatcatttctattgttgatagttaatggccccctttatattagcactagttacaagtaataaggatcttatctacaatcaaataagataaataaggatctttcgaagacaacttgaatgaatccaacgtttgcaatatttcctgtggggttgcctttggaaaaccttacagcttggactcttctaagccaggagaagccctaactgaagattttaaccgtttcttgtattcttgcagagtaccctaataattcttccatcttctgcatataggttgaatgtgtatcaatccttctccaacaacaattaacataagacagcaaccatttagagaatgattagcacatatcacatccttaagacgttattgatccgagctaatcatggtagtatctctataccctctgtgcatccataaggaccacaaatatgttacagaaaatcatatgtaattcagtaataaattataaattgtaatcaaaagttcattggattctatgccaaagatatcgactgtaaacataatgtctctaaaaatgaatatagaatgcaaatatcgccaaactgacctcaaaaaacaagaacatcctagaaaaccatatgaatggtgacagtcagtcatgaagggcttgaattggtttctactaactagtctggtaatatttcaataaaaaaacaactaactagtctggtcaaatatgagaaaattggtcaaacagaatagtcccacttgcaggtcaatgatatgaggttcatgcgctgggctctggtcactgctagaattggtggtggttgtattcggaggtctagcaaggcagtgatggttcatgtttggcatcgagtattgtgttttcttgagaaattaatggttgaaacttggtgggaacgttggccgagggtctcaaaacgtgatggcagtggcagttttaagccacctcatagcagtggccggtagtcgagtgtagcagatggtcttggcatgtgtggatcttttgtcctttcttgattttatctttttcagacctttttttccgcatttgaaggatatgatattctttttttttttttggttttttaaggaaacagttttggcaaggaaggtgagcacagaagttaggctttgataccaactgatatgggaaagtattctgaaaaaattttagaaagtagagggatagacgtggggaaatagtagaataggaaagaatggaggaaaatggattcagagatgatgaaatagaagagagaaatgaacagaacgaggtaggataaatgaaaaataactagaatatatagcaaaggaggtgatagaaaataaaatctgaaacacaagaacttcttagttcattatcatctatcctcttctctattctctactgttaatatttagtggcattttatgggcacttattctgaatgataaggaaatactgcagtcataaaaagttaatatttcaaattcctagtaattcttaaaatctacctaaggaagctaagtacattgaagatactaaatgacacatgaaccatggaaggaattttttggaagacaaaaagaattgtcgctcaaggcaccaagggttccgtacatgtttagtaaggatttacagagtagattcagtcaaaatacttgaagttttccttatccttcttcatcatggagaggatgattcttgaacaaaatctaggtttagaacaaataatatttaacttgtcgaaaggagaggaaaatatcctaacaaggcttctaaaagagcccttagtagttcttattctttttccttcttataatactcactgaattgctgaaggaaggtatttctgtcttttagcttctgcaaattctaatgattctctatcaatctctattggaatttttcatcccaagaatgaattggtgttaaatgctaatcagaaccttatgcctttaatttgccctcagt

SEQ ID NO: 8408 - DNA, 788 bp, Carica papaya
  Intron number 4 from transcript evm.model.supercontig_142. 57 (locus evm.TU.supercontig_142.57) derived from phytozom e v7.0 (chr-ID supercontig_142; pos 702859 to 703646)
gggtaataagaatcaattatttcaaaaaacatactgtttatgcttgatttgaagtcctgtttttgttttatttatctcaaattggggtaagttctgtgtgggagagactgatatatttctataatcatgaattttgtagtgaattggtgatatgcaagtagactgagtttatggggattaacagttgtaagaattaaaaatacgtattcttcttcgatagataagttagagctataattttcaattgcttgattctttgcccagattttcagttttcagattctttccaaaacttattcaagttgcagaaaaagtatagattcttttgagttgggtcttcagatatttttgttggaaccttttcccagaaggatatgtaggtactgtggcagtgcacccatttattcttcgaaaacaaatcagcttttgtcctattaaaaaatgctaaagttgtctttgcagcttttttctgtaacaatgtgctttatcccggcagtatataaatcttgaggcttgagtgacgtgatgtataatattttctttttgttaaaaaaactatatccgtatttattgcaattagctatctgcatcacttgtggctactgtattgtgggaagtggaatatcctattcaaatcattgttactgatgtcttttggtcaatgacttggctatgatattgaggcctttgtactgtgtttgtttattctgaaattgacaatggtgctcacctaacataacttttgttaaccagttggatcaactactgggtgaaagtttatcagaggt

SEQ ID NO: 8409 - DNA, 743 bp, Carica papaya
  Intron number 8 from transcript evm.model.supercontig_1.19 5 (locus evm.TU.supercontig_1.195) derived from phytozome v7.0 (chr-ID supercontig_1; pos 2905504 to 2906246)
gttacaggataaggtatttttttttctgtatcttgcattactacaagtaaaattctatatgcattttcctttctcttttagtcttttactttttggcggttggaatgaagctgaatctgtatctattatgagcccattaaagtctacaaaaatatgaatgaagaccatcggagaaaaagcaatcaactacttcaggcataatcaacgccaaagaatttcttaaacttctagtgcaactgtgcaagtgttatgggaaattatctttggtccagtactatagttgatgtccgtctttgatggctttaaaactgaatcctgagcatggaaaacaatttggtaactggagtgtagccaaatatattgaatttggatatacataatgtacttgtagtgttgatctgtgcaaatttattatcttgtctctttgaagatttaggatacctttttatcaccaatagtaaatcctatggattgtggtatagttgacacttctaaataacgaaaatggtttcaagtagaaggctttacctctgcatcataattatctttatgtagattgtattaaaaaattctgatttaggatacctttttatcaccaatagtggattgtggtatagtttatacttctaaataaggaaaatggtttcaagtagaaggctttagctctgcatcataattatctttatgtagattgtattaaaaaattctgattgggtgctgttttcaggtatactcgattcgtg

SEQ ID NO: 8410 - DNA, 5455 bp, Carica papaya
  Intron number 2 from transcript evm.model.supercontig_284. 5 (locus evm.TU.supercontig_284.5) derived from phytozome v7.0 (chr-ID supercontig_284; pos 50470 to 55924 reverse s trand)
aagcaggcaaaggtttgtatttttagtttattaaaattggcaatgatgagcaatattattgatggattactttaaatatgatgatggaacttatgttgtttaatttctggaccatttagattttggtttttcaggccttattattatggaattatttttctgtattttttctttttttgtcttttacaatctggcaatataacaaaatagatactgtcagattatgctttttttcccttcaactaggaaagcttgttagcttttatctttttcttccttcctttatttataaaatgttgctgattatcgatgaatataaaaaaagaagaaggtgagaagaaaagagaagtttttccttattcttaagttcttcatggtatcagagcaagccttatccaaattctttagcatctctcttgctttcaataggcaatggatgaacaaagcccttctccgcccgaagttcttttgggctctcaccttttgatgcctgaccgtcatgctgtggttgatcaggctccatctttcgttactagccatcgactaaatggcagtaactatcttcattggtcgtcctcgatgttgatgttcattcgagggaaaagccgagatgaatatctcactggagaactctcacatcccatgaacgatccaaatgctcgaatatggaaagttgagaacaatcttattatgtcttggttggtgaactcaatgaccactgagattggcgaaaattttctcctttatgagactgcgcacaatatctaggtcgcaactcgtgagttctactccactcgcgacaacacttccgccatcttcgaaattgaagcaaaccttcatgacctgcgcaagaagaaaaaacaataactcaatattacaattttcttactcgaaaatggcagcaacttgatgtttctgaggaacatgcttggagctgcccaaagggatgccaggagattccgaagcatcgtgaaacagaaacgaatcttcaagtttcttttcgaactgaacaaaaacctcgacgaggtaagaggacgcatccttggaaccaaatctctcccgaacatcagagaggtgttctcggaggtgcgacgcgaagaaagcaggaagaaagtgatgatgggtgactcgcaactcaaccctaaccctgttgaaaacatatctctttcacccgagactggtactgtctcacaagtcgggtgactgagcgaaagggacggtcatggtgtgaatactgtaaaaagctgggacacgttcgtggaagatgctggaaacttcacgggaaattagctgagaaggaatcggctgagaagaagaaaacacgaaagcaggaaatggaggaaattcatcggggtaatttatctcaacagaggagggatccactgcagccgtttctactggaagccccttatttagtcctgaacaaatcagcctcttccaaaaattgttttcacccaatatagttctcagtaatgtttctacagtttacaaaggtaatttttctggtttctcaacttattccacaaaaaggggaatatggattattgactcaagtgcttccgatcatatgactggggatatctcattattcaagaaatataataagtgcagaaataaattttcagttaaaattgctgatggctctaactcccaggtcgaaggaacatgaataattgtactgacacgctagttaattttgtactttgtactgtatgttccaaatttggattgcaatcttctgtcagtaagtaaattattacaggaattgaattgtgtgactacatttaactctaaactgtgtgaatttcaggacttagattcggggaagacgattgacaatgctagtatggattcaggtctttatctactgcaagttgacaactcttctcttaataaacaaacttatcatgcagtatgtattaatcctaaatctgtaaacaacttaaatatggaatgccctatcatgttatgacattaccgtttaagatatcctaatttcgtgtacttgaaaaaactatttcctactttgtttcgaaatgaaaatccaacttcctttcaatgcgaagtatgtcagctatccaaacatattcaaaattcatttcccagttctgtttacaaacccacaaaacatttttcattaattcatagtgatgtatggggtccctctcgggtcactaatattatcgggacaaaatggtttgtatcttttattgatgatcacactagaattatctgactatttctcatgaaagaaaaatctgaaattggccagatttttaaaaaatttcacattatgattcaaaatcaattttacaccaacatgcaagaagtgaggtcagacaatgggtgtgaatactttggaaccactttgagccaatatttttctaaccatgacattatccatcaaagttcctgtgtcaatactgtacaacaaaatggcataactgaacggaaaaatagacacattcttgaagtagcccgatcaatcatgttcactacccatattccaaaatttctttggggagaggctgatctcaccgctgcatatttgataaaccgtatgccctcccgaactctctcatttcgaacaccctatgatatcctcctcaaggcatttctgcaatctcatattcttcataccattccctataaagtttttagttgttccgcctatgttcatattcatactcacctcaggggtaaacttgacccacgagtcattaaatgtgtttttttggatactcaccaagtaaaaaaggatacaaatatttctgtcccaaaactcgtcgtttttacaacactatggatgtcactttttttgaaaaccagtcctattccactattgatattcagggagaaaatcctaatcaagaatatcaagtatgggatataagtacaccacctctcattttttctcccctcactattcctgagtcctcatcaaatttctctgaaaccagtatcaaaaagtgtgaaactgaatccattcctactatcaacaaagagttacgtgtttatagtagaagacacaaaacttccgttaataaagattcggaaccaacaacacattatcatgagtctattccagttctaagcaataagaacacatcaggtaatgagttttcaggcacaatttctgatacggttaccactactgatcatgatactgagttacctattggtttgcggaaaggaactcgatcttgttctaaacactctatacaggattacatttcgttcgacaatttgtcctcaaagtatcatgcatatataagcaaacttgatggtagccccactaaacataaaactattcatgaagcccttgtattgccaatgtagagaggtgctattcaagaagagattagagctcttgaaaagaacaagacttgggaactgacagaacttccatcgggaaaacataaagttggatgtaaatgagtatttaccgtaaaacacaatcctgatggaagtgtgaatcgatacaaagctcgtctagtagctaaaggcttcactcagttctacgggatagattatcaggagacattcgccccagtggctaagcacaacactattaagatattactctctcttgcctctaatctcgattggcctctctgtcaacttgatataaagaatgcatttctcaatggagatttagaagaagaggtatatatggaagttcctccaggtcttgagaccacatataaaactcacaaggtatgcaaactcaaaaaggcactctatggtctaaaacaatctccgagagcttggtttgaaagatttaccaaagcagttaaacatatgggttatgaacaatgtcagtctgatcatactttatttgtcaagaacagtgtctctggtaaaaaaactatcctaattatttatgttgatgatattattttaacaggtgataacatagagaaaattaaaaaactcaaaattttcttgccaacggagtgtgatataaaagatcttggagcactcaggtattttctgtgaatggaatttgctcgttctaaaaagaggatatctgtgtcacaaatgaaatatgttcttgacctattaaaagaaacagggatgctcgagtgtaaactagcagaaactctcatggaaacaactacaaaagttggatttaaaaggggcaagctggttgataaagaaaaatatcagagacttgtgggtaaacttatatatcttgctcatactagacctgacatcaattttgctgtaagtactgcaagtcaattcatgaatcaacctactgatattcatatgaatatgatatatcggatcttaagatatcttaagaaaacttcaggaaaagaactatttttccaaaaaacaatgaacaggaatattgaaatctacacagatgctgattgggcgggttctataactgatagaagatctatgtctgggtattgtacttacgtttggggaaacttagtcacttggcgaaataagaaacaatctgttgtgtcacgaagtagcgcagaagctaaatttcggtcacttgctcaaggaatatgtgagagaatttggttaaaaagagttctaatggaaatgaaattcttgattactactccaatgaaagtatggtacaacaataaagcaacaatcaacatatctaaaaatccagtatatcatgatcgaactaaacacgtggtaataaataggcacttcatcagggagaaaattgaagatcagatcattccaatactccacgttcctattaatcagcaaactgtagatattttaacaaaggtacttttcaaatgacttttcaacgaattaatatccaatttaggcttactaaatatttatgtaagctacattgagggggagtggaattatttttctgtatttttcctttttctgtcttttacaacctgacaatataacaaaatggttactgccaggttatgcttttttttccttccactagggaagtttgttagtttttgcctttttcttccttcctttatttataaaatgttgctgattaccgatgaatataaaaaaagaagagggtgagaagaaaagagaagttttttccttattctcaagttcttcaattattttaaatgttaatagaaaatatggattgcttgtttaccatattctgaatattttactctgggagaattcatagttggagcagtactgttgttaagtatgatttcttgtgttggaaaagactttagatgttgattcttctgctctataaggatttgatctttgggtctctttatcatgtttgatactcatgtagaaatgcttgcgactcggcaatatggtttttgacattttgttttattcttctggattgtggcatatgagcacataatatctattgaaaattgtgtaaatataagatttttggtttctgtttgcaatctttttattggttccatgtgcagatcccaggatttcgccctggaaagaaagttccaga

SEQ ID NO: 8411 - DNA, 1523 bp, Carica papaya
  Intron number 2 from transcript evm.model.supercontig_545. 2 (locus evm.TU.supercontig_545.2) derived from phytozome v7.0 (chr-ID supercontig_545; pos 17234 to 18756)
gggtaagagatttttttttgggcagttagtactaaattagattgttgcaacactgagcaacagctttgatcactgaacttattatgctgatgcacttgaacaactaagaagcctttaactgttttagtctcttgcctatttcaaagaaagttttcaaattttcttcttagggcagatgaaatgatactttgtcaatcaacttgtttgttctttaaaagacaaggctttttttccacaacattcaatttaactttccgctgggacctcgttctggttaccggatctaccaatctagtgctggtgctaccccaataattgacctacaagttttaccttatgagacttgtgggttgttaataagttaaggcatgctggagcagtctagtctggcttctattattctttaattttaaataatttgcgattaattttaaaccactgaagaacagttaccagagtaccattctctttttagttagagatggctgagttctggtggattaactccaataacatggcagtaattttattgatcttcttcacaatacttcacggtttaaaagaggaactttatctccttgagaaactctaataaagttcattgttagtcatgagtatatgcattcctactctggggaaactgtaaaggtagacagattaaatgaaaggaagagaaaaaaaaaacatagagaattttaatgtggattgatgatgtgttgttttactcttaaagaacttaatcttaagatttgagaattttcctttatataattgaagaagaagaaaatccaaattttagaatacttctgtgataaaaaaaactgtcaaatgcgcagaaatcacataattacaatggaggattcgctcccgcatcccagtgaacttgccataggacaaggcaatagtttatcattacccatcttggtagtttatgcaatattaggaactcttcagaattttaaaaagaagcttctttttatttttatttttcacaatgttcatttcttactactttccgaagttagagcagctaaacttagagccacttccatttgttgatttttagtgtatgagacctgtcctttcctgcaaaatgtgaaaattatcaccttaaatgccccaatgtatatctgcatcagcttctgaacttagttttagtaattatgtgttaccaacttgcaccttgcaaataataaaagtattgctcaagataattttgtactctatgtatgtgcttatgccgtagtctctcttactattgttggtagattcgtaaataattctatcaattttactggccattctagtattatcttccagtgatagtggatgggataccatgtcagtatattcatcttacacaataatttttcaacgtatctaagatcaactttgccactatcattttattcttgaggaaaaactagaatgacatgtagatggatgataaaatagcttccaatgttattttcattttcctctctgcagatcacatcaaccctgacatttgcagcagcttgtgc

SEQ ID NO: 8412 - DNA, 902 bp, Carica papaya
  Intron number 1 from transcript evm.model.supercontig_106. 1 (locus evm.TU.supercontig_106.1) derived from phytozome v7.0 (chr-ID supercontig_106; pos 107 to 1008)
ccaacacagggagctcgagtccagagtccgtacatgtatgaccgcggtgatactgcaaatgaataatggaacttactatcattcttaggatttttatgttccaaaactggtgtctctttcttttggttctattgcgcaatccgatgcttattttgtgtggtttttcttgaatctgtgaacataacgaattgctttactgtagaaatttcggaattttagatcacatgacgagtttttagtgtcggacagttcaattttactaggttatgagcagtgcgggcctgtgtttatgatggttcaagctttctaggttttgcttagtagtttaccagttatttcaattttgtgtgagttgtatcaggggagtatttttattatttgtgtgtgcagtaatgaattgaaatacgaagctggtgcatgtccagaatgattggggttttagcttttgctatcgatttatgcatttcttggatttgcagcaagctttatacgattcgtcaaagatagtttaatgctgttagcagttttcttacactgttttgaggacgttggtgagttagaggctggggcgtggatttttcagtataataccttatgtgtattcagaataatctttgttttcatatcttttttgttgtgaaagaaatttcagtgaagtgcaagtcaggtttggataatgaattattgagctgttacaagttatttatagaggactttagcatttgggcttagattattttgaaaaaaaagggcttagaatagtactgtagggtattcatttattttattcatgcattacacacgggctaaaaactattatctgtcgtaatcagtggcttaatttgagttggaattggttgaatacagtgagagagaatttgcgtgcttcaaaaaaggaattt

SEQ ID NO: 8413 - DNA, 794 bp, Carica papaya
  Intron number 5 from transcript evm.model.supercontig_112. 63 (locus evm.TU.supercontig_112.63) derived from phytozom e v7.0 (chr-ID supercontig_112; pos 550908 to 551701)
ggtaagtatcaaaacatccccagaatgcaaaactgctgctactgctgaaatttgcatcctgtgtaaatcaaataggcccaaaaattccatgcatataaattacctttaaagtcaagcatgatactagttggtatttctgcaatacaagaatctaaaatagaagcccgccctctaatatattgaggaaggagttattttttttagaactgttattactgttattttgtagatttaaatgtaattcaggagagatgcattttcttttaaataaaaagtgtgaagtatattgttataagtaccaagggagtgctgcccatgtacagatcaaattatctacaaagttagttaaatcttccataaaataaagaagatgacccagtaataaaaaaaccaagagagtggaaccatctattctttagaatatcaaaatcatcaacatcttcaaccctatcaaaagctctcttattcctctcattccccaccattcaaaatatggttaaagagataatcttcacttgctccctacgatcacaaaatgccccttttaagtccgaatttcatccctcactgaacctgtcttgacccaactgataatgagaagagaaatgcattatagctttaggattctttcatagttggggcatgtgatcttcttaattgaattacataaattcttgtcttttttacttattttttttaaaaaatgcttgcgtaattttcatcttgaacaacatcaagtgtcatatatcgtaacacatatatcacgcaggcattgcaaaagttaaaagaaggag

SEQ ID NO: 8414 - DNA, 880 bp, Carica papaya
  Intron number 1 from transcript evm.model.supercontig_413. 1 (locus evm.TU.supercontig_413.1) derived from phytozome v7.0 (chr-ID supercontig_413; pos 5140 to 6019)
ttgcaagctgtttctggcgggttagtattattatacatagaaattgtctatatgtctctgtgtgtgcgtgtgtgtgtgtgtatatatatatatatataaacatatagttcattttgttttattatttctcatgatcatgtttggctgcggactataaaaaagtaaccaggccatacctcgcgtagcataagcgcgctaaccgttttaaacaatttagtcaaataagtactttagttaaaaagtttaaacaatatgaaaaaatattaaaattcttttattttaaaaataagttaattctagataatatttttgttggaaataagagaaagaaagaaaaattaatagaaaaattcaaaatttcatttgtagtttttaccataatcaagtttaattcacgactataattatatgttaaacatgaataatgtagaaaaattcaaaaaaagaaaaacatatatttataacatttaatcttttataaaataaaaaatttctttaatttataaattattattttaaactctttaataaaataaaaagtcatcttaatttcaaaataattatttttaatcttttaataaaataaagagtctccttaatttataaattattattttcaacaatattttacctccaaaaactactttcaccaccaaatccagaacatgttattctggaatacacggaatatgttggattttatttttgagaagatgttggacaactaaaatttacactaattcgaagttgtaataacgaacttgtttggttggcaagaaactagctggcagtgaagtatacatgtttggtttactaacctaggtatacgtatatgtctgattcagggctgtttctccaaagtctctactgtgtagctaca

SEQ ID NO: 8415 - DNA, 1161 bp, Carica papaya
  Intron number 2 from transcript evm.model.supercontig_53.8 4 (locus evm.TU.supercontig_53.84) derived from phytozome v7.0 (chr-ID supercontig_53; pos 552135 to 553295)
ttggtctcatctcacattgattccgttttttcgacgtatgctttcttcatctttctagccattctttttcttttaatcttaattcgatttgttctgttgaaatatatagtgctttcttaaaatgtgattatacaattgaaagaatgttcaaacttatggaccacttacacatgaacaaccaacgaaacattttccttatctcttcactatcaagacccaacattgggagaattatgtcagattcttgcactatttcaagaattaagattccgtagtacatctttgcctcgtcaaatcacttaatgttttaaatgtagaaacaattagttcaaaaatcattttcatctgattaccatcacaatggatatttggtgtcgtgattccagtcaactcacatatgcagtaagcaacttcaggtttcacattaacatttaagtgcttgagaagttgatcactgtcgaaggattttaataatggttaaagtgcatctcatattgactttggtggttgttggtatacttttgagtgacaatacttggtccaaagatgaaaaaggtcattagttgaatgaagagggttggtaagtatataaacaatatccataagcaatcatttaaaacttttaccacatcgtaccataatgctagtagtattatcttcactttctcttccatcaagccagttggagcacttaataacatacatcttaagtcaaattacttgggtggaatgcataaatagatactaactcacttgtccaaattatcaacctaccaaaaagcgagtatagaacataaattggaccagactaacctcaatagtgaaataacaagcttaaaacccctaagaaccggtctggaggtggctaaccaagataagctgaaccagactggtcaaatggtttgcacaaagggagctcttgttgaagcttttcgatcaagaagggagtttattcagaattctctcataaaatctgtatattttcttacacggctgctgtagccatcctagcatggcctttgctctcatatttcacatacatttggaattttcttttcttggtagagacatgcactttcacttgtttgcatgaaacagttgccttgtcaccttgtgaaaaatgttgtgcaatttcagggaaggtgccggtgattgcagttc

SEQ ID NO: 8416 - DNA, 2519 bp, Carica papaya
  Intron number 1 from transcript evm.model.supercontig_10.2 53 (locus evm.TU.supercontig_10.253) derived from phytozom e v7.0 (chr-ID supercontig_10; pos 3035658 to 3038176 reve rse strand)
ctgataaagaggaagattatattatcagattgaaggtatttatttcctttcataatccttgattttctcaacagctctaaaatctcatgaaatcgctttgattaacattttgttaatcaaagaattaaaagaaaaaaaaaaagaacagggattcgtatatttttttgccttaagtgttgggcttttagcaaagaacaaaagagaaagccctctattatattcatatgcattcaataaattttgatgccatttatatatagcaaccagatggacataactcatttttcacttagaatctaacttcttttaccctcaatttattttacttttcctcacatggcctaatttgtttcctacaaggaattagtatacctacatattacaaaataatactttgtttgaaaagcttaagcataaagcaaaaatgtcaaactttaacatccctgatccttggtattcttgttagaaacaccaagcatgctctaagtgtttcaaatatggtatttgacaatcttcgattcagataactttgaggtattttcaagtttggtagacttcggctgaacaaggttgaaccttttttcatgtcttctaagtacctagtgtctctcgttggacagtcatcatcactaatttctgaatttaatatctcgtcctcaactgatgtatcttcttcttgaataacatcactcaagatgaaattgttacatcaaattcttgatatctacattttccctattcaggtggacaacttcatcaatctttacattcctatatacaatcaactttttagtttggatgttgaaaattctaacctcctttacattattgctataacccagtagaatactgacttatgccttctcgtatacattatggtcttcaactgagacgttgaaggctttagagacttcaaagacctcttgtttttggttcaagaaatacacccaacacattcttgtaaggtaatataatattttctttcacttaaggaacaaatactcgggagttatataattctgcgtcagtgaactgcagcttgtagctctccgtgcttttatgttttggaaaaggaaacttgcccttttttttccctcaacttcacaggttccaaatactccacaattttctcctgtaagtaggtataattttgcaccaaacccttggcacttcaacttttaagggattgtgaatggaaatgcccaaacctcttatgcaagtctactatttcctccaaatgacaaccatacctgaacttgactcatgcaaagaaaaatttctgttgtttgttgtaaccttgagtaactccactgctactatggtcattcatagtacaatacatatcgttaaactacaaggaatgattttgtctagcatttgatccacacttatctgatttttgccaaatttgagaatatacaagaaattggaaatgatttcggtatgttttagagtgcacaaaactatattgtcttacttttcacatatagttattttccaccgtctatcctcactcttgagcaatatgaggagtgaagggtcttgaatgtggttgcatctgagtcatatgataactacagacactgtcaataagcctagcttcacttagagaactagttgactaataagtgccacaaacagattctcctctttctgctcccagttctcaacaacttgacctttggttttttcttgtgtttcttcagaatgacatatttttcaatgtatctaaactcctttcataatctgccttaaaccttttgcctaaaccaacaatactcctttgcatgattatactttttgtagtatggacatggaagaaaaatttctcttttgtcatttaccttggttcttctagcttcttgcttttcctatttgtcaaagaattttcttcaaccttggcctttttgaagtttcatttctatcccttaccacacagaattttttatgagtttcattgatccatccttaagtatcttctttgttcactggcctaaagtgcattcacaagttctgttagaattaaggcggaaatatattttttgcttcagacctctttcggaaggccaaaaaggaataaccttttctgcaaaccttttatctgttaattctttacttaacactgtgatctgatctacaactttccataccttatttatgtacttatttaaaactttcgaatcacccatcctgaggacttatttataagtaaatacttgaagtttacttattcatatgcatccaatgaactttggagctacttatagcaaccaaagtacatgacttgtcttacataccatatgtttcacctacaatataacttttttacactcaatttctttcacttttcttcatactactagtttcttttcgtacatacaattagtcaacaaagacattgcaaaataatactttattcataaacttaaatgtcaaacttgaatatatgttcccaaagaatatcaattatgttgattttttcaggagatacagattaaggtaaccaacctggtcagtaa

SEQ ID NO: 8417 - DNA, 1195 bp, Carica papaya
  Intron number 3 from transcript evm.model.supercontig_164. 4 (locus evm.TU.supercontig_164.4) derived from phytozome v7.0 (chr-ID supercontig_164; pos 91774 to 92968)
tgcaacaggcactggtcatttagaacttttagcaggtcagtactgaaaattctgtcacatatcatcatcagttgcatgtctctgcttcttgtatttcttcaaaactacatgattgaagctagtatgtatgtcttctttaatctgttacgatttctccaaaaaacattcacaacaagggtatatgagaagagcaaattttttgagttggctagtgttggagttggatgcctcttatatgtattagattcttgagatatatgtagcttagttttgtagtactcaataagtggtggtttgaattctgaagaccataatagagagaacgtggcacatggtataaggaacattactttaagcttcctttttaggtgttatattttcttcaactcaaggataaataggtgaaagatatattcagatttagaaggcactaaatttcttcttttatctaatatcatttctccaaaagatatttacaattgcagtacgtacgtcttcttttaattgatatgatttctccaattattggagtatataaaagggaatttctccgattatcatttgctgtaggtccaaactgcatcatgagatagcaaagaggaggtactactattcctctgactctatacccttggggcaaaggagatagcaagtggtggtgataattctgttattgtggttgttgctaatccatatgattctggattaatttatcttttttttttggtcttttcaacccttattttgctgtgttacatcatttgaatataccttttgttctggctgttgtgggggttactgagaataaagttgtttgtttgctatttcactaaatatcaaataagagaaatctagttcttgaaaacataaacattcaactactgtgtcacagataaaaaagttgggtgtttctaggttctttctataagcctcattagcatcaggatgatgaaaatgtaactatcatttagttgattttttgggaagaaagtttttctcattacaaaaagctcctatctcctttatggggagaattctccttttggtcttgtctttcacttgctagtccaattgtcattaatttatgacaagtaactctttcttgatttcatgctagaaatttctgtactttcagtgatgttataaactgtattattcaggtttagctttgctgcagaggaataaccgacccacc

SEQ ID NO: 8418 - DNA, 1372 bp, Carica papaya
  Intron number 7 from transcript evm.model.supercontig_52.3 0 (locus evm.TU.supercontig_52.30) derived from phytozome v7.0 (chr-ID supercontig_52; pos 228110 to 229481 reverse strand)
gattcaaacttgcttctgctgcaaggtaaaaccattagtgtggtccagtaaaatttatgtcttctcttctgaaagatttatagtgttgtcttttggaagaatgtacgtgttacacagaattattctgttgatgggttctatcttttgtttgttcaactttcctacaaaatctttctttgtgttatgcatataataagattgaatatcattgtcatatccattaaattgatgtaggaaaagtagagcttgattaggaaactttgaggagatttttaagaatcaaagttggagatcttggatctcaataatcaaattaatatctctatatttaaataataattatataaatagcctaccaataatttacttaggatatcctatttacaggcgtcaaaatataaataaaataggaactcttaagtgtactgaggatttctacaaaataagaaaagaagctaattaattaaaataacttgtaatagaaaataactaaataggatcctaactaaataggaaataatgaacttatgtcattagtatgcctatggatattagtccctaactaagctaaataccttaatagtgcataaacattacagttacataaacataacttattattggaatatgcccactctaggatcttcttgttctgcattgttctatgttatttggtgtaaactcgacctcgagttttaaaatgttgaagtagaaagaatatccaaattagggcttgtctttttaacaattaaaggttgtgaaacttgaaattgtcatggaaaaacatgaatacttttcaactcaaggattctaaagatatagtgaacgaagtaaaaataacaaaatttttaaaagggagaatatccaaactttcctcattgctgttaggagccaaataaattttgtagtttcttgaggtgggacctttttcttcttaaaaaatcaacaagaatatcagtgtttcaactttgacaacaccattgcttacaactaaatcaggagatctataatttggtgactcaatttgtctaataaacacaacatctttcacaattcattacgaggtgactcaattttgttcttctttcaaataaatctctctttgttctaagcatgttatgagattgaataactatcatatccattaaactttccaagcttataagtttcatgcccattagtttaataatacgagtgactatcaatttgcattcacaaaaagcctggttgaatttattatcaccacttaagcaattgcttttgctatcatctggatatcaatatctgatagtatgaccttgcttatctgcactcttattcttttatcttttcaacagagaaggttccccgattactgaggtggaaccctata

SEQ ID NO: 8419 - DNA, 1223 bp, Carica papaya
  Intron number 1 from transcript evm.model.supercontig_5.10 1 (locus evm.TU.supercontig_5.101) derived from phytozome v7.0 (chr-ID supercontig_5; pos 764935 to 766157 reverse s trand)
ggttcatccgggactccagctaggcaatctaagaggtagttactgtcagttacttgttacaattggacttgcattttcctgctgattacctttagggtttcaatttagagaagatggagaatttctactccttttttcggtttgatgataatgtcctggctttttttttctttttgagaattggtagtgttgttacactcgtgaacttattgtctcgttatggtgtgcctttgttatttttcttagactttgcaattgggggtctggtcatggtagcagtgggaaaatccactctttttgatatctaagatgctttcaggttaactttcttttaaattttatttttatagaatagtaacgagaatacaatagaactgggagagaaattcaaaagaaaatagcattcaaagtttttaaataaatttaaaaggagatggcatccaaattctaagttaattatatattcaattcaagttagatgattttgtgatttatttcttaataagtggaactaaagatttgggttaagttaattcaattatgcatcaaatatgtaaataataactaactttcgtatgtccaatgataaagaattaggaattaagtgaaatataatatggctgagctggttttatcatccaggagagtttgccggttttgctagttcagtagttgacagaagtagtgggtatagcaattatgaggaactttgaaatgagtgcttgaagtattcttaccaaaatctggaagtatatgtacttttgggagttgggcagatgcttaaacttcaacaccaaatcaatgcttgcttgttttgcatgtctgttagtccattatgctcaaacttcatctccatcctgcttcagtagttagttcattcattttgttggtagatagaactaaatatacatttataaatagctgttatgtcagtaatttaacacaatgctggacaggatagacatatcaggtgagctaccttcgttggttgcctctggttatgacctttttgttggttatctgggagttgataacatgaaagaaatgaaactttgataagtttatcttgaattcaatattttgactttcaaagttcttatgttctttcagtctaaatgctagttctctagcttttattattcatcttgtttagattgatttggagttaattcgaactggtttaagatatgctcaaatattcattcatgtttctcattccagat

SEQ ID NO: 8420 - DNA, 672 bp, Carica papaya
  Intron number 1 from transcript evm.model.supercontig_142. 25 (locus evm.TU.supercontig_142.25) derived from phytozom e v7.0 (chr-ID supercontig_142; pos 300632 to 301303 rever se strand)
tttctcctcacagaggctccgttaattcccttcaggtacttccgtcttcgctttaggtttcatccttagcatgaaacacatgcttttgattgttgagattctggtagttcaatgctatcagcttgtttggcttgttgaagttagcggatccaggtgtatgtgttttattgggagatttcggtttatatgttaatttagtttctagtattaggtgactgcagtcttgtaagtaaatctagtttctagtttctagaattcaatgctatcaggttgtttggctcgttgaagttagcggatccacgtgtatgtttattattttgagatttcattttttatgttaatttagtttctagtattaggtgactgcactgttgtaagtaaaactatgtttgctacttggtaattgtactttggtcgcaaggattaatacttattggcagatttcagtttatatgcaaaatgattgatgcatctgcgaagcaaattaggaatgtttgtacatatttaatgggtatgaatattcaatttccgactttgattgtctatgctgtatatttttttgggcattttccattaatatagtcttgtcttttcggggaagaactttagatgcctgatgttttaatcatataatcaggttgatttaacagagggacgttatctgttgtccgg

SEQ ID NO: 8421 - DNA, 1988 bp, Carica papaya
  Intron number 4 from transcript evm.model.supercontig_10.5 5 (locus evm.TU.supercontig_10.55) derived from phytozome v7.0 (chr-ID supercontig_10; pos 931017 to 933004)
ataattttgattggccttctgaggaggtattcaatctctataaaagcaaaaagtcaaattttgtatagaaaaagcaatatcttattagttatgcttttttattttgttaaccagtatcaacactatggttctttctttccttgaaaaacttatggttgatgttttgtagatatattctaccaaatcttcgtaaaatctcatgtttcaagcaaattaatttgcttcaaccaagcttgttctaagttaaagtagttgaatgtctttttcttcataagaaagtcattgatggttggtactcatgaatgagaatttcttccagtctgcatttgtttctgatagtcttaaatttcaagtacataatttccttaatagtaagaaatgaattccctaggtattgggtttgaagtaacctattatctttagttgtgaatgatgaaaagctcttaaatatcatgtggagccagattgttccttctatacttgaattatgcttggtcatttctgttgtacattgaaacctagatatgagagcaaagtagagaaaggagagtagaaaaataagctaacagtttcctagcaatagagtgaaagagaaattggtttaggttggtccatattttcggtttttgcaccttcatcttatgcctctgaagaagcataaacttttttgagctttgaatctggaacaatattaatagtgccatgctttcttttctatcctttcttctataaagaaaaggttgacttgttatttcttgtgcaatcttttctttaaattctttctgtgtggtatctttcaagtagctattattaatgtcatagcactaaatgatttctattaaaaaagagcatcttgcttaaatgatgtaatcatagatgcgtcggcatagatattgctaccttggcccttttagagatcaagcagatcatttctttgcttcgttcagggaaaccttttttcctccaattcacacttgaggagtcgggagtgatgatagatcttcaataaaaacctaatgatctctttttttaaaaaaaaaaaaactaaaaccccaattatcattccccttcatatccacagaaaggtctctcctttttcttgctttaagctcaaagtagatgattaatgttaacctaaagatatccttttgatttctctaataaaaattgtttgacggagggaattgaagaaatgctctggagcatgtgaacatacttggcctcaaagtatgacccactgattataaataattttctaatcttattttgacaaagattctgtggtatcgttgcccatctttgtgtgatgaaattagcacagtggtgaattgattcgacttggaagttaaataatgtgagggttgataaattatgaacacaaaatttcattagtttctatgagtttcttatcctagttttctcagtaggtagtgacatgctcattataacattgagtaatttgactataaaatttccattaccacactcatggaactttattatctctttttgagaaaaaaaagaagtatatttaataggcaccaagaggttgccactcatggaactttaatgttgtcatgtcaggtagcttttctccatcattttgcatctaggaaacttaccttactaccaactgcttgcaagaactttaatattatcatgtcgagtattcttttctctcagtaatcttcttgaataaaaaatgtgttactattcacaaagtactaaaggagtgtaacccataaacttttctctccataatttttgctgttgcatttgcaacatgccagttggacagctctatttttttcccgtaatattattatttaaaagattccttttcaaaaagctcacagtaattgccccattttgactgcaattaattccttcctagatttagttgacatcatatgtagaaatcatagaaactaagcagttttatgttgcatttaggggcctcactcagattttcagggaccaacatctgg

SEQ ID NO: 8422 - DNA, 832 bp, Carica papaya
  Intron number 1 from transcript evm.model.supercontig_58.3 5 (locus evm.TU.supercontig_58.35) derived from phytozome v7.0 (chr-ID supercontig_58; pos 349592 to 350423 reverse strand)
aggattacgaggtaacatgttgcagctgaattatttattctatcagtcatactgagtttgggatttatttctatatttatttcactgctgcagaattacacttttacctttatgtttcttcaagcaatattcatctttttatttttcctctctctgtatcaactgataatcaaataaatagcataaaggcattctcaaacaagatctgacatgattccaagacttgactctagtgattctgagtttatttagatgtcggtacgatgtttttaggaccctactgcacagtactaacaaattagatattttatcactcgttgatcatatttcctcactggccacatattaattatgcagcaatatttatattttgtaagctacaaaaaaactatcaaaccacaaagagtaatatttctaagcattctttgaccaacggacaaatttagaaaaaccacgcataatgaatatgttgacgtggcttgattatgaggatatcttatttatattctgatagatattttatatatatcctgagatatttaatgtttattctataaaatattttatgtatattttaaaaagttttgtgagagaaaattttttataatttttatatataaaagatttacagctttattggttatgtattcttatttttcatagtaaaaaagtttcttctcaatcttacccgtaaatgtaaacatatttgtcaaatcacgttaaattttgtgtcttttcttatttgtgctttactttattgtaatcgtgtgcactttagagattaatttttctaacagagagcagaggtggcggcagtttagatcaagagcca

SEQ ID NO: 8423 - DNA, 2750 bp, Carica papaya
  Intron number 3 from transcript evm.model.supercontig_418. 3 (locus evm.TU.supercontig_418.3) derived from phytozome v7.0 (chr-ID supercontig_418; pos 15024 to 17773 reverse s trand)
catctgaggaacctatccaagtaatgcatgatatcattttttttttatctttgtgatcgttttaaagatgtatttctttatagaaacttttcaagatgcattgtttaactttatatgttaacacttcccctcatccttcccttatacataaaatgtaagcactagtcttcttaaaaaatgtaagcactagtgttagaagaagtcttgtatgttttagagatgggttttgctggcatggattgatagattggcaattgttaccagatgttagaagttgatttcacttgctctatatggttcaaatagggatatataaaattattgataatatgatttgttttagagatcagagtgttagtcctatatgatctacaaatattattacctgggcaaaagctggtgcgtctgagccagcattgcttcttgtgctcttgagatggatgaaaaacactttattggcatatgttatattcttttaattgaaatttgagaaccattctggatgaagttgtgattggaaagtgcgacaagacatgccttgcaagatgtgtagagttatccctccctcctcttcctctccccctctcacattgtaggtctcgtgctatcacttttggcttttagcatcggtaatgtcttttatgtgaggatatataatgtgcatatagatttgaaagcaagtagaaccatgcttaagttttcaacttgagcgttcacatgaaagaaattttctatttgtagcttccacaattttgcttattgcttttgcaagtgcgagttttagtgaaagaaatttcattctctttttgtgacgatcatgggagatttttgatttatttcatgctctctttacttttttaaaacaactatattgcatcaactttattaaattctttttgttaaaaaaaaaacatagaggaagaagtgtaaacatgttacttgtgttgaacttaaacaacatttactaattaaagaagctgatgaatttcttatagcatgggtaatggtgtttctgattggcttataactaccaaaaggggtataggaatataataaaattatatatatttttatttaaatgataataattcatatgttggactggaatatcctttgcctagccattctctgtgcctttgtaaccatccctatgtcacaatgcccttttatttcatctccttatctgccccgaaggtcaaacatcctgaaatttctctctctcttacttttttttttcttagaaacctcaatgaccaggaaactattgactgcttctccttgcttcacctcctttaacgttttgacatttctttaaatcctaatcatagaatatggattatggactcttcaggtttttacaccataaatcctctttctttgcttatctagaatcctactaataaaatatgtgctctcgataaatgtttcttgggaggtaaatactgtttgagagtttaatgcttttgttgagcaactattcttgacagtcgctacaaaattgattttcttcaagcatggtggccctactgtggtccctggatgtatgtgctgttggaaggcaaattctaggtcacctatttttgtcttgtaacctggcctggaggctttgggctggattatttgacacttttggtgttaagtgagtggctccccttttctcgagtgttttgtctcttcttcttaatagtactggggagaataaggaagaaatgttaccttgatagaagctcttttcactgcgttgtgggtgctttatttggagagaaagctaaaggctttttacagcgaattttacctcttcttcttgggataggatggcttttttcatctctctctgggctaaagtgtatgggcaatatggagatatcttttggctattttgcaaagaggttgggtagttgttctgtctgattttttggaggttggggcggcggctctttcttgattttcggtttcagtctttttgttctttattttagaggactgcttatccccaactaatgtactttgttcttttctctccctgattaatttctctttcatgtacttaaaataaaataatgatattttattttaagtaggaaagtgacagcaggtagtatttttggggggtttggtgcttaatgtttgcagaagcaccttctataagcttgaacaaatggaacctacattatagatgagatgttctgcatgttcaatgaaccactaggtattggagtaatgttcttaatttttaattaatgaatccttttagttgttattgatggaaactgtgtctaggcgtctacttagatggatttccattttaaaagctttaatattttatgacatggttagtgcttcttcagtaggttttactggaaagtgaacaagttaaactcttcttgaaagttaataacagtgatcctcaacttaggcttgttagcgtataggaaatctttgttttcttttgtttgagccttgaggtgaactcttaatgtagaaagtttcgtgatggacttcttttctttgcaatgctttgttggtttaatggccctaattggtagcttcttgttgattggcttattcttttttctattgatttttttcaagtcaataattagtgtttcaccaaatggttattcattaatgattgtgaaatttttgccacgtggctttatactaccaaagtttttctttgatttgctattatataaataatcatgatttgttgtataggttgtggactttggggaaagtggtcctgttcg

SEQ ID NO: 8424 - DNA, 2201 bp, Carica papaya
  Intron number 3 from transcript evm.model.supercontig_7.19 (locus evm.TU.supercontig_7.19) derived from phytozome v7 .0 (chr-ID supercontig_7; pos 273716 to 275916 reverse str and)
atttagaggttagagtcattagaaaagtgcttcttgctgatcaaaacattggttcttgcatgctttaaaattaacaacaaataagatttaaaaatttctttgttaatccttgtgcacaagatccgaactttcaattgaatttatggctgttttatttttttagtatacccaccaagtctcggtgtagttgaaattttgacgtgcacttggttaaagataaaactcaaaactaactcatgtccaaactaatctaataataattaggaagtcaaattgatttagaaggcctcatgcatttgttatgttagaatttgaacaacaaagatatgttcataaaaacaaatattataatatgaataatagattgaacaatttaataaagtttacatcttggaatatttatccaaaatcaattcttaacatgttattaaaacctgaaatttagttttcaaatcctaaccttcacatcgtttttgaaaaaatatgatccatacattcatcccagcgggctttagcatgatggatgatattaggatataaagaatagattgattttttttttctgtaagttcaagcttttgcgataattggttgctatcaaatttttaacaaatagatgaacataatattagtataagatgataaaaagaataccttgcatgtaatgaaattcaggacatcatttcctgtaagttcatatttaacctttttttgtttgaaaaaaattttgggttgttgacggtttgtttgactcagttcttttgttttgttaaaagtgaatgccaatcaaatttgagtttacagaattccaatgaaaaactactatggagaaaatcctgtacaatgaactaactgtcttcagtcagggtgcagatggattactttggtttggtttacaccctatacccaagccaaactacttagtttctatagaattcaaatcaaattgaaccattctactatagaaaccgaaccaaagtaatctagtttagtttggcttgctttggtttgaattgtttttttatgtgtattttttataattctataacttacattacaatgttagcccacattagtaacagagtatctgaaaacaaattttctcgcaaaataagcaactactatatatgatagcaaaactaagaacagaaaagaaaaataggttacacagaatctattttaggtatttaggacgaatagggtggatatcttttcctagtttattatatatattatattattttcaactatatatgatttgaattttgatttgcttgtttgaaaatttttccaaatcaaacttgaaaccagattaaaagttttcttttggttttcaatccaaaccaaagtttggagggtcatcaccaaacaacttacacgcctagcctccagaatgattggatatggcctctctttcattataaaacaatttatcttgccaaattacaatttcttttttccctttatactgctatctaaaaatcactctttggatgagtggtctgcaagtcttgtttctttctgttttatgtgaaaaatgatgtttgagttcattttctctgtttcttcaacttagagaagtgttagggtaagtgacactgaaagaagttatggttcctttgaccttcctatcatcttagagcaattgtaagatttgttttttggtatatacataatgtggtaatttgaatcctatagatagaatcttttcggatgacacctgttattttctaacatgtatcttttgcattagttcagagttctgatttcccattgagtgaagtaacccactaactaaatattcctggacattttcaactggttagcctgcataagaaaattgtagctatagactgaagcttggcatttaattatagctattaaaataccgatattttagttcaaccagagagtttagctcttacaagatgaaacaagggaaatggattcacttaactggaatcctactactctttttatgctggtagtatctaaacattgactcaggatttaacttaaagatttaactaaaaaaaacacaacgcaattcatttgtttcatgtcctgaaatctagtgctagaatttgttcatccttttcgaagttccttgatgtctacaaattattccactcaagtaagggcctgtttcaaaacactgaaaacaattctcgtggtgatagtttaagtggattgtaggtgga

SEQ ID NO: 8425 - DNA, 2099 bp, Carica papaya
  Intron number 2 from transcript evm.model.supercontig_42.1 07 (locus evm.TU.supercontig_42.107) derived from phytozom e v7.0 (chr-ID supercontig_42; pos 993336 to 995434)
gctgaaggttggttagtataaacaatttccttgcttcttggttggtttcaaccattattttctcttcattgaagaaagtactcattttttagtgatttattattatttttttgaagtacttagtaattttttattatgtatacaatgaaaataatcaccgtaggtttgatcttaaaatgaatcttgctttcaaactacatgctctctgttcagaagtaggtaacatgacatgagggtccaagaatgctttaaccatggaataacgaaatgagatgacaccttatgtcatatgaatctctatgtgaaacaaactccttagtaagatgctgcagaataagaggttcctaagttgggataaatttaatattaaataagtttaaaattttaaattatttagaatctttgatttatttagcttaattaggtagcttttaaagtattattaggagttagaaagttgagctttctattttattattttaatattttcctcactaattgtaattaacaccattaatacacaagaatgttgaatcagaaatttattgtgttagtgtttcatttcctattatctctctttgttcttagctcttattaattttgtgtctaacatgttatgttctgtccttttcttcatatacttattcaccttggtccttaattttctctagtctacctctatttggttgtttcctcaccactatttctctaattgctaaacttctcaagataagttggttctataccttactttgtcatttcgtattaaaccctaacttctgtccccgtgtttcttacgtactagctgttcaaagaaaaagaaaaccataccccaacgtcttgccaaaaattctttctttaaaaaaaagcttcctaggaaggagaaaacacaaatgttaaacaaaaaccccaataattataaactctctctaacatttaaaggagataatattttatattcaaaatcaagttttaactccttccatattgagaagactccataaatcactcaaatctctctccatcagcaatctctacaattttggtccaatcagttttcttttatgtgtagcataagcattgaaataattaacatttatgtaaagaatactcgtgggaacaattatagtatttatcctgtatatataaccatttctattttatggcattccaaaaatcccttatgaggggaaaaaatttcaaacaattaccagtcctcaagtccccacattgcaaatcactccatcccccttgacaataaaaaaacactactcaccatcaatgtgctactcaaggtcccacttaaactcacagctttggattatcccagatggaatgctcagttaactactcttctgtatgagtgtaatctaacaggatttgttacagtttatgtccaacttaaattttttggaaacatgaggattattaatccttcatgctactttagcctcagtttttaaatttgttatctctttagtagcatcattaagtacctgtctagaggcttggtaaagatttgaatgtttatatgccaaaaaaactcaagcttacatcgtgactccaaatctattcaagagtactttagtccattatatcaattaatgaactcactcttgtccgaattgatctgtcagaagatgagatgagattcacatcctcaatgttgtctgttgtgatttcaaagagattccagcagctatttaggcatggaatatcatcatttcctttgaagagttcctaataggctggtagagtgtgaagatttcttgaagtgaatttgatctacgacaattataattagtttgcctacttaggaaattgatgataaaaacttacattgcatctaagatttcttagacaatgtacctaagaagtcttgagcatcacacaagattgaggtcagtgttaatggtactgtaaattatgacagtcacttgcctgcttatttagctgcatatatgggttgtttgaatatataaacatataatatttgattggaaggtaacagcaactgcattttttcatttttaaaaactttttttttgtcttctgaatgtttagcatcgagaatttgcaaaaagcaagaagagagtagc

SEQ ID NO: 8426 - DNA, 1923 bp, Carica papaya
  Intron number 17 from transcript evm.model.supercontig_53. 158 (locus evm.TU.supercontig_53.158) derived from phytozo me v7.0 (chr-ID supercontig_53; pos 1298095 to 1300017)
ccatacaggtgagaacaatggctattttactgggctctaagtatgctataattgagattttatgttgccactgggagattgaaaaattcttcaacaaggaaaactgtttgtttttgttacaaagcaaatgcaattcttcatgtatgatttcagtaatataatattcaaggacaagcttaattcagaatcattttgtgaccttttgattagacttaattatgcataacaagatcttaatttggaaccaatttttgtaattactatattaatttgtatttttaagttacttaggtttgtttatgcattctaaaattttagtttcctctcaaatagattttaaatattgtaggaactgaatcttttagatttctcttttataattttccctattccccgaacttagtgtctagtagctaccaacaaaggggagacaataatgaattaagaatttttttaattatagtttgttccctattaaagagagtgggtaatgggtaaaattttttttacccacttcggttatgggacaggtttagatttatgtttctattagcagtgtgagtgtggagattggcgtaccagcccaatgcctttctctagcatacaggttatttttcaggaaaacagcaagcattgtagatcctttccactacactttctgacacgtgcatctctagttctatctttcctgtttactgcatataagggaaaaaaaggaaaaattttcctgcatgcaaaatgaaccttatatttttttctgcgttcttttttggtagtggttgtatttattttaactttttagtaggagcatgtgaatgggcattcgacattggtagtattctccatttttttttcaaataaaaatataactatattaacagtcatcaagggagtgtcaatccgtacacaaattatttataactctagcaaaatttgtgtaagattcccaaaatccttcataaaatggaaaggatgacccagaataaaaaaacaaaaagttcaaaatcatctattcctaatactatcaaaatcctcctcatccacaattccctcataagcttttctattcctctccttccaaattacccaaaagatggtaggtggaatgagattcacgtaattcctccttcctctgacacccttccaagcccaaatttcatctctgatcgaatctgccattatccaactaatacccaaacaacccatacaccattaaccaaagtttgtagacaactggacaccatagaagagcatgattacaggactccgcagcccttctaagtaacagctattcaccatagtcattcatatccttatcaattttatccatagtcaaaatgcatcccctactgacctcccacacaaaattttaaccttttaaatttgtctaaaaggaaaattcaatccatgaattcctgcttagttaagaacttgtagtaggatctaaatgaaaatactcctatagaagtaagactccacaaaggttgatcattgcttccatccaaagtaatgatagacaaagtagcaaggagaacttagcaatctcccaatcgttcagatttctcatcacatttacctgccttaaattcccaccccaccatctctgaatggtaatattctctctcgaggcttctcaaacatgtcctgatttattcctttcttttcctttggctcattcacaaaattgggctaataaattctgtaaattttaaaatgagtgtgaattagctagactgtgtaggagttaatttgattctcatgttttcctcatgtgccctcattatttttagtacttctttatttagcaaatacctgttcttatgtcaaaatgactattaacttatgattttcaagtgtcaatgaggtgagatgattttttgtttctcaggagcgagtacatttccataacactggtctttcaga

SEQ ID NO: 8427 - DNA, 1294 bp, Carica papaya
  Intron number 2 from transcript evm.model.supercontig_19.2 76 (locus evm.TU.supercontig_19.276) derived from phytozom e v7.0 (chr-ID supercontig_19; pos 2327306 to 2328599 reve rse strand)
tgtcttctcgtttcagtggcaagttgcacattcttgtaagtgacccacaaaaatggtctgtgtgttgatcatctggttctgtctctcttctattgatgttggaattagatcatcagctgttgcgcttatgttggattgatcttgtagaattcacttgttgtgctgccatagattctgttccagttatgttcatttcctgtgcgtttatcagaaagttatggtgaataagaaccagaagaactagtattagtagttcttttttatgttggtgctaaagggacaaagagtaggctaagcatagcagagccagctccaagctatgccacatagatcatggtgaaggagcccgccgctccggtacatttgtgtgtttgccagtctttctagacaaaaacttgtgtatgtttccacgcaatatgtatgcctatatggaacactcggatccttttccaaaagcatctctctaggttccagttatccttatcctatggaagtcattctccgaaaagttctaagatttcaatggctctgcaaagctcagcttgcacaaatgaagcatggctaatattgctagtcatgcctgccagttttcatccctgactatatccctgactaaaccatctgcccctgccacacctggattaccaaagaccaaccctctgagcttattttcaccctggttttggcagttgtctcataaactgttcaagaaaactgtcattgggtacttattaccatgaaaactaatggttagttgaacatccaatattaggtactggatgtaaagaaacactagtctgttcgtcatataaaactcaaattaatgactgtttaacttggaaacatcttaagaatcatacaaaacaaaaaatcttctccgtgtctctgccagaagatatctttagttacatggactttcgatttttatgtgcacctacgagcatagtgtaaatccaccagctggattacatacttatatgcgtcgaagaaggttaaggaagaaatgcttcaaggcacaagcaagcagtttaggtaggtttatggttttacttttcattgtgagatccttgagtggacaactttgtttagctgctcaagctaaacttcacttccacgaaaagttgacccttcaatatattttgattgttaaccggattgaagtgaacttgaaccttttggattcattctgtgaattaaattagtttattagttcttgaggaagatttttaagaattagtatatctgtatgctttatctaagatttgataaccagaacttcctttccaggttaaca

SEQ ID NO: 8428 - DNA, 1577 bp, Carica papaya
  Intron number 13 from transcript evm.model.supercontig_25. 57 (locus evm.TU.supercontig_25.57) derived from phytozome v7.0 (chr-ID supercontig_25; pos 730620 to 732196 reverse strand)
tatttgtcaacgaccaactatcaggtgagcactgcagggatggtagacaggtattttttggcatacaattaaactagtgcagaaactagcttccacgcctttgaccaatccatcttaccagtccagtaaatattggatattcacttagtattttagaggaactaattctgcatgcacttggtcattttcagttgccagggatggtggtgagtgatgtatggatgtgcctattagcccttgtatggacgatggattctttgtcctctctgctcgtgccactagcaagcagtgaggaggcatgacacttctagcgactaggaaatacctggttattaaaagttagacatttgacactggaattgggggaaagaaagggaaaggtataagggtgagtgagaatggtaaagagttcagattgactatcattttttgggaggaggaaatccagtggcccctgggtgtcttgcaggaaatttactggataaaaggggatctttgactactacagtgctctatcattgattatttcttgatctgcctagatcctgatgggataaaatgggggctctctccttcagatttgagaataagtgacttaaagtcacgaagttttaggatagaataagatattagtggaatggcatgatggtgaagggcaaggaaagttacaggatggctaagaagttatgggcagttgaggcatgaatgagaagtggtgtcaagaggagtggagaggggagtttacttttactcaatccttatttcaggatctagagggccttgatagaagggaaggggagggtggttcacataccgctgatcaggcacttagagaatttatctgcatttaactagcaaataggatccagatggaagagatctcatgaagacaaaagtctcgatccaggtggataaagggggggagatagaagtacgaaattcttcaattgtatagctaatcatcgtaggttaagggtaactgataccaaatcctaggttgaggattttggggaccttattgatatcttgattgatatgtaatatttattacatgcattgacacttagtgcgtgtaaacgaattcatactattgtagtttgactaatccatccctctagtccaatcaaagatatatgacgttcacatttaaaatatgatattttaaggaagtagtttcccatcatattggtggccttgaattgtattcctcattgaggagcaaaccaatgaaccacaacaagttaatgatactgaagatgaccataagaatttcattaatattttgtgagatcgattattatgtttatgcttagaaatttcttttaaagaaggaagccagtggaaaattcctatcctttcagtgcaagtataagaaaacccgttcattttggatttggctgcacttttatttacctccttctcagatatattaataactttgggaattgttcatagggtcaaacatagggaagttggatggtgaatttatgcaacatacagcatagcatagacaaagtacttggtagatctaatccattttaacaagtctcttttttccttttgggcaggaactgcct

SEQ ID NO: 8429 - DNA, 3981 bp, Carica papaya
  Intron number 4 from transcript evm.model.supercontig_63.4 (locus evm.TU.supercontig_63.4) derived from phytozome v7 .0 (chr-ID supercontig_63; pos 249898 to 253878 reverse st rand)
ttggattcacagatttgacaattggcacgggagaggtgagttatatttaaaaccattatttattgaagtaggcctgtattcattttgattgttgttattatgttgtcagcattattttgtttatttgtttttgacaagaaaagagaaagagattctattaggaagtaaagagggtaaatacaaaaccagaaaggaaggaggggagagccaacctttacaaattaaattgttataaccttgtagaacccatgcgctttagcccacaaaaagctaagagcactaccctgcccaaataagatagggatgctggacatatcgactgaagatcctttttttttaaataaatattgactgaagatcctaatgtgcattcaaattatataatttaacacccatcacagagcgcaatacaccataaaaccttaataatgcatcttgtcccatccaatgtctggctgatttccagttgtagttctcgtattattcttagtatgtaaaactaacatagcagaatccggttctagatcttgcatatttccaactttttagcaatctttactggaattgtgagaaccgataaatggtagatgggaatgttaaaaagtgtacttttaacaagtgtaagtctaccctcccttcggataataaattccattttcagctggctgtcttctctcaaaaagctcgatcaccggatcccaaatcccgctctctttatatctcgaacccaatggaacacccaaatatctaaatgggagtttagctattctacatcccatcaatccagcaaatacttcctcagtgcccctccccccaaatctgaccattcaggacttatctaaattaatattcagacccgaaacagcttgaaagcataaaagtgcacttctcaaattcagcaccatgtcctcaaccagttggcaaactatctttgtatcatccgagaagaagagatgagacacatccaactgttgttgcttctatccccccacacatgtctgaataagtatcacttcttagccctttcgaacatcatgttatgtactttcataacaatggtaaaaagtaaaggtgatagggggtcaccttgtcttaggcctcatgacgccttgaaaaacgaagatggcccaaaattgatcataatagccaaaatagtgctagtaatacacgcctgtatccaatgcctccacttcctaccaaaaccaagcctacccaacatgtagtccacaaagtcccaactaacgtaatcataagtcttctccatatccagtttacacataatctcatctttattgtttcccatcatgtcatccacaacttcgccgcgagatcagcattcataatttgtctcccttccacatatgcatgttgacattccacaatcattgatttcaagacactcgccattctttttgcaagaactttagatattaatttataaatacaactcaacgagctaatgggtataaagtattaggagagtaaaatatttcatcgaaatagaagtgacctactcaaagttaggaatattcatctcctagtaaacatatatcacatatctgttaaaggaaattggcaaactagcatccaagctaactagcacactcattgatctcaatcattaactaaagttggcagaaaaaggctcaaatgtggatgcggaaatgtatcagagattggtaggaaaattcatacacttgtcacataccatacaagatatattataggtaatgtagtgagtcacttcatgcacaagtataaagtagtgcacctataagtagcctatatagtacttcattacttgaaaagtattctgaagaaaggaattatgttaaaaaaataacactctactttttgaagtatacattggtgcaaattatgctggatcactagtttataggagatctacttttgggtattgtagatttatcaaagggaatctagcggtttgtagaagtaagaagcaaaatgtggtagtttaatctagtgcagaatcagtgtttagggttatggctcaaggagtgtatgagcttctatgattaaatgtgcttttagaagatttgaagattctatcttgtatataggtggtgcccccttggtaccattgttgatattaatacaacaccacacttttattttaaaaaaattttgaagatttaatgagatacacctatgagattctactacaataataggtcaacaattagtattgctctaaatccaatacaacatgacataattaagaaggcgcgaatgtattttgacagttgataaattgatgaggatgagaaagattatggtgaacaattgtacaagttatggacaatgatttatggattattggggattagctgagtaatagttggttcggtaagagatgagatctaggcctagaagggcattaataatgaggggaagcatgttgatcttattcctcttaccattttatgggtggtgtagaaagagagaaacaagagggcttttgagtgggtggaagaagattttgttagagttagatacagatggctctaaatattgggttttttggttatgagacgttctattcattcttttgaggcgtttgaggattttattgacatactgacttaaaaatatttttgtacatgagtgacacccatttggtgcttgtgaattgatgatatattatactttttatttcaaaaaaaagatgttagaaataagtatattgaagttgacatgacacttcattaaagaaatattggatagtgggttaatttgtactccatatatgccaaccatttcactacttgctgatgttttaattaaaggattaagtgatcctatattttagacgattattgtcaagttgagaatggataatatctattcaccagcttgaagagtgtttagagtgcaaattatggcttcattgtaggtaaaaggtatattggtaatatactctggatttgtgtaatctttgtaattaatattattttcttttgttgttgttatttacttgtatatatagcaccgatattcaacaacatatacaacaatcattcttccaaagtttgtgttacttcattttctgcgaaaagaaaataaagaaaatgttcaattggaatgtaatttgtttttgagttaccaacttcccatctaaattatttggtggtgagaatttaaccctcccctggaagggcaaaaggtgaattatcatcaccaataaatgtaatgtcgggaagtgggaacttactgtaaaatatgtttcagttatacatattaagactaatatagaatggaagtaagaatacagtagaaattgaatgagaaataagccaaatgcaacctaagctcttttctatcatcctacatgtcagatgagtgggaagggagatctccaaggtaggaggacaaacccctcacaactaataaaggctgcataaaacataactgccgtgccacctcacagtgtaagaacaaatgattttctgttttcaacttctgctaacacatagaacaaatatatgataagatagttcatcacataataattggaattcagtacttagaggcctttatattgcatgtggtccaaacatttgaaatcttttaataacattcttaactataaataactttatggataataatggcaaaataggataataacaatttcttctaaaactacagaaattattagtggaaaggaagtgattttgtcttttagtattgctcagaaaagagttgaacatatgaatcttatttgaaatttagtttccttccaaccccaattttctgctctagatgcctagactaggctacctattaaagaaatagtttgtttctttgttttgttatttgacatttggctatgtttgcagtccccgtatctcacagatagggatttttaagtcttacatcttccaggttcctgcttacgtggttttctaatgcatgtttctaggttgatttggcattgctccaagatacggttccaac

SEQ ID NO: 8430 - DNA, 2435 bp, Carica papaya
  Intron number 10 from transcript evm.model.supercontig_13. 174 (locus evm.TU.supercontig_13.174) derived from phytozo me v7.0 (chr-ID supercontig_13; pos 1564884 to 1567318)
gtggctgttgatttcacaggtattcttctagatcttcaggtcatgattgctgatttctcctgtgtatccagttatctttttcttaatcacattttaattcaaggcataaacttatttgtcagaagtgcaatgcaaggatatccattcttatatcaattcttagtcacagcctctttgtttttatgcacacagatattgtttgatgttcaactatcaagctgcctactatattaggatctggttatgctttctatgatcttccaaaaattattcttgattcttaagtagttgggaatcatgaattccttcccttggctgctaagttagtgaatctctggacgctttatgattgatgttgctagcagaagctttagtatatttgttataacaacacttagcttctttgtagttcagaagtatggctcaatatataatttttggttatcactttattaggatctgttatcactttatgtgatgtcctacatcatatccatttacaaaatcttccccctcttgcagcctgccagcaagaagtaatctaggtgatgtatcccaaattttttaaaataaaagtgtgaagtattgtattaataaggtatcaaaacaggtactactcatgtacaaaaaattacaaaagagttagagtatcaatgatattcccaaaatccacatcactaataatatcataacctaacaagataatcccaaaagaatgcatccatctatctctaatgctatatgaacaactaaatttgtgtttaaaagcttttaattccgctcttttccagataacccaaaaaatagtaaatggaataatgtttatagtgtttctttttacatataacctatcccaaaccgaaatttcctcgcaaactaaacccgccgtgacccaatgaatccccaacaaaccataaatcatacaccataagtcatagtcacagggcaccgaagcagcagatgattacaggacttcttagccatcagacacatataacatccgttcacgagaatctatcctctagctctaagttcatcaattgtgagaatctttttccaacaagcttcccaagtaaagaatgcaaccctcaaagggactttagttttcagatatgcttgtaaggaaagttctgatgaaccaccgtaagatccttcattaagaaattgtagtagaatctaatcgaaaatctctgagacttctttaattttcaaacaatttgttaagagttagtgagatttgttatgataataaaatcttaagaatttccacatactcactaattttacagtcatttaagtttcttacaacatttatgaactaatttacattgtcattcgaccgttggtacgtatcttcaatgagtatgttcgtgaattcagcggtggaaaaaatcattggaaaacaatctttgagactgcctcctccatccactcattagcccaaaatttgattttactacctctcccgagtttccactgtgatgcatccaatttttgatttcttttccctagaaaaaccacaataatttgttgaggagttggcaacatgtaagtggaaagatttcatgctaaagttcccattaccacctaacttccaaagtaactcatcaaatcttgtggggtccactttaaaatggagcaatggtgtagaatattaatgtcgttggagaggtccatcttcagccactcatctttccaaaatctcaccctccacccaggagcaaccttcaacgaaatacacccacagaattccggccacccaagttggttaattctagacctgtctcataaggttcgccagacaaactgacccctcaacatccaccccaacccctcaacccccaaccccatgcccttgtgaagcaattacttgggtgttaactaatgcccaaaatctcatacctagactgtgtgcttcacaaataacttgtttacaatcttgcttgctttaatataaggcaatgttgggaaataacttgtttacaaattgctgaacagtgagatgctccacgaggggttcttatcttcatctaaacctaaatggctcaataatgaagcatctttatcttagccaaaaagaggaagactttcaaaggcctattccctttccaacgatcacaccagaagcttaccttctacctattgccaatcctgaaacacatcaaattaaatattccataaaattaactgatactcagacctatctctgagttacttttgcagatacaatattcccctagataatgttgacttgcactataatgaagcaaggtttttgatataactttggttaatgggattgatgcgaatatgatcaacaaccttcttttttgctccttttcaaaaagagctgttttaagacattatttttcagatgttttaggtgctggaatgggttcttatgactaattcaatactatgtctgtcagcttcaa

SEQ ID NO: 8431 - DNA, 2242 bp, Carica papaya
  Intron number 3 from transcript evm.model.supercontig_49.5 5 (locus evm.TU.supercontig_49.55) derived from phytozome v7.0 (chr-ID supercontig_49; pos 388894 to 391135 reverse strand)
gtactgctttgagagatacttgatagcgtgcctaggtatgctgggaaggttgaaaagttgccttatctggttgattgccatttgctttgaattttttctttggatgtaaaagacaatgaagtactttacttacacttttactcggcttgtttatgtcatttctataattgtcaaggctgtaggtaatcatctgttaaaaaaaaaaaacaaaattcagtaaactctattaaaatgtaaaaatatctgaaaggaacacagatttggagatctggaagtaagctgttgatctgtaggattttgagagcttcttaagtgaataagcttctttagtagaatgtctccaagttatgtcaggatacaaattttttcagagcatgccataagtgaaaaacagagtatcattgccatctttatttattttatttcagatggtctgtgcagttcccttgaaattatgagggaaattggttgaaactgattgagggaactcaccttattatgcatggggggataccttggctgtttagttcaaggattggcatttcttttacatgttaattagaaaaatttctcttatgtgtacttactgggtcccaaagtcatatggttagagtgattccgcaatgccacattggttctgttagatttggataatttcttctggtttatctaatatcatctgcctcttcacatggagataaattcagactactttattttcatgatggggtagagagtgtttactaatgtttggtggttgtttttgttctaggattgaaagaggaaaagaaaagaagattgtaaccaattattctagaaattttaagttgataggaaatagtctaaccaacatatttatatacttcagcatgcccctttacgctcacacttgactagaagggtacaagacaagactgttgagttttatttgtaatgtgaccagggtatccatgatttgaacatttttcaattttgaggaaaacacatttactgcaaaaatgggcagttcataacatgcaacctagttgaatgtaaaggaactcccgagaccattgcttgttgaagatggcatgatatgaacatttgtttgaattgctgaccagtaattatttctaagaggcatgcttatagattaacggaccgttctagatgtattatgtctcatgaacattgttgggggcttcttattgtaaaagaaaaagatgcttggggacttctggtaactacaaattgctgaccggaaatatatagaggtcattcctggtgcctagttattgtctgttcaaattgctctatcaattgtcaagacatagtaagtttatgtgacgtgtggtagtgtctggtaattgtgagaactgagctggactagtgaaataggacaactttaggatatgatgagacaagacaaattccatactgtactgggccatacaagataatgagtactgtcaggcatttggtaaattaatggacaggaagataaattatagaattgtcccaaatagcaattattccttgtttattttgatattttttcatgctactaaaccatatgttttacttatctaaatattattgttttaattcttttagttactaacaacattatttctgatatttttaataattaaattatgtgcatgtttaaaatacaagtaaaatcaatggagggaaagaaaaaattagagggtatgtttgggaaaattagtttctgcctttgtactttactgaggggcaatgttgtccatacttgggataaagtttttcctaaggtataggattaagatgctatccagtctcatgtcatctttactcctttgaggatcttggagactctgttgataatgtgattgatatgtaaatattttgtatacgggtttgcactcacttattgcttgtgaataaatcatactatattatttttatttttaaaaaatgctatccagtctcatgtcctaggttttacatgggataaaaatttgttctaaagcataggacagacataattccaatctcatgttgagtcagctacacggaactggattttatagtgctatctagtccttttctaggatactatagcttgtacaaacatctgaacaataatttcttctggtgctactaaaagacttttatttgagagtgtttatcattttttttttgccaatatattttttttgtcagttttgatttaaggaatgtggttctgtctataggtggagaggcacatacaattgaattc

SEQ ID NO: 8432 - DNA, 955 bp, Carica papaya
  Intron number 4 from transcript evm.model.supercontig_12.8 0 (locus evm.TU.supercontig_12.80) derived from phytozome v7.0 (chr-ID supercontig_12; pos 634338 to 635292)
cgattctttcctcaaggttctgcctttgaaatgtctgagtttatgcaagtttcctaacacttctctatcaaaatatgaagttcaattctgatgcttcaggatatccatcggtagggtcatctatgttgtcaaagtggcgtgaaaccttgttaactattatataagttaaaatttgcttcacctgtttcaagttacatctcccatatgtaaattctatggggcttttgaaggtccatttcttgattttgcatttcagagaatgaattactggatttaatgatgtatttggtctaatttgtagtttaaatgccactttataatgtccatgctaatgcactaattttctttttggaaattatatggtgttttgctcacttataaatgattcctatatggttaaagatattgtttttaacatgcaaaaggcagtggttgcttatttctagctaattttctaatattcatttaggttgatagactgaagagaagatagctttgtatggaattagtcttgtcacctggataatttaagctgctgttagttgtgcctagtcttgacaatacttcagttaggtcctgagagtacttgttgaaattgattacattttatcattaggtgtcaattgtcttctaaaaaaaggtgttaatggtagaattcttagttgcttaacttgcctttaagtagtttataacaaacttgcagatctcttttggaaaatccgtggcacaattcatcctttgaaggatctggttttatgagactgtttcttccaacaaatccagacaaccaggaattcttttcagagtaagtagtaatatgttcgtgtagacgtttcatggtttttcattgactatgggagcaagcttactttgttattttgaatgacagagattggattaaaaaatgtctggacctgtgggacacaattccaaattgccaattttggaacagcca

SEQ ID NO: 8433 - DNA, 353 bp, Carica papaya
  Intron number 3 from transcript evm.model.supercontig_176. 4 (locus evm.TU.supercontig_176.4) derived from phytozome v7.0 (chr-ID supercontig_176; pos 57153 to 57505 reverse s trand)
gcacgcttgcttgtcatcctcttgaagttttgaaggtattgcatcttggccatttcttctctatgaaaagaataaaatagaacaatttcctcttgttatgttttcaggaagtaaataatcttatttatcttttgctttttattgtagttcatgatgataattttgattctgctttttccatgattagtagtggttaatggcctccctttgtcttgtgattaactgctggaaaagtacgggatgctcagatgtatgttgtagtgaacctttgattatgaagtttatgaggatgatggttttccttccaatctttcccaggataggctgactgtgagtcctgatatatatcctaa

SEQ ID NO: 8434 - DNA, 1301 bp, Carica papaya
  Intron number 7 from transcript evm.model.supercontig_89.7 4 (locus evm.TU.supercontig_89.74) derived from phytozome v7.0 (chr-ID supercontig_89; pos 1074100 to 1075400)
agaaaaagaagaagaagaggaagagcaagggagaggtctgctactaaattattccattttaaacaagttttataattgtaggaatagaagccctgttatgtactttatgtgcctctctggatgtctaataagtatggtagaatacttcgaaggttcaaaataaaatttctagaagaagagcaagggaggggtctgccactaaatttttccagtttaaataagtttataatggtagagatagaagtcctgatatgtattttatgtcctcctgatgtctgcatgtgtaataagtatggtagaatactttaaaggttcaaaataaaattttatagtcatggttatgtctttaagagtgtgctttggttgaattgcaattcatgattttggcttcttgtaagctgctcccccttttttttgtagattttcaattttgatttctgtagcaactagaatatctattctgcctgcatgtttaatttttaggcaattttagatgagtttacctcatgaggttcctataagtagcgtaagtatcttttatgagcgaatcatgcaggtgttaaacatttttgtaaatacaatggtaaagctgcatggttgaacatgttggactagactcagaggtgattaaaacctgggaaatttttgaagtgttgatataaaacggggtatgaatggcttttacagaatagaaaactatgtatcttctgcaatcccttttcagaaaaattaactgatatagctagaaatggaatgaagatctgacggagatgggaagcaagagggaaacgacatggtataacaatgaattggttttacaaaatacaaaattatgtttctgctgctatctttacagaaagattaactgaaatagccagaagtagaatggaggtgggagaaagtagaagagggaaattagcctagtataaaaattatttccagtgatcaatccttatgtaaatgtttggaataatactagaagttactaattctcattaccgtattattctttgactaatttttgttaatatgttccttcatgcactttcagcatgctctcatccaagataatataacttgtagtgtgatcattcaaattatgaatctaatgtctcctgcatgtgctatattttctaaagcattataaatttccatgttcttcttgtctggctgcccgtttgtcctcttggttattctatgtgtctgagcttgatttatatgttctttttaatatttttacttatcctggaattttctttacattagacatcagttaagtacaaagaaggcagccatacagg

SEQ ID NO: 8435 - DNA, 1450 bp, Carica papaya
  Intron number 1 from transcript evm.TU.contig_35924.1 (loc us evm.TU.contig_35924) derived from phytozome v7.0 (chr-I D contig_35924; pos 1137 to 2586)
caggttagtatatataaataaatttactttcttctcttcgtcatgtgtactgatactattacatattaccgatcatcatttacttcttctctatatatctaatatggataaacactgcatttacatcattttatctctaaattagtctttgtatattaagacttgaatgattctttattaatcataatgatcaaagaatggatgtttaattgcatatatcttgcaaagaattcttttaatttattatcctcttttgttatttagtatcatataaactaattatgatttcacttttcattcttatcttagaaaagatcacattttttaccaagagatcaattagagaaacagaaatccttaataagctatttttaatgacatgcgagaattaattaagtacctattccttgttccaagccctataaatatatatttactacatctatgtgcaaaacacttatttcttttgggttgattattgaaccttcatatttttcttaatggttttttatttgccaacaaataattttcacataaaaatatagaaatctactattattaatatcgaccgtgttattgtaagtaacttgtgtatttaaacacttatcctaaaatgttcgataaattgatatgaacaatcaaatatctacatattccattttcaaatatttgcgttggttgcatcaagaattaatttatcatcaccatcacattatcttttgactttcactcttctttgtcttcttttcagttgaaattttaaaagaaacaagaaagtaaaggaagtagttaaaacctctaatataaataacataagtggttttattacatatctttttttttccaatatttccaattaacttcttgttattactttaggcttcttagagtgcattattaaaccaactagctaaaatcactacttaccttttgtttttgcaatttgcattctcttaattatacaacatgaaaaagtaatataatctttatctatgctcctattcataaataattgatttgtatatgatgaaatcaggttatatatctccatagaaaaaggttatgcttgaaataaattcaaaatcaaaatgatacatatatatatataaatgtatacttattttaattaaaaaaattataaaattttatttaaaataataaaatcgaatcaagataaaatttcagatagaataaaatagaacagataatacattgtaatgtcaatcaaatttgatgaaattttggatgtatgattccccttcctagtacaatttcacgtgtagtcaaattttttattatcataatacaaattctatattctcctagataaattaaatacagatttactaatgaatttcatttcattactgaatttattcaaaagataccaaatgaaagagaaaattaatattaaaaattagaaatgaatacatagaatttgttgggacag

SEQ ID NO: 8436 - DNA, 831 bp, Carica papaya
  Intron number 6 from transcript evm.model.supercontig_26.9 0 (locus evm.TU.supercontig_26.90) derived from phytozome v7.0 (chr-ID supercontig_26; pos 681166 to 681996 reverse strand)
ttgtctgttcccgacctacaaaataattgtaatatgtgagtacatttctgttgcaattttcttttaattagacttcacttaaattggcaaatttcctttgttctaagttgttgcttttgatcagtgattaatgtcttctttcaatatgtgaatctgctggatcaagggagatagtctgttgctatttcttgcatgtacttcgttctacatatgtttggttttcccttcgacaaaagcatgtttgttctgttgtttattcagtcttgctcttgatgctgctgatgataaagctgctgtcatttatgtacaatttagactgcttctctgaagggaaattgcttttatatttccaattaatttttgtagtacatgcattcatctcatttgtgaaagtaaggatagatactatttttcttgttaactttgttaggaaattatttaagacataggagactaagtctattgatttccatttcttggtgctatacctattctggcgagagaattctgaaaatgtaggagtatttttaaagaacctttaaaatgtactgaatcatgttatctagtagcatcttgctttccctttgtccaggtattcataaaattctgtagatttattcatatgctatagaaatgagtagtgtttgattcacttctgcgaatcccaaatgggaagacaattttcagtacaggaatttcatatgcttccatgggttctgtggtattttgagtggctgattttcttttgttttgtatttactggtattcattgatttaattggttattgtgcttcaggtttcttgcatcagcaaggcaattggcgaaagctc

SEQ ID NO: 8437 - DNA, 1743 bp, Carica papaya
  Intron number 1 from transcript evm.model.supercontig_157. 59 (locus evm.TU.supercontig_157.59) derived from phytozom e v7.0 (chr-ID supercontig_157; pos 386500 to 388242)
cttttgagcggccacgaggtggagtttcgaatacggtacgggagactttttttggttgctgagaaaattgaacggagtggagagagaaaacgttggatcttctgtttatacattgtagtgttttagttttgagtaggaaggaattgaaagcaaggatgaaaatctttatctcctctatactagatgagaccgttagcttttggttttgcttatttagaaaaatcattgacaatgatagtcacgaatgcttggaaattttgatgataaattaccattgttagtgcgagtggagttagaaaatttaatgttttagagatttggtttctcagtgttagtttagaaacatttccagttcaaagatgaaacttcaactggtggctctggtgtttattgggtctcaagtagaatttatgaaaattctaggagtgtggttttacttctcatatttccccttttgatgaccttagtatctttcttcagcaagcaatttgatttgtaatcaaacaaagtatttaattatccttgtaatttgaggcttaagctgaacagttagggtttcgtgattcagtgttggaattagtgataatgatttaattggaacctaaactttgccgaagtttttatcccattggaatgcttaatctagacacaaagttcccaaaaattatatatttttagctatttaggacttatatttatgaatgattgaatgacaaatcaatatttgattttatctattctacatacaagtaaaattcacatacatagaaaacaatataaaagtagcacccctccatccctattttttattactctaaattattattattctctgtcgattatttttggatatttcatttcaagaatagaaagaactatcaaagtactctagggcccttctactcttagcagactccattgaagttttgggattttgccttccataactttttgaagatgaatgataaaattttctcaagctcatcatcaagcaggcatctatatatctacaaacatcaatagtgagaaggaaaacttttgtagttcagtgtaattattataaggaagatcttaaggtttcaaaaattgcacaatacattttagctctgaattagattattgtaataagagttgctggctaggtttaactgcatatgtgctaacatctgccatactagaggtgtttaagagtttgatgcacttgtccttggattttgggctttatgtttgactaattggagaaatttggttgctggagttctacaaagaaattagacaatttgacgtgacgtaggacttgttttataaaggacttcattgacaattttatgcttgtagctcatcctgtttttattccatggttattatggtccttttggtcaattcttattatatatctttatttaagttctataatattcttgatatgtagaactagatcataatttttgtattgaattaattctactcttgccttgatttcttgattcctgcttggctaggtagggggaattgattaaaacccaaagattgttattcaattttacatctaaaaatatattggaactaagaaaaggaataatgtagaaactgaatatcaattgatccaaatggactgttagtgcatgaagttatgaattactttctcatctgctcttggcagatggcaaccaagttgtggcttatgaaaatgcaataattttgacaggttttcaagagtggcccgcttttcatatcctcgaa

SEQ ID NO: 8438 - DNA, 2968 bp, Carica papaya
  Intron number 3 from transcript evm.model.supercontig_62.1 55 (locus evm.TU.supercontig_62.155) derived from phytozom e v7.0 (chr-ID supercontig_62; pos 948252 to 951219 revers e strand)
ttcgtattccaggtcatcagagcaagttgcttctggtatgtatacattttagttgtacactttaatttgaagattatttgtcatttccagcctttattatgcaccctcaagatttagatagaaatcagctagtgtaatatttgaacattcagataattttattcacttaaagttgggatctttaaacagatagtcactaccccatgtatttcttagagacttagaaaacggtcttacctcttttatctttctaatcagtgaaatattgtattgccgttttttttaaataaacctttgcaagggtggtctggagatcattattgagtatatagtgacatggaaacttggattctgccgaatttactgacattggatagtctttgcataataaaatacagaatcagacttgaaagtatttggggttgctttaaagagagaagtcagagtcctaggtgcttataagtaactagtgagtaatttgaagtacattagttcttcatcttcatcctcaacttcctgtggggcatttctatgtttctgtaatttttacctaaatttccttattgtctaaactatatattggataagttagtttaactactaatcgtcattagttggtattagagcccaatttataatcctatcttctatcactgttacactgctaacaaaaaaaatcagattttctatgtttctgtaatttttccttaaatttccttattgtctaaactatatattggacgagttagtttaactactaatcgtcatgcgtcagttggttttagagtccaatttatatttctatcttctaccactcttacactgctaaaaaaaaaaaatcagatttttgcactatatttggcccaaaaaatctcaaaagaaagaaaacaaacaaacatccaataacccccacagaatgacaggttttggaagcattacaatggaagctactgaaaaccacgaagctcactgttaatctcttggtctcccaaatgttgccatgcttgatcttcatctttctagcatgctagaacaccaaatgttggtgttctatgctctgtttgaccagttcagacatatttgattagtccggtttaaccactctggttcttaaataggtgttacagttttttaggtttttatattgtattttacccatttttaagatcagattggtcagatttgcactttgcagttactttcgaagtaaataagctctaactcaatatggaacgcaacaaagttttagttacaatttctataatataccttattatgcatgatgtgtttttggtccctatggatggacaaggaggtttaatatattcccatacatcaagcttgggtccaataggaatttcttgaagagactgtgttaaaaattctttacatggcagttacgtgtatgataattgctgttggatgagtattgagtatctatttggcttatggagttaaagaattatatgatgttatacaagaatataaaaaagaggtaaaatcttcaactatagcttctcctaacttaaaagaattgaaccatgaagtttcttttgacctatctccacgaacaatacaagaattgccaactccagaaggttgttcctgccaattatattgagcaatctgccaatttgtctttgttttgactcatgttcctctagaatctacaatttcgacagccaagttcttttttctcacggagactatgagtatttgaagttgcgaacttttgaagtttgagtttctagaatctacaaatttcgataaccaagttgttttttctcatggagattacgagtgctcatagttgcaaacttttgaagtttgagtttcctttttatgattttttttgaaataagagtttcctttttacgattgttggtcatttatcaattcgagacttaaggtcgagttttcacgaagttaggtagagtgatgagaacaagaagatattggtttgaaataattttttttttcaactaaatattttttataataataattattttttgcatctttagtttatttaagtagcttttaagcacagtagaaactaaaattctttttattttttcttttataattttctttgttagttataattaatgcttgtacaaaggctagtatctaatataagagaggtagatcatgatgaaattgagaattcttttgctagagtttaatttataatctgtctttttgtttgttcttctagttactattttgtttaacctatcttgttcaggctgcttttttctatatttcttcatctggactcataatttcctctggcccacctccattcttgtgttcctcagctgaagtttccttttaaaaactatccatgaaacaggttaatttgatcactacttgttctgcatcatgtatattgagatgaatgagtaacttgacgaattaagaaaatgagcattttatgtccataggaaaaaatgccgtgaaaatattcctttttataacttaatgttgcttataagcacttaacaagtaatctgaattgccaagcaagtagagttcagtggttgcttcataagttgattttaagcaagataaacaccctgtttgttgcatgaacatctctcgctgcttcttgtgtttgtcggcagtgtatttgatagcacttgcatgctggtgataaccgatgtttgctaaacaggatatatgtacctattcttcgaattaggtggtgttagttacataagttgatcttgactgtttcaaatggttcaatcctttgttaagggcattgcatttttgccagtgcaaaacattcttattttctttctatggaaatctgaaatttttttgatgttgagctggaaatcatgatttaaaatggagtctcagaggctgtgaaacaaacaagaaactagaaataattgtttctcaatttcaaaatttgattgatcatatttggaaaatgggcaggttcagcatcagcagcaac

SEQ ID NO: 8439 - DNA, 5360 bp, Carica papaya
  Intron number 1 from transcript evm.model.supercontig_124. 22 (locus evm.TU.supercontig_124.22) derived from phytozom e v7.0 (chr-ID supercontig_124; pos 432188 to 437547)
aggtgaggtagtcttagtgatctgttctgttcatgtgtttttaatctcttcaacattattttgctgggttaaagctcaaatccttatctggacactgtttgatgctcaaatggagattcacctgggtttattgtccaatttttttgctttactctcttgtgggcttgttatattttcggttgggggtggtatattgagcttcttgttgttttgagtacggtttagcaaccgagtagtccatatatgagtgctgtttatgatttcttatttctcttgatgttgcgcatttgagattttctttttctaatttccgcacttaaatgcactatttctgattttttatgatttggaaatgaaatataacttcttttaattagttatgttggatatgaaattttcaattatgtcattatgcaagcaccaagtcttcttgtcttccttcgtaaattcttcataaggttgaagctatagtaatttcttgaccaattcatgacaaaaagacttggatattggaattaatgattttgaggatgtaccactggtttagctttttctcgaggattaggattttgtattgttttctcctattagtttcctttttcagttttgagttttatttctaaagtctgggcaccctttgcatcagcagtccctgaaaaattgccactactatggaagatctttgccatgttatttgagctattctgttcaaagaacttctgattttttgagtaaggaacttaggaggtacctcaacaaaagtattactttatctcaagtatatgatgtgtaattttttgctattctgatcatcttcaaattgaagctgttgtcatgttcattaatttgtctattatggctagagctttctcatggaagaaggaaaaatgatcttggacttgacctggcaaaactaagacaatgtaggttaaacttttgcaccttgaataagagagttatgatgcactgtaaaaaatataaagtaaaatttgacttcagacttgtatatttttagtgaaaacttagtcatggatactttcaattgaagaattcataagcaagaaaaaattgtcattttatggtgaaagcaacattgttggagaggagtagaaaggcaaaaaagagtagaaggttacaaaagagaactagatgtcctcataaagaggggggaaaacaaagaaggcatgaaaatggcgagaagaccgacttctctgaatcaagattagccacacaatctctctgcaaaataagcaaagaataatttttgaaatgcttatacagattggcccagacacaaaccaataactctttcacagtaaagaaaaaagaaaaaggagggaaaaatatccttaaaatcttggtatttcaactatacttggctcaaaagagccccatgccataaatacttagcttgtttagtcctaccaataccacagagggccaaggaaagtaaaccctccatgatgattggatttgaaatttctctctgaagagatagaatgacttgatacaagaagtctcatacattctggaattaggtttgtgtctttgaagttgaaaaattagaagtatctgattgctactctaagattttttgttgtatcattttgggtaccgggaaaagagagagaatattatccactgaactagaggagtggagggaacactgtctacggagcaagcaaattttctttgcattttgaggtggatacaggaaacttcatatattttagaagttagttttttttttttctgaagaaagttttgaaaatgtgattcttccctacattttcacctgtattattctgggaaattgtctgctaaactaaggtgagaaagggaatattgtctgctaaaccgacaaacatttttcctctgcatctacatatggatacaggaaaattgatatatttttgcaggtaagttttgtttctgaccccaggaaagttttgaaatatttggctgctactatacaatttttcctgcgtcatattgattactggagaagagggaatatcatctgcccaactaacaattttcctttgtattcagagatgtggattaggttaaattatagttaagtttcagattcaagtgtaaaattccaaagatatgaataagttctttaccatgatccctaaaacactcagacttttgtcaccaaatatgaaggtgtagggcaaaaaagtgtatctttttttgtaagatactctcaacattaatcagataatgtgttctgttgagaaaacttagatagtggtatcacctagattgaataacaagaaatcattttggaaaaataattttctaacaaggggagagatgaatgaggatttcattttacgaaaattaagggaatgatattaacaagttaccaagaaggttgtttttcttttttttttttttcggggcgggggggtgggggttgttgggaggtggtagtccataatttacatattagtctatgatatcccctaaatccttagctctattgtgatgagctctaaatcgaaaagaagggtttgaaacctatgatcttgaatgttgggaaaaagaattacacaatatcaaaacccttgtgttcctctatgtccaaatgagtaaaaagatgggaaggggattacaaaacattaaaagcccgcctattccaaattattgaaaagggtttggaaccttatatctctaactctaccaaaagaagaagaaacactttctctttccaaataaactacaagtagccaagaagataataggaataagttttctccttctcttatcactctggataccctgccaaattcaaatctcattcacaacagatcccgctgttgaaaactacaagtactggtttgagcaactagcaatgtatgcttattcccttatctcaagtcaagaatttcaggccagttgaagtcaagcaatagaatttgtgtcatatcactcatgttatgggtcttgcctagttgtatgaataatatggagagagctattgccctgtttctttcactatctagaaacattacaagtgtttcatcaacatggccaatggttttgatgttagatagaacaaagatgaaggagagtggttgaaagaatctctgctaaaattatgatgattgatattttctttttgggttgtcaatgcaaaagattattttgattggaatagtggaagattgcacagagattattttgatggttctgaactaagggaaacttacacaattaacccactagatctctgatgattgtacagagccatggtaaagtttgctccaatcacccaaggatgaatcaaaagcttccttatcccataagatcattctaaaaaagatacctcactcaaataagccttgccataaatgccagaaaagatttgaagtgaactatgagccttttgccttgtaaatgcaagacatcggccttctctaattgaatccttcaggaacgttcatcctagtgcgattagcacaataaaaggttagattcttaacgaggaactaccacagagtagttgtagatgaacttgtcccatatgagatcaaagggaagctcttattcttcctcccagtgactttgattaacctaacacattagaataggctgtgagatttccaaatgatgaaaagttgatggttgcaatggaatagttaatagagtctacaagatttactctggtatttctatttaaaaaaaaaagaaacggtttcgtgcttgtgtggtttaacattttggtgccacttctattgtaattttggatgcattgcaagaattacagtgaattatgaaaaagcttgcattgataaatgctttaaggagacaaatgcatatttttttccgaaacacttctcttctattgcaaataaaatgtcagctttcaaaattttcatccacaaaacttaaaaaagaatacttaccaaacagtaaatattgtcaaaaatttatgttttgcacagatgagaaaccctatatgcaacagctggtggtattgttaataaaagtcaagactaaaaagttagctagttccaatggctcatctatagcctcaagttgatgatgtataggttgataaatgaatgaagaaaatgttagttactgcttccataaagaaatcattgcttatgaatttattattacattacagaaccaatatgaatattttaaaagttcttataatattgtatatgaaagagaaagatatgtcatagctgttgaagctggttatcctcttaactgtaaaataaatgacagcagttaagctacttttatgattgtagtgaagatctaacaggggttattcaagaaattccttgcattgatatggttgttagaaacactaatgaaacataaacatgaaattaaattgcattaagaaaggataaatacatcttgaggcatcaaattactttttccctgaaccttgtctcattgccaacttctacttgaaatactggatcagaagttaatcaccaagggaagtatataaactagtcacaagctcatccccacactttcttgtcctcatgctcctctgtatcttcttaatcatgtattgagatattgagtttcgcctttaacaagaatctctataagtttgcagatcccccttataaatagatctgcagctggtttacccgtctaatcaaacatggctagagccagtgactagatggttgagtcacccaactcctctgcctttggagaggttgcaacttttgcaacaccctggagtaaatttggtaactctcattattaaaagcaaaactaaaaaacggaagatttttagaagctattttggttagtctggcgtggctttttccactggttaagaaatggttttttcctgtgttttaaccaaggcatggctttttccactggttaagcaatggttttttcctgtgttttagagaagctattttgcagaataacaatctggagtccagaaagtgtaccaaacattataatttgtcagagataaggaacaattattccatttactcctcattcttgtgaaccattgaatcttaaaggactttttgtttcctttatgcatgaactgcattcccttgttgcttcattaatgaattttctgtctttgaaatgcttttctttcttttgcttaaaattagtgcatccttatttttcttttctttttcttttctagcagattacactccaaatatcacttttcttgttatttctgtgttgtattgtatggctgatgaagatgatggccttgaatatccgtgtcttcatcttaatacaccggttatgtagatgttttgagttatgttctcgctgttacagctaaagaaagcactacataatggtgcccgtgtatctaatttttgaaattgcag

SEQ ID NO: 8440 - DNA, 3516 bp, Carica papaya
  Intron number 3 from transcript evm.model.supercontig_86.2 7 (locus evm.TU.supercontig_86.27) derived from phytozome v7.0 (chr-ID supercontig_86; pos 392359 to 395874 reverse strand)
ggtcaatttgatagcaaggcatccctaagcacaaggttgattcacttggcttagtttgactgcttttatatatatgttggcgttcctttatttttggttgataattgcaataatatttgttattcgtagaaaaggacgatatctatcaggatagaaagaaaataaaaaaaactgtggaaaatatatttttaaaaaaagaacagtgaaaaagtgtcctcttacaaaagtaacaaaaaccaagaattgaaaaaagaggaaaaggtgccaaatttgattacaaaacaatctttcaattcctttgcataatagaaaatgccaattcctgataaagtttgtttgtagcccacgaagaggcaacataagtcattttttccctaatagtatgaatagacttaattttcaaggagttgcgcggaagaatgtaaggagatccttgatagattcttagtgtcaaacctcatgtcaggttcaagcctcaggtatgtgtcaaaggttgttccaaaagggccacattggatcatttcctatatacctcaaattagatcaagtggggcccttgtccgttcatatatgaggacaaatggttaagggtgaatgaatgatggaggggcaatggggtgaatgcaagcccagttttagagtaacaccaaagttaaaggcgatgaaggttgaaattaagaaatggaacaaagaagagagacacagagagagtacaaatatgcaattattatttcaggaaattgcgacaatagatggaaggaagcttaagatgctttgtttgagttggaactagaaaacagactacagatataggagttgtcttagagacaaaagtcaagagcttgatgaataaaagagggggactgaaatataaaagttttcagttgtatggctaactactatagaggatccaactatgtggatggaaattgatggcagaatagcagaaggcagtaggagtttggggtaaggagttagggattgtattatgaggagtttgattggaggactaaactatacagtctcaattttaacacattggacgagttaagtaaggatttgatggaaagagggtttatggaagaggaaatctatgaggggcttatgcaatgcagaaaggacaaagttcctggtcttgatgattttaatatggtttttttttgcagaactggtatctggtaaaagaagatatagttgagctgttgaaagaaatgcatgaggcggggtctttcgtaaaatctcttagctttagatttgtgttatcaattgccaaggtggagggagcagtgaatgttagggaattccggctgataagcctagtagtttgtgtttttataaacttatatcaaagatgctagccaagaggatggtaaaagtgtcggtaagtggtgggggaatgccaacatgcttttatcgaatgacaacaaatcacgagctgcggcttttgtggataatgaggtggttgatgagctgtttttcaggaaaagagatgggattctgtgcaaacttgacatgaaaaaggtctatgatcatgttaattggtgattcattgattttatgctagcaagaatgagatttggagttaaatggcgtaagtgaatctattcatgcatcacaggacatgattcctggtcatggtgaatggggaaccatcgtcttttttaaggcatttagaagccttagataaggagatctattatctcccttattgtctattattatcatggaagttttgaccaaactgctgttgagagctagggaactggatttgttcagaggagtcattgtgggagaaggagagatgtttgaggaagtaaatattttgcaaatcggaagaaacatctactcaaccttagatgcgtcttgctctgttttcaagcaatttttggccttaacatcaatctaaccaagtctgaaatgttaacattgggaagtgggaattatacttgatagccttagaaattccttactgtttctacgctactcttgaaaaggcaaatctgggaggtaactgcaaaaatcactgggattatgaggaaaacaggtaaattctttgccgtattcctcaaaattccttttcctgggaaattctttttgttcccaagctatcgctggggttctgtttctcaagagcttatagagaacaatttctgttcaggcaaatctaagaggtagatgctctccccagggagcttttttcgcttggcaagcatgttgtggatgtattttgactattgataaactagtgaggaggggaaagatcatggtaaattggtattgtttatgtaagaggccggaaaagactcgttatcgtattctactttggttccccattgtgcatagtctgtggtctatggcttatgggattttgggattcaattgggttgtggctggtactgttaggtatgagatttgggcttggaagagtatttccggttggaaaaagtattgaggacttatccctcttgcaatattttgggtattatgaaaagaaagaaatatgagacttttagggcccgaccatcctgcttagggagaggtggttccggaccatcctgctttagggcattgtctcccttacatgacgtgagaggataaaaaatttcctgcttcgtgaatggcttctccacccatgtcctttcctacatctttagagtgttgaaatctagaccatccaatgttggtctttggatggtctgttcagggtacaagtcttcaagaaaagtgttcactttttctctcaacacttcattccctttgatgatgcaactatttatctcaaattcttccacatagttagttatatcttgtggaatgactagctatactgtgaaagaacttggcgtttttattttctttctttaattcaaatgtctcttgatttctgtctctatgctatctcttacatcaagaataaatttaccattttcatacaaatattaactctcctttctgcatctacacttatgaccaagcctcccttaacattctgtacgtcctctccaattccctaataagaccttcctttttcaagaatttgacccagatttgaactttattccactgtttggttgttaatttaacaagagtttctttgcaatcttttatctaaaaaaaaggtttcgttgcaatcctgtagctagcatgaccctccaccatggtggcatgataactgtttattttttgttaaattaaaaagttccttatttttgtaattagcactttatccaatgcatacattttatttttttgaataatatattatctacttttaagtaatttaaaatactctaatgctttaagcacatttcttccgacagtctcgaaactatttatattatatactgattttgtcttctacttgagtagggaacatcagtttcttataatctttaattggaagttaagacaccttataataatgtacgcaagtttattttctctaagttattaaaatttaaacatgattttcttcatgcagtgccttcagtgagcaccttggtcacaaaataacaa

SEQ ID NO: 8441 - DNA, 933 bp, Carica papaya
  Intron number 1 from transcript evm.model.supercontig_21.3 2 (locus evm.TU.supercontig_21.32) derived from phytozome v7.0 (chr-ID supercontig_21; pos 420090 to 421022)
gaagctggtggccttaattggttagtaggtaaggtgcgcattttttcaaatttcttggtagaatattgacttattaatgcacttagaagcttgtaatacatttgatgcattcgaaatgctaatgcacatctaatgcatttctgtataaagccttgtgcgagtgcttgagctcatttttagtccactaatcactgctagggtggtttagttggcatagactttgagacagtcgctataggattggctgattttgttttgttttctattgtgaaaaggccttgaactcacttgagtatgttgcttggttgtaatttgtgatccatgttttcatgggatctcgtgatgcataggatttctaagtgcctaagttgttaaaggagctctattttttcttgggctgggttactgtaaactaggcatctttgttaggaaaaatacatagagagccctttttatttcttctccccccatggtttttgatatgagagtcgaatgctttggaaggatttatgtttgtagttttgggcttgttgtggttggagagaaatgcagagatttttaaagactgtttcttatctcttctgcttatgtggcaaaagaatgacatctctctggactaaggctcatgggctctagaggaccatctctttcactatcttgtaaattgcatattaatttttgttttttttttctcactttgatctttgttatagggatttctttgacattttttctcatctttctctgatgatatcttttccatttaggaaaaacagcttcaagcttcagaattaaatctcatagtgaataatacttctttttctattaaaaaaaatctcatattctgcgatattcattttcctgtggtattttcattaacttcttttgagttttgcttttccagaattgttgcgtgtcatcaggaggttgagc

SEQ ID NO: 8442 - DNA, 1491 bp, Carica papaya
  Intron number 1 from transcript evm.model.supercontig_94.1 1 (locus evm.TU.supercontig_94.11) derived from phytozome v7.0 (chr-ID supercontig_94; pos 307518 to 309008 reverse strand)
gagtgccccggtgactggccctacatgaattttggatataataaaagagtaataaatagatataaatcatagtttcatacaaaaacaaaattctttttagttttatctggaagggtgcttgacgtacaaaatgtatggtatttcttttaatgaaaattagctagtaaaaggaatttaggtggcctgttagttcctaaaattatttatttatttatttttcgtaaacataatatatattttacggaaaattttagtatgaaaggcagccttatggagctggatgtttgtcaaagaaaacacttgtctctaactcgtttcagatgagaaacaaccttctagaaagttcttattttggcattttttatgttatgatattcgaaacattcttagtcggcacattatggtagtttttattagtaggatttagcagttcccgaaagttatttatagtctgtgtcagtcaccttggtggtttctatagaattttttgctataaagttcaacttctatataggatgttgattaatcatttttgcgttgaaactgttataactgctaaagttaggaaatgctacaaatagtaaatgatttatccatttatgctaatgatattatttgatttcaaagttgggatttaggacatgaatgtggtctaggaaagaagctaaattgtaagtttgtttccttagagaattgagtgaaccccatcttttcacatttcccaaaatttgagttacattctgaaatttaaattggtagtgccagtcttggtaggttacgttgccgattctttatataagtaggtgcgacagttcatttctttgtaaattttgctcccttatgttgtcttcctttggtgttgcttaatgaacaatcaattcatgtttaatcttgtgacctccaggaaaaaatggtacaaaagcggcactttaacaatgagaaagatttgaggttccttccaagcatcccagacaattggataacgcagacgagctagtttcattttcggaaattgtttttcctcattgtatttccaagaaacatcactcttcaggtgagagggctttctttgtgtatgtaaagttattaatacataagaagttgggttttgggcatgtttgttccaccagttatatctttagctatttcttttctttgaattatgcaagcctttttaggctgagttactgagcaaggattgaatttgttctatccattgcttatctttgtcctgctaatcaaattgttccttgtctactgtcctaatctccttaaatttgcaaatgtctctgctcccctggctgatttttattctttcaacctttgtattagtcgttgatttttgtttattttttaagttttgtttccaagcaccagtctcatctgtatggatagaacatttgaatattcagttattcattctatagttctctttgtgaggtgattgtaataattgtgacttagacgtaatctataattttgaaggagacg

SEQ ID NO: 8443 - DNA, 1772 bp, Carica papaya
  Intron number 24 from transcript evm.model.supercontig_17. 75 (locus evm.TU.supercontig_17.75) derived from phytozome v7.0 (chr-ID supercontig_17; pos 944991 to 946762)
aagtatcataccacaatcaccggttcttttctcaggtacttactataaaattttaaactatatgttttgattcgttaccagcctctttcttcaatttgaaattcctttgatgttcaaggaaattcaataaacattttgattttatgagcatgcataagtatcaagaacttctttgagcatttttcttttcatatgcatttgtatatttagttacagaatggagtgaaggtaatgtctgtgcatgcaaaaggagtctggtatgacgttgaagctttaatttgtacctgaacttggtccatgtaatattttgctcattggcttgccatgtaatattttgctgattgactaggtatataactaaatttgagactatgtttttcagccacaatttttttgtaactgtattgctaaacctgtaattctttgtcattcacattctctatcataaaagaaaaacaattcccacaagacaaatatttttgttatttcctttaaattgtgtggagatactgtggttttttcaggttatcatgttgtaactggacaacctaagaattgaacaatgttgctatcttatatgagataaaattttggtcaaagaagcacatacaaggattcaagtcggtcattttcagtagcttgagcttgtgttatgagcattagtagtttgagtttgataagtttttagcccaatggtgcttagacttagaagatgttcacatatggcattgataatgctatcattgtgctatgagagtgtaatcgttgattgctgtatcctaacagatacataaaagttaatgatgttatatagggtttactatgttatggttgtcttgtaatttttttgtacaaggttattattaatactgcctcatagctgtcgaaagaatacaacctttctcggcaattatctttggtctccaaagctcaagtaatatttggactttatatcatgacctttatatgtgaccttaatgagtatgataataatcgaagtagggtcaaaaatgcagaataagatctcagtttggaatatagtttgtattaaaagaaaagtctgtaattgttttatttttctttctatttttaagttattcggatttattataatagacattatattattttagttaccttttattcccttatatctggccatgtttgttcttatgattattgttttatctaatctatcttgttcagcctatttctccctatgtttttttttcatatcgatatctaatttcctcaagcaattttcattcttctgtttatcacaaaattttctctattattaaattatgtacaggacaagttagctttgctgttactcatcctacataagtaaagtttgatattatattgcaattagaacaggaacatatttgattaagctcatataagaatgaagttctcaacattgagattttgagctcaacagtttctggactagtaattcttgagcttggagcattacaattacagctgcgatttacaaatagcaagccaagctaaatcagaaagatatttatgtcataggagcttataaacatttttctagataaaaagaaggcatgtgataaattagaaacaaatatatcaatgaggttcccatgtgcttttcatccagggaaatatgtcctgataaaacgtgttttatgtttcaataatactttgtgatataacatttaaataatatgcgatatcattttatttcttgttgctattttataggaactgtacgatttaatcaccatccttttggtgag

SEQ ID NO: 8444 - DNA, 1366 bp, Carica papaya
  Intron number 3 from transcript evm.model.supercontig_3.50 7 (locus evm.TU.supercontig_3.507) derived from phytozome v7.0 (chr-ID supercontig_3; pos 3620032 to 3621397)
gcagaggagctaaaggcatgttctataccttttccactcaaggcaattattaatgtatttaccagtattatatctttctatattatattctccaatttaatgcacgagagaaagaaaaaggatctctggaggtatgtgctgtgttttccccattcaaggtaattattattgttctatataccatttattggtgttatattatgttctatatttaatgtctttgtaaaatagcaaaagaaaaaaggttacttaaacatggaatcggtgaattttatccaccttctgaaatgtcttagtttgtttttttgtttttgttttttttttaaagaaaaagaattcatctgaaaataatcttccacagaaatgattgctaaacgctaagcactcatgtcattttttccttctgatgctggggcctgggtggagtatggagatgatttaatggtcattcgagagcagtgacgttagattttttgcttctgcttcaataatattcagctactgcaccactttcgtttacctcctgtagtggaaatgagttgtctaaattcacttcttataagagaatatggacactcctcttgaatttatagtattagtgagagaaaaaactattgtactacctattaattgtacttcttatagttgtttatctgctgtttcatgagttgcactacaaacaattagcatggtcaaagccaaaccaaaatttcgaggtaaagagcagttagtgttggcagaattaacgccaatttttgatgatttccttatctattaactgtaactgagtggcagaaataagtagcaataaaacatttaaattgagtttgaactctaacctattgttgaaggggaaaaatgaatcctgcatatcaagagcaaaagattatttaataatcttgtcgataccttctaggcttattatcgtacagttagaatacagtaaaagaagatatgtaactaagacgctggataggtttttatttcttgttgggtaagctgaactagtgattcttatgtttcgatgttgtctctagatgaattcatggtttacgataacctgctgttcttccagattaataccataagtaaaattcctttgtgattagaattatataaccagaattaatgcatgtttttatgttgttttcctgcagttccagaaacaagataggatatgataatacaataatactgaatttagttttatgttcattgtagatattgttttctcttttatagacatgctggaaatccaagacgatgcacaaagaaatgttttaccttgcaaaaagagaagtggttttatttccacctgttttgttttgcagagcttaacgggtggtgtcttgcttctcagaaacaa

SEQ ID NO: 8445 - DNA, 1939 bp, Carica papaya
  Intron number 1 from transcript evm.model.supercontig_119. 44 (locus evm.TU.supercontig_119.44) derived from phytozom e v7.0 (chr-ID supercontig_119; pos 265140 to 267078 rever se strand)
caagccaaaaagaaggaaatagtagtccttgtgtaagtatgaattatgtgcaattttgtgctttgtggtgtatcccatgggggttttagttcttttgacacttaaaatgatgcaaatttgaatttaacaaattcctgtcagcttttgagatttttgtttccgttgaatctacttaattcctgtcagacttgttttgtgcatgcaaccttactgtaggtcaagggagaaaaatgtgaaggaataggacaataaaagagggagagaagcaaaatggagagaagacagggaagcaaaatgtcagatgatattttattccaaatcaacctattgcaaaaccctaaaaaggatagctttatatagacattaagatacttgcaaataaagaacttgcaatatcctggttgatctgtaaatacttctgcatgtaggtttgcaccatgttgatgcccttaaatatgttagcatacttttctattaaaaaagactcgcaaataaagaaataaaatcaatttaattgtaaactttctccaaataattctttcatattatctatgatagcacgaaatttactcatacagtacaaaatctgaatattactaactctctttaattgtttggactgtcacctttgcggaattgagtctccactgttttggattgtcacctgcctgtcctatttgatttatcaaaagtaggtgtctgtttgtcattgttgacgaatatacgtatgtctcatttgggtttacttaccaatccccagttatggttttcatattactcttcacatgtatgactggaatataatcttttatgttcgagctacctctatcccggctttgaattcctcggtgagaatgtagttcctttgattaccaggaattaaattccttgcccaaagaatctaaaggtgggaatggaggtacttcaaataaatttttttttgaaacacaaaaaatgatgttcttattatgcaaattaaggctaatataaaagttagaactaggaattgaatgggaaatgaattaaatgagctgttagtatgtgtctgatttcaggattcttttatagcttcgtttcttgaaggaaacctagttgttttccgtatgttgttttttattccagtacaggttactagcagtttgaatggatgtggtttgtagttgatagtcttaatttctttagcatttagaatgcaattcttggattctaaagcacttatcttctttatcataggattttaagatggggtttagagatggtaaagcatcttacacttgccattttatgaatgttttatatgctcattttcaaatgttttatatgctcatttttgcacatgggtttgcattggtttggtggtcatagtcaatggatttatactaattatttcaaaaaaagaatgtaccatattttgacttctcttagctagagcctatacatgttgtacacgccattcttaatcacttgctctgttttcctttgttcttttttcattcagctttaattgcattgcagtttgggaattgttcaacaggactttattttgctagtaaattaaactcttcttttatactctttttggaaagaagcaaccttcttttactttgttatatagttcagctatattgagttcaatcgtcatgaataaggaatgctagaagtaaatatattcttaagctttgcatatatggaatttggaaattgaaagccctgttgtttaactgaaaacgaaaatactactgcacccattctgtgaaaatcattagattgacatgtaaaaaacagatattgtcataaaaattaaggtttagcgtgtttgtactgctttgtaacattagaaaaatgataactggcctcaacattatacatgctccagccaaaaatttgttggtgttcacctgtctcctattttacctgtttttttgtgtttaggtgatat

SEQ ID NO: 8446 - DNA, 1570 bp, Carica papaya
  Intron number 3 from transcript evm.model.supercontig_25.9 5 (locus evm.TU.supercontig_25.95) derived from phytozome v7.0 (chr-ID supercontig_25; pos 990486 to 992055 reverse strand)
tttggtgccagatttggatttgataaaactgacaggtaattttaactgaaacgtgagttttttctttactcattataaatagtaagattttaccctttgctggtgtgttttatccaatataatctggcaggcatctagatattttctccttcatctggctaagagctttctctatggtgtttagttcaactatgatgttgatgcaccttttttaacccattcccctgagttgtaagcctccatagtttggtcaatgggcagccagaaaatctgcttcccccttaaatcatgtttgggttgctcttcagtttgttatagttcgattaagttattgaaacaattagttttgaatttattaagcttattttgtcttaattgcatgtgtactaagtatgactggtttgctgaatgaaatacagctggaatataatagctattcacttggaatggaataatgttacaataggatagtgattacattgcaacatttgattcataattagtgaaatcgcattaataactcagtatgatgtttgtctcgattgtattaatgactggaaaaagttgtaataagttgtaaatgatataatagccctatttactgaatttgtttaaaaatatttttattacatgtatatattatacaggtaaattgataaattttcatataattaatttagttagtaaaattatatgtattatatcttaattcttatttcagattatcttaatttcatgaaatcataaacttcatataaattaatctaaaaccgtcttaatcattgaaattcttttgtaattttttcttaagattcaatttaaaagaatttctcaattaattaaaaagttttcaaatatcaaatcatcttataactataaattttcaaatatattttaactttataaaaataaaaaattgatcttttaattatccaccttggtgagtaaaaaaacagtgttcttaaaactaaaattagttagtttagagataatcctgattcatgacccttcaatcattaaacaagtttggagcttttccagttgtagtaattataatgtaattctgatttaaccagcctaacagttataataggtttctgtcacataataactgttatatttttggcatattcctatcttatacagtgaaccaaacatgcaataaatgaataggtgccctagttcttggtagctgttgcttttgtagttggaaaatcatgtctttttttttttttgtcttttgtttcattagtccaacggtctgcttgtataccattttcttgacatgagcatggtacgagtgagtaactaaggtctttcttctcttttccccttttatattattttcagtcatatactttaagcattgcaggtcacaatgtcattgaactttgtttaaatgttggaatctcatgtctgtagaggaacatacttacagttctggaggaaaggaaaattaccttctgtgacaatgggatattactgattttttttttttttttttttttctgaattagatattctattttttaatggaaggctgtttggatgcaggaagaggctttttaac

SEQ ID NO: 8447 - DNA, 2773 bp, Carica papaya
  Intron number 4 from transcript evm.model.supercontig_541. 1 (locus evm.TU.supercontig_541.1) derived from phytozome v7.0 (chr-ID supercontig_541; pos 7724 to 10496)
ttggcagtcttaggcaatttgaggtaattctatcaatttcagggtaattaatcacccgtagtttgagttgaccattttcatagtgttggttctgaatcttttaatccccattgcggtgcgtgcagctttatgtgcatgtttgtgtgcatcaagttaacttttacctaattatgtattttttttatatgaaagacctgattatattgagatagaattgatctaacattttctcttattgaagtgacctaatttttctttcaatagaatagatataatgataaatagcatgttgattcttgagaattcccacagagattaggtacatattttggatttgatgcctcacatttgagaattgtgaaaaaatattgaatggtctttaggtgatttgctactaaggattagttgaggagagacaatcaatgacaatcttgtgaggagatcaactttagtctctcttatgtgattatcagaatataagcggagtttcatgagtaaataaaataattctacttgtttatcattagaatctgagctcttctttgtaagcaagcagaatggaattcttggagggataagaagtgaagagaagatgagggttcaggtttatgaaattgttcttgattggctggaatccagatggttctgcggctgcttaacaaaaatactggatgaggggattattttgttctccagtgtgtacggtgctgattgttactgaattgcataaaaaaagagggggtcatttgttgtcattgtctaaatatggagtagatcatggcacaccgcgggtctgttttccagcagaaagaaaaaagaggatggaaagaagtgttagcgttgattagtgacacactgtccagaggagtggaggcgggagaagcacaaagaagggggaggaagcaataggggcgtgcccagttttcggccactgtgcaacctgtaggtggtggaaataatgggggaggatttgtgggcagtgattcgattttcaaatgggtcaaaatattaaacccaaaatcttattcaaacttcaacagaagattgtgaaggaggattttgtgagattgagggatatcccactggtagttaatattgatcaagaaggaaagataacagataggtggggctataagaatcgtcagtcaaatatacaaaatgggttgggccgtgaagcctaaaatttggctcctcaaaatagcatcattgggcctttgataggtttttgtgcctgttccaaaacaggctcgaacacccaacaggctagggtttggagacccagaccttcaacccgattcagcacttcacagtctcacttgttgctcctcagcccaaacccaatgttccatcttaaccaaaacccgcaacagaagagatgaatgctgccgccagtcaaaggaggctgaaacccattattgttgttgacccttcttttcttgtaacggtgccactggagacgtcctctttggccggtattacacctacagctggagatggtattattggaggtgttatttcttgtggcggtgcggtgggagatttgacaaaatatcagctttccaagtggcaacatagaggaggattagaggtggggagtcggtttttgaccaggaaaattttttggaatgggtgagggaacaaattagtgagctgaagcaaatatagaaacccaaagacaaaacaaaaggctaaaggggttggtggcagggggaaaaaagagacaataacacagattccatatccactgttgattcttcagaactgataatcttaaaggacgaagaagagtatggggaggatctatgccaggagaaggctaattgcaaaaacataaatgatatatgggaggggctacaatttattgtggataatacaacagaggtggggtaatgtttgtgcaagggtaaacaatcaagaaagtgatgagccaagaatacaaagtggcccaaataaatgtacaatatgcaagaagaaaacaatgtttattcctagtaaactgtgtgtccctgagtaagttttctaacctaagttcttttcctaccttatgtgtgtctcatgagttaaaggtaaaggtatttatgtggatagccatgcatcaaaggctcaacactaaggagatgcaagtccgatgatcaaaccatgcaaatctctagacatcttcctaatctgcgcaatatcaattgcaaagttgctcggaagctttggtctaattatcaactctctttagcattaggtcactcctcctacggttgaaaggcttttaggggtgtactttaagggttatggagtgataaaggaagcaaaacttttgcagtgaggggctatcggcttatggacaatatggcttgcacgaaatcgaaatttttttgtcaactgcacgttgttccatgagatatggatagggtgactttttggcatcgttatgggtcaaggcgtgtgaaaaattctctacctatttccgaactccattggaactaggagatcattatttcggtcattaatttagtatattcttaatgaaatttacttatttataattttttgggcttactattatctgtaatatctgagggtatctcttcctcatttctttgtattgatttcctcttactgtaataaatcttctttttcaatcccaagaaaaaagtattgaatggtctttagagctttccacttccattttgtactttgatgctaaaatgtgtgttttacctattcattcttttctgattttgcagttggaagtttgggcaaaggagagagaagttgctgg

SEQ ID NO: 8448 - DNA, 1556 bp, Carica papaya
  Intron number 8 from transcript evm.model.supercontig_231. 9 (locus evm.TU.supercontig_231.9) derived from phytozome v7.0 (chr-ID supercontig_231; pos 89306 to 90861)
ttacacttggaaacactccaccgaggcaaaccaaggtttgattctttatatactctctatctgtaggtgtatctctcccctattttgtttaaagtgttttccattattcatttgtttattgatttgattcagtaatcactttcttacaggaagttgaccacaagcctttaattctttagatcatatgaaccatcaaataactgttactgtcttttgagaattgaatgctatataattttaggaagtttaactcatttgctgatggactgctgacctcaaatagaggcctttttttaacggtgcactcataatttgttattctttgtctggttaagagaccaaaattaagattttctttttcattttacaaagaacttggcctgtttaagaaattaacaattaccttttcctttctttttttagaaaaaaatttgattaggacttcatgatcacattggactaaattttgtcttgtacagttatgtttttactgtgattgtggcaaagatcttctccgtcatggatattggaattaattattgtgaactgagaagatattgttcaagtaattcttcaaaattaactctatatcatagtaaaagttggctgttagctaatcttctattacaaaaatcgatgactggtacttgatccatcacccagtgacgggcattttgaattgggttaagtaatcccaccattagaagattatttctctgaggatattttatgaagtattgttcttcctttctggtgactgtggactaaatgacagggaaatattagaaaatggatggatgttgcttgtttgatttaggttggatttgtggatctatcttccaaaggaaagttgatgaaaagaaacaaaaatctgtattttcctttgtttaggctatgtctgagatgaattcaaaatttatgtggaatttgtttgcaaatttacatttatttgaagatgatgaaactcttacgtaaaatgatattaagttcatatagtactctatgtggaattccatatgagctcaatttttatcatttcctaagagagagtgtttgtgatttgcttattttatgtttataagcaattttaatcactttgttgtaagtggtaacatgaataacaggatgcttattaggttcttaaatgtgattctaagaaggtaaaaagaataaggatctcattcttaattttttaggttcttattcttttatacctactcaaatgaaaattataaataacttaaaatgtcctactgtgctttatagtaagtgtggcttacttattgcatctgttcatataaattctatattgttccaaatgtagcttagcttttcttttgcatctgttcatttgtgatagtatttagtgattacatcaacagataggaaactaaggtttccttgttgcaagtccatgcatagaaattctcactgtttgtgtatagttatgggtcgatttaccattttcttggtttttattctccgtgaaattgtggatggatgtgcttactttttaaaccttcaggttgtatcaactggccctaatccagagtggg

SEQ ID NO: 8449 - DNA, 1337 bp, Carica papaya
  Intron number 6 from transcript evm.model.supercontig_46.1 59 (locus evm.TU.supercontig_46.159) derived from phytozom e v7.0 (chr-ID supercontig_46; pos 1558043 to 1559379 reve rse strand)
ttaagcggcatctctgccttgctttggtgcgaagggtaagacttctttattcttttttgttctggtccctgctatacttttttctggcagcaagatgacattctgttggttgatatagaaagcagcttacacagtgaatgatacatttcatcacaagtttttggtgtaaaactgtacagctagtttcctaaatgaattgaacagcttttttacagtaatatacaatgaaaaaaaaagatcattttgtgcaagctgtaggaggtgcaactaaagacaaccaaatcaagggtagacctttaatttctaacccgagtacttgaggtctgaaatcaaaataatgatattatccaaagtcgacagatctcatagtgatgttgtacaagttagagttaatttgtctgtttagttatttgggtgaaacctagatatcgcttttattgttcttagttattaccgttagatttgattgatcataccattgggaatttctcaaaaatatgtaactgaagaattgaaatgttttaggaagtgaaattacagtgatatttacaatgtttcttaagtaacctttacaaaataggattaattaaaaaatactaaaactaataagattggaaatactactcttaataaagtaagaaattaatactactaaaattaggaatactactactaatagaattaggaaatattactaatacaaataggaagctaaatattaataagttttaaagttactaagctataataatagactcttagataatattagtagtttatttatataattatgatttctagtgtatatatgtaatctatagctactccattttacatcacatagagctctgcctcctgacatttatttgatatgttattatagtttagagaacaattgtaacctttttctctagtgtttttgagccgaaattttgtgaactggattagttagtgtcctccctattcttgagaattttatcgtatctacctatagggatataaggagaaccaaggagcacagggcttatggtgaggggctatattttgttgtttatggatcatctggttggaacatagtgcaaggatttttaagcatcattttcaagcatggcatggtttaggacgaataatttttgtttcatttgttttgcactgaagtccgtggcttttctacatggaatttttatctccttgcacggattggatctctattttgtcttatcattttttacattatatactgcttaatcggtctctaactgacaatgtccgatttcactttgtttcaatattatgaatgccttgtatggtgtcaataggttcctttatttgagagt

SEQ ID NO: 8450 - DNA, 2497 bp, Carica papaya
  Intron number 2 from transcript evm.model.supercontig_76.2 (locus evm.TU.supercontig_76.2) derived from phytozome v7 .0 (chr-ID supercontig_76; pos 20325 to 22821 reverse stra nd)
cttgtaatgtaggttggcattttaaacaagcaggaaaaaatcataccttttgtttatttatttgatttgactacttctagtaggttctgtagctaattgtattcttctgcaaattaattacttgtaccacttctggttgaaccttttttctttgtttggttttggtttgaagacagtatattatcaatatatagaaacctacatgttgagcttttggtatgttatttgtaaggaaaaagaaaaagaggggatttttttgcacattaaaaattgcgatcttgtgaatttcatgttggcccagtgtttggatagctaattgtatttttcttcaacttaattacctctatcagttttggttgatttctttttctcttttaattttttttttgaaataaaagaaatgtattattatacacaaaggtaccaaaggggtaccgtctgtatacaaaatatagttacaagtcaataaagtggtccatgacaagtccaaaatcatcccaatctttgatgtcatgacctaacaaaatagagataaaagtgtgaactcatttatctctagtgtttgtaaaattagtctctatagcttcaaatgctctcgcttttctttccttccatacaactcaaaaaataattagtggaataagtaacaaatgtcttttcttctaaacgaaacccgcccatgcccacagctctctactcacattatcagccataacccaatttaatcccaacaaactcaaaacagtggcccaaatgttttatgtggccggaaaagtcaacaataagtggttgcacgtttcctcatcagatttgcagaggtagcatctactaaccatagtgctacctttcctttttagcatgtcagtaatcaaaatacatttatttgcagtaaataagtaaaaaaatgtcattctaggaggggctcttgtcttccatattttcttgaaaggtgctgttttgctgccactgttatcactcatactaagaaacttgtacaacgatttcactgaaaaacctctcttctcatcaagcttcgaaactctttacctctgtcatcattcagcttcatgctgtacaaacacaataacagattgctataatcatttatttcccaatcctataagattcttttaacttttttctcttttattttggtttgaagaaactttactgtcaataaagagaaacttacgtgttgacattttggtatgttattctgtaatgaataaggaaatgaaagaggattttatttttcctgcattaaaaaagtgttttttttttttaatttcattttgttttcctcagtattatgtatgttccactccaatcaagcatcagtttccaagtaaataggaaatcaaccccttattcctttctttgatacgagttgattttttcctcgggtgtaatatctttggtgtgtgattagaaaataatttgattgaactctcaagcttagcaaatcttggaaacattagttacgctggggtttctagccatttttcttacattcctttttaacacaaaaacattaaaagcattcaggcatggattttgaaatataacctgcttgagaccttatgttctgcattgaagcaaaacgctctcttattgccttggcgtaaatatcttatgtgctgagcatgtcacctcaattccttggtggttttcatttgctgcaaggtgtattgtgaacgtgacctctatctttgattagcttgatgtttattattcgatattgagcatattatcataaatttcttgaggttttgatgcattggttcttaatgtgaatatatttgttgaagtaattattgttgatgatagtaaaaattaaatgtattgacttagcaactatttactgatagataattctataaatctgtttatctactgcatatgaaatcttaacttttctttacagatagacaatcctataaatctattgtgctgtagatttataggattatcaacttttttctcaactttctttgtctttcttttattgtgctgtagtttaccatgtaacccagatttgcagggtctgaaggtttgaacagaatttatttacttgtaatttggattaagagatttaatgtagaactgattttaaaaaatataacgaggtttgagtattttattttacttttaatacttatgctggtacttggtcaaaccgaccaaagttttattgttatgtaaagcaagggaaactatttttatgtatcaaggcctaatgtgcactctgttataatgtatgcatgtatggttaatggtgatatattaggtgtttatttatgtccgacttactgcccatatttacaatattgtaatttcttatttttatagaccttctacaaaaatttcctaggctttttactatcatttcccgaagcttttagaggtttacttgcattctgtttgtttccacttggtcatctttcattttatcaatataggttgactcgagttattcatgttgacgagcaggttgaaa

SEQ ID NO: 8451 - DNA, 4791 bp, Carica papaya
  Intron number 1 from transcript evm.model.supercontig_61.1 8 (locus evm.TU.supercontig_61.18) derived from phytozome v7.0 (chr-ID supercontig_61; pos 511632 to 516422)
ggttgggaacctttcaaggtataacatatgctacatgaaactgttttcatgatatggaaaagttttttaatatgtactctattgatttacataagaattagcgtttatttttcgaaattttgaattcaaaataaacatgataatcttatcacgtaagagttgtatttgcatacatatatgcagcctacctaaattatctaatctgataagaattttcagttgtaaccttgcttatttaaagaactcaatcatcaatgaacatcgatcgaattctccttcaattatattcttacttctacaacatacgaaaacagaggcaattgcatgcttttactctgttttcgtgccttctcttactaaattttctctctaaattctcaaatacaatctgcttcaaaaacagtagataagctgctaaaatcaacagtggtatcaaagcatttttcttaagggactgtgagacaatcaagatgtcttcttgttctggcacttcagctccaccgcacttcaatggagattcacctgaaatctctgagtttgtgggaggtagtccttgatgacaatgacccacctcctctaagagacacatcgtctcttactcaaattaaaaggcacgaggatgaagtagcaaagaaacctcacgccttggcctgcatttatggcagtctcagaatgtctttagtaggatcttgccctacaaaacacctaaatcagcttgggataagctcaaagaagagttcgatggaggtcacagaagcaaaaaaataaagcttataaaattgaaggctgagtttattgccttgcgaataaatatgaagacactataaggcaatatgcctctcggctttctgatattgttagcaaaatcaggctactcagtgaaaactttccagaatcttgagtagtagaacatattttggtgagcttgcctgccaaatttgaataaaaaatttcagtgttagaggagttgggtgacactgatacaatcattgctgctgaactgataaacaaacttgagacttaagaacaaagagccagtatgagggagaccataaatccagaaggagcactgtttatttcctagactagaaacaagtctggaactaaaaatcaggggataaaaattgaggataaaggctcaaattcacgacaaggcaaccagagtcaaggtaagtgaaacagataccctccatgcaaaatattttctttaactaatcaccttgagaaagattgctggtataaagggaaaagaactatcaaatgcaatttttgcaagagactcggtcacaaagagaaggattgcagaataaaaaagaagcaggaggaatcaaaacacgaaccacaacaggcaaacatgatcaaaaatgaagaagatactccaaatacactccttgtagcttcaagtgaagctgttaatgaaaacaaagcactatggtagtcgacagtggctgcacagctcatatgtgcaaagaagaggagctatttcacaatctgaacaaaaatatgaaggagtatattcaacttggtgatgggaaagctgttagagctgaaggtaagggaagtgttctggtaagcacaaagcaaggtaacaagttgatacatgatgtattatttgttcttaacctacgccaaaacttactgaatgtatgccaaattgcaagttatggttacaccattacctttaagcatactttctatgaaatctttaatgaaaaagatgaactcatagccgaggttcccttgagaaacaaaatgtatgctctaaatctggcagaaccaaagaacaaaacgaatttggcaatcaaaatgaaggaataaggcacaggaggtatggacactatcacaagggaggtcttgaaaaattgtaggctcatcagatgagtctcgacctgcctcctttcaagatgacagaaggtgtatgcgatgtttgcctaatagccaaaatggctagaatgcccttcccatctcaaacacagtggagagtaaaagaaaagcttgagcttgtacactcagacatctgtggcccgatgagtgaggaatcattaagtggttataagtatttcactctgttcattgataatctcaccagaatgtgttgggtttatttcttgcgcagcaaaggtgaagtcttcaaccaatttgtggagtttaaggcttgggtagagaaggaaagtgaaagaagtgtgaaatgtttaactgacaatgccttggagtacacttcggctgagttcactaatttttgcataaaaaatggtgtcaagaggcagctgagtgttccttattcgcctcagcaaaatggcgttgcagaaaggagaaattgctcagttgttgaaatgggaagaagcctacttgtagacaaacacctgcagaggaagttttgggctgaagcaataaacacctcggtgtatttgctaaactgtttgcccactcaagctcctaagaaacaaactccatatgaagcctggagtggtagaaaaccatctacttaacacctgaaaatttttggatcagtgtgctactcacacattccagatgagagaagaaagaagctggataataaagctgagttgggagtgttttaggatatggctcataatcaaaaggctataaaattctcaacttaaacattaacaggttaataattcgcagggatgttgtggtagatgaatctacctactggaactgggaagaaagaagaattgaagcagatagtgaattcaaaggtactggcaatgagatccaaaatccagcactcccaaacgctcattgggaaactgaagaagaagatgaagtgaattaggatgaagaaagcagttcacaaactagattccgagccttaacagatatatatgaaagatgcaattttgctgcatctgaacctacctcttttgcagatgcagtgcaacataagagttggagagatgccataaaggaggagatcagcatgatcgagaagaacaaaacttggttgctgattcctaaaccagaagaaaaaaaaccaattagcgttaaatgggttttcagaattaaattgaatccagatggatcaatgaataaatacaaaggatttgctcaacttgaagttgtggacttcggtgaaacgtttgctccagttgcgaggcatgaaaccatacgcctgcttctggcaattgctgctcagttcaagtggaaagtgatgcatctggacgtaaaatcaactttcctaaatggtgacctagaagaagagattcttgttcagcaaccagaaggcttcagcgtacctggaagattatgtctatttgctaaaaaaggccctgtatggcctcaaacaggctcctcgagcctggtataaaaaactcgatgcctatctaacttactgtggcttcaaaaagagccagaatgaagctattttatacgtaagacatgaagcagaaggtgagaaactaattgttgcaatttacgttgatgatattttggttactggcagcaataaattgaacatagagaagttcaaatctcaactggaaaaggaatttgagatgtctgctttaggggaagcttgctactttctgggaatggaaataaaacaaaccatgttggcatttttctctcgcaagcccacgatgcaaaagaaattttgcagaaattttgcttaaacatgtgtaaagctgtgtccgttccaatgattcaaaactcaaagttatcaaaagcagaagatgaggaagtggtagatgaaaatgtgtacagaagcattatcggaaacctgttgtacctcacgacaaccagactagacttgatgtactctgtaagtctgttgtcaaggttcatgtcttctcccagaaaatctcatctagctgctgtaaagcacattttgaagtacatcaaaggaactgaaaattttggcatctggtataaatcaacagaaggtggtactctacaagggtacatggacagtgattgggtcggcagtgttgaagatgcaagaagcacctctgggtatgttttctcacttggatcagacgcattctcatgggcatcgaagaagcaaaaagtggttgctcaatctactgtggaagctgaatacatagctgcagctgccacagctaattaagcaatatggataaggaaaattttgaaggatttgagttgaaaaacaatttgcccactgagattttcgtcgacaacaagtctgccatcgcaatggccaaaaacccagttatgcatggcagaactaaacacattaacgtgaaggaccatgcaatccgggatgctgagaaaaatcatgaaataaagtttgtgcactgctcctcaaaaaaccagttagctggtgtcttaaccaaggctgttggaaaaggcaagtttgaagacctgagatcacggctgggagttgaagcaaattcttaaggaggagtgttgatttagataagaattagtttttatatttcgaaattttgaatttaaaataaatgtgataatcttatcacgtaagagttgtatttgcatgcatatatgcagcctacctaaattatttaatctgataagaagtttcaattgtaaccttgcttatttaaagcactcaatcatcaatgaacatcgatcgaattctccttcaattatcttcttacttctgcaacatacgaaaacagaggcagttgcatgcttttactctgtttttatgcctctctcactaaattttctctctctaaattctcaaatataatttacttcaaaaacagcagataagctgctaaaatcaacatactccatttatgaacagattacttacaccagtgactatttccaagatctgta

SEQ ID NO: 8452 - DNA, 981 bp, Carica papaya
  Intron number 5 from transcript evm.model.supercontig_12.1 8 (locus evm.TU.supercontig_12.18) derived from phytozome v7.0 (chr-ID supercontig_12; pos 101048 to 102028 reverse strand)
ttgtctgtatgtttgcaaaattatctcacttcgggttatatcatgcatataccatgctgcttactccttttgggcttttataaagcttcatatttctagttttgaattgctgttatggtcctgacttctaggatctcgttatgggtcaacttacatcgaaacctgcagaatctttagagttttttctgtcttttcttcctttacctatctttgtaaattattaagggcttgttacgagaaaatcctgtgatttcttgattacgaaagtactcacacttgccaaaattttcatgcatatccatttcagagacaacaagtggatttacactagaaggatgaggattagttgttctggtggttatttccagaacagttactgctgcactttctccctatctttttcctactctactaccaaggattacataaatatccacttccatatccttcctagcccacataaagtccacatctaaaatacagcatacaccataaaatacaacagacatgctagaaattatataattacatgtctgatgatttttgcttccttctttgatgcaccttataaaaaatgtgtgattttcccacttgggtccctcaattgtctgttgaattctggcgctctcatcatgatataaacatctagagctattaaatttaggttggaagataaactttttaagttcacagtaaggcagtcttccacacaagagaagatatttttattctgacttataggagatactattggatttaacaccattttcaggcctatgtttacagatttgtttctgttgtactggttgcggtaaaccttggtaagggtcatataggtgacttatttcttttccctgcagatcttgtttggctgatattttcttgtcgtgtaacttgttaaagctcgtcaaaatgttatgcaaaataccaaaggctaatgcattaatttctctgatttgctctttttgtaattgacaggtg

SEQ ID NO: 8453 - DNA, 7456 bp, Carica papaya
  Intron number 2 from transcript evm.model.supercontig_145. 5 (locus evm.TU.supercontig_145.5) derived from phytozome v7.0 (chr-ID supercontig_145; pos 214613 to 222068 reverse strand)
caaggcacagggacatactacacgagtttacccaggtttaccttctgtcaattctttttcctttttgtcagctttttttttctttggtttcttgaggctatattcaagagagtcaaaggaggtttaaataattgaatgcagtgtaacagaatgggatgaagtacaatggaatgagatgtaaaatgtaatctgttttacttaatttggataagatagtatagaaatgagaataagcttcaaccagagttggaaggaaggaaaatggaaaattattaatgtctagaagacgataacccttccatccaaaaaagaagtaggtaaaggtaggatttgattataaggaatgaggataatttattaatcacaaaaaaatacttttaacctgcattcccctttcgtccattctctcctagactaggaattagaatattgagcttctgtaggggtatgagaatgacgtgttctcccttattctgtttcattttctttactaaattctccaacaaataaggttaagccgtcaactttaaattttttatttccatccattccataccctatggggtttcatgcctttattcagatgaaatctggtttgacccaaaactaagctataatggtgcttcgggatgtttggtttaacttatttttggatcaaaccaccttaagtaagccatattagtgtttgatttgatgattttggcttataagccaatgtcttatgagctaaaaaagtagggttcaaaaatgttttttttggaaatgtaaagtatgaattgtattaatataagcactaagggaatgctgctcatgtacaaaatttagaagtcaatcaatgtatcaatatgttccaagaggaccatgaaacaaaaaattaatggtttggatccatctattcttaagaatattaaaaccatttacatcctctattctatcaaaaactcttatgttcctctcctttcacacctcatagagagaaagagcggaattatatccacttgtttctgtcgaccgctaatgcacatccacactaaaattttttctctcgcgaacctgccataacccaattaatttctagcaacttacaaaccaaagcccacaacttataaacttctggagaccatagctagaaatgcttacaagtctcttcatccctcttgcaaaggtaacaagtattaaaccaatatctttccgcgctttttcaaattgtcaatagtaaaaaaaagttccctattagcctcctctcacccaagaggtgagacactagtcttccacatctgacttacaaggaaacaaatgccatcatcttcatacctgtacaattttttgtagaaagatttaattaagaaagacccgtttgatgtgaggttccaccgcggagtgtcaatgcttccatccaacgaaataaaggataacatgcttaaaaatttctcatattctccaacctttcaatcattgagattccttgacacaagtagtcattcgttcaaaccactactattctctataaagaatcacaaatcttgatatctttctgctaggttgttgcgtaaatatgagggaaatactctctaaaggtgcccctctccaccaattgatcatcccatagtctcaccctatccccactaacagcttccgcctgatatactcttggaatttatccttcccttaagtgatctttttccacaagcttttctcatatggtcttgaattctctttggtaagtcatcttttattgtccatgccatattttgcttcaattgttttcctccacaacgtgtcttcctctcttatgaatctccaacactattttctttactgaacctcattcatctcaaataaagatcgcattcccaaatcaccaaatgcctaatggcttcttgagctcacttcatgtcaccaaatgatacctctgtcttttatccatgtcatccccataagaacttgttctgtatagtttctagcttttttgccacgcttttcggaatcatcaacatggaaatatagtagataggaagattgcccaaggtactctttacgagcatgagtcttcatcctttaggcaagagaccccttttctagtttgctaacctcttctcaaatctatccaccaccggatctcatgtcctaaactttttgaaactagttccaagaggtaaattcttatctctacaacccaatgcacttgtgatcctttttgaatcactagtcgactccaatctcaccaattttgacttcgtaggattaatacgaagccctaaaacaacttgaaagcccatcaaaatatatctcatgttcaacaaagctctcctctctggttcacaaaatagttaggtatcattagcaaataacaattgtgtaagcttttcaacctgattcctcaccctcacttttaaactattgaataattcacattccttggctctgataagcatcttgtttaagccttccatcaccactataaagtatgggagatagatggccaccttgtctccaacctcaagaaactttaaagaaagatgaaggacccctattaacaagaaccgtgaaggaagtagaggtgatacaagtcctaacccatctcctataattctatccaaaacccatcatccgaagcatataatctacgaaatgtcagttcacatgatcatagttttttctatatctaacttgcataacaccccttccctcctcctatatatcaattcatcatcaatcactttatttgctattaaggttgtattcagaatttgccaacctcccacaaaagtatcttgacaatcaccaattgccttatcaatgaccttagccatctctctcataaggagtttagcagtcaacttatagatgcaacctaacagactaataagtctaaaattcttgatgttccgagcccctttaaacttggcaatgaatactgagaaaaaagcatgaaggggtttaacaaaggatccagtgtcatgcaaattcctaaaatagggccattatgtcatccttcactacagtctaaaagtcctgaagaaagtctatattaaaaccatttagaccaggagccttatctcttgcacgacataaagccatcatagatctcctcttttgaaaagtctctctccaactttgtcctactttgatcatccagacttttgaattcaacatcatccatattaggtctccaatcctcttcttccttgtatagccacaaaagtaactcattgcctccattcttagctgctcattactcttaacaactcagtaaccaatctccatcgcatctatgaaatttttttcctgtaatgattggccatacaatggaagaacttagtattgtgatcccctcccctaatccatctatccctcgatttttgtctctagaaaatctcttccatctgtaatctgacaacaacttcagcttttaatgattcttttctggttatgtctttagttaacaacagtcaatcaccttcccatttgtctataccctcgatctcatccatcaatatcttcacttcactctaatatctaatacccttctctttacaccacttcttgattttagctttaacaaactttagcatctggaacaacctaaagcttgccgtgtccactggatttgtggcaacccaccgctctctaatcttatccgaaaattcatccaccctcaaccatttgttttcaaatctgaatggacacccatctgatatcatcagccatcaagcatatagggaaatgattagaaataatcttctgaagtctcttctgacacatgttgcccacatacaattaactattatgttattgaggtcaggatcttgtcactaggtggttctttagaatttctagttgtagaatctgcttcttttccttactacgattctttgagcgacctattttgtgaacatagattacaactcatcaaaaagagttgttaccttagacctcgttagagatatgtgtaatattgtagtttaaaataatattttgatttatctttattaatagcaaacatactcttttatttacaggttacaattcttatttaaagatcttaatttaattaaggatataaatctaagtagaaatactttatttaaatattaaaaattctatactatttagaaatataatattaatagaaaatcatatgttatctacgaatgtaatgctaagtaagattctatgtttactatttagtatttaatactaattagcattccatatttaattgaatttcaagctcttattagacattataagtgtgttcataacatttttcccctcctggtcttcaaatttgtgctcaagattaaaatatggatacacctggcttgtcgatctatttttgttgctcaggaatagtgtcacgttcaatctcgagctagaacagccatttatattggtgactttaacaaacggctcattacagttataacataaccacttcagcctcttttttgttatctctgtccttgttagtttatttataaatgaagatgaactgttagtagattgtgtcgtaatgttactgttccgtggagttggtattttctgaacttaattgttaggattggttacggactgacaatggtaattataagtgtgttcgattataatccacaactactgtttcttttcaaaagtcatactcattgcatgcataagagtggtgagtgattgcatctcgacctcataatggagagaatcgattaattctgccatacaaacttacatgttgatcaacctgaacgaacttgtttgctcttgctagtttttgttggaactgcctctggcagtcatcaattgatcccatttgtttcaaatttaccaattcccccaacgggttgcttttggctggcggctcaaatatcagagaataatagtttttgaatctagtcaagttgagtgtagattgttcagattctaattggtggtaccatagttgcacctctccaagcatatggaaggcaaccaatcccatcttatcccattgtagcgtgttggttgacaaaaaatttcttgcaccaatgcaaccatatttgggaatcttcaaagtcgttgaacgttgaaaaatctaacttaatgtagcgaggaacaactctattatttggagggttgtttgcatttcgcgactgactttctgtgtgaagcgcttgaggtggctgttcccaagggtggttgctgcttgcagtcatttctgattctgtttgcctattacaattaaagtcggccaacatctctttgaattgtgaggataactcttgcaactggctacttaattgtatatcaatctctgcggttcgtgccttgtttgcggtcagggtttcttggagcatcaatcgcaaatcttcctttatcgcagagttgtactgtgttaggttatgataccaatttgttatgttcccaatattagaattttgtcactgggcggttatctggaattttggttacagaatttgctttttctccgtactgcgattctttaagcgatttattatgtgaaaatagattacaactcatcaaaaggagttgctatcttggaccttattagagagagcttcaattttgtagtttaaaataatatttttatttgtctttattaatagcaagtatacccttttatatagaggttacaattcttatttaacaattttaatctaattaagaatataaatctaattagaaatattttacttaaatattgaaaattttgtactatttagaaatccaatattaataaaaaattatatattatttaagaatttaatattaaatagaattccgtgtttactatttaagaattcaatactaactaaaattctatgtttaattgaacttcaacatcttattaggtgttataaatgtgtccataattttgatacgtcacaaaaattatgaatctatcaattctgaaatatgacggattgacccgctggttagaccaagtccacttgcccctggttaatggtaaattcatgaggtcaagatgattcaccgtatccttgaactcattagcacaactgcaggagaagtgcttcccgttcctctcattagggttcaacttttctggtgcttataagccattcaaaaactaattttgtttaagacttttaacaaaatatccactagttataagttatcaaatgtatatgtccttttaattaagtattgtcaactttggaacatatttttaccaaacacccatatttttacggaacactcattatttatgtggagattgtacgttaaacaatatacacaaaccacatatttttcacttttttaataactttaagtttcatgagcttctaagccttcttcatttataaacttctaaaaagaggtcaaaccaaacgattttgaagtattttttcgtcttattattttgcctaaaggagatcaagttctgcaaagttcttaaatgtagaggtgtcaacgagttgtgattttaaccaaatttgaacatgtgtcaatagatggcctttgaagaagatttaatagtatgttatgtgaattaaacagattaaaagaaaaagattttaattttaacaaataaattgcaatttaacataaattacatagaaaacatgtacttctctggcatcaccttgttgcacttttaataatagtttttttctaaaaaaagaaacatataaaccataagttaagtacctttcaaattttcaaaagccacaaaaatcaattcaacacaatatattaagaatttgaaaataaactcaagttcacaatcgaacaccagaaaaaggtttgcaactaaattagtgccctaaatttgaatggaaattcttcaagtaatatcatatattgtatttaaatatgtttaaatatgatgtatagtaaaatagttttattgtgtaaaatacatctctagttcatttagtcttttatcccattttgattaactgcggtattaaaaaatcatagtttggtttctcagttttcagtggacacccctatttgaattatcatatcctatcagcagcattgatcgtggatgtccaaatgccacttaagatttcattggatggcatgtttgatgactgaagttgtgttattgaggttactgggaggattcagcatcaacgagaagatgcccttaaactaacacatgagatatcattttagattaaaagtgggttaacaagatagaaagaaaatatatttctctcttaaattgactttaatttgggaataaaataagaaagtctgacataaagtgtagtgagtatgcccggtaaaattatcatatacaattgcttttatgacatggcctatttaaaccatattcgaccagctgcttgtattgaattcatgaaatgttcattgcatgattggattttcattctttgactgagttgattgatggtttttctttgtctaattgtttcgtaaattttatatttcaggaatttagaagaatcaaagggaacataaactcaat

SEQ ID NO: 8454 - DNA, 3861 bp, Carica papaya
  Intron number 2 from transcript evm.model.supercontig_17.9 5 (locus evm.TU.supercontig_17.95) derived from phytozome v7.0 (chr-ID supercontig_17; pos 1187286 to 1191146 revers e strand)
gacgccttatcaacttgtatgatacttttccgtattcttatttatgcattctttgccttcacaatttcctattcttttgtcttttttagacacaaaagagtgaatggttgatagctcaatatacttagtagctttaggatagcgttgcttcttagaagtttgtggtaacagatcactctttgatcaaatattggaatatcttttcagctcattctctaagcaatagtcatgggcaaaaaatagtaaatacaaattcatctgcaaaatatacataaggatgatgattttttcacgattttggtctacctatctgattgtacaatatttgtaagatcataagaagaagtagatctacattatagtcttgatgatgtcatggatttatgaaacacttgtgaaatagaattttaaccaaaaaattcccgaactcaacaattgtaataggttgaaatagaggaagggaggaaatgccaaatttattttagggtaagaagatcatggctttgttatctttcactacatagattgtgatgatgactaggaaagatatacgacaacgatgatgtttatggagtataatctactttatggagatggctcctttttattcggtgtttggttttgtgcttacaatttagtggcaagatctttaaatgcaagttcagctcgagaaccttattcgtaatagattggcatgcgttgcttttttgttggtgaaggcacactatttctttgggcttgcctttttcttttatggaaaatatcaagaggtattttatattgatgttttacccttgtccttgtcttatattttgtatactttatcctctctttatgtattctcctttttacttaataatattttctttgggtaaaaaggtgggtttaaattaattttacttagaatcaagctaataaatatttgaaaattttgatttacttttttttggttgggagtgaacatgaactttgtatttgttttgatatgttgtactaattctgggaaatttatgtgattacaatatttatttattattaggcatgtcaagcttgtttaggaagtattaaaataggtttcttagtagtttagtattatgattcttgtttttcttagaaatcttatttttttttattgtttttcttagttggtgtgggcaccttgtaaacacataggtggttcttcatatttaaatagattgcttatgaataaaaactactagttttgtttaattgaattgggtacttaacaaccttgtgagtatagttttgacaactttgtgactctcttgtggagaatagtagtggagataaagtatggcaagtggtagtctcaagaaacttgaatgattagagatcaatgagtgtgagaatctattgcatgctctcccttgttatgctagatggtagtctcgacattccttagaggagattggtattgaatgggtctttcacaatgaaatctttctacaagtttaagcatgaggaaaatgtttgtatctattctttcaagcaaatgtggaagacctcagtccccccccccccaaaatgagtatcattttttgcttgggaggccaccgaggaatgttgtttgacgattgataatttaagggaacagggtaaggtattggtcaatgcttgctatatgtgtatgagggcggaagagacttgcaaaattcttttgctttagtgtccaatgatatataagctatgtattatggtttataggttgcttggtattaattgcgtgatggcaggttccttgagggaagaattatggactttgaaggactttaatggtcgttggaagtaagtggagatcattgcagttactattttttgggtggtgtagaagaaaaggaataaaatggcttttgatgggggttgaagatgttagtggttttgatattcttaagataaatggttctagactattggttttttattaatgggtcatcctttatattgtaagaaggatttagacaaccttattgatattttaattgacttgtaaattttttatatggatgacacccccttgatgcctatatcaatatatagtttctcactttttatttttaaaaaaactagttgtgacgactttgtgattgtaggtattcccaaaaaaaactttgtgattgtaattgtctccaattcttgtgcttgtcgattggatttatcttttcttttcattaatatgtaatctttctctaaactctatttggttgtgctttatcaatttcgtaggagagtcaaagttcgatgctttgatctcaaagttaggaatggttgatgtatattctattgaatattataaccctgtatatgcatgttttctcgattggacaagaaaataaacaattaattacatagggtataatttactcatatatttttttagacattccctctcaagatggggagtagatgttgtccattctcagcttgccaataagagagtggaatgctagattgtttaaggttttagtaaacacatctgctagatgtgaattggtaggcatgtatgaggtttatagtacgccgttgtcaagtttttctttgataaaatgtctatcgatctcgatatatttggtctagtcgtgctgcaacagattgtgtgcaatagttatagctgatttgttttcatagtatatgcacatgagattttcccacttgacttgaagatttttcaagattcttcttattcgtagtagttcatatatttctatgccattacttgaatttctgattctgcttttgatctcgcaactatatttacttcttacttctttaggtgattaggttgcccccaaggaagatacaatatcctatgataggccttttgtctacaactgactctataacttgtatcagtataggcttacaggagaagcttttcacttttcctgagcttaatttcttttccaacttacctttttaggtaatgtagtactttgcagactgcttgtaagtgcatttctttcggtctgtgtatgaattgacatataacactcactattttttcctacacgtctctctctctcttgcttctatgtttctctgcatctctctcttttatatcgtttgctgaagtggggaaaagcagaagagattgctaccgttttggagattagcagtgggcctgcgctggttggcctagatggtttgtcctttgtgtttgtgttgaggttgtgggctttaaaatggttttggtttaggttgatggatgtggagaaatcaaatgaattgtgattcaataaaatgaaaagggataaggtcgtgtatggatttaagggaatgtgttaaaatgaggtaaaaatgtgatggatttttgggtagaaagaaaattggtttggaagatgatgcagaataagaagacctagacttatatctattttaatattatgggatatttatgttacattagggaatttcctattaaaataggttttcttaattgttattttatttgttaagtagttttttgaaataaaaagtagtaaccatttttttgttttatttgttaattagttagaagccttattttgttattgctgtgctatttaaggtaccttgtcataataggctatgtgtgattcgtcattattaaattgattgcttatgactaaaaattatcgattttctctcatcgaatttagtgcttaatatgcctgtgattgtgattgtggttgttactagttcctatagttgtggattggatttgtcttctctatctctctaaaccctatttggcagtgctatatcatctactcttgtttaggctgattgtttttcacttataatcgattcttaccaacttattttgcagtttgcgtgaaagagttcaggttgaacaacttattc

SEQ ID NO: 8455 - DNA, 1082 bp, Carica papaya
  Intron number 1 from transcript evm.model.supercontig_213. 9 (locus evm.TU.supercontig_213.9) derived from phytozome v7.0 (chr-ID supercontig_213; pos 170230 to 171311 reverse strand)
ctgttggcaatccattaggtaaaccaaatgaacgttttgtttctgttctttaagtttcggttgtggcttgattgtatgtgagagtatgatcgcgattgcttttctagttgtggtgattaaattttttttcagtagttcaattttcattttgtgtttctccgtggatttgatggttttgtattgaagaacttcgggggttttttgagattctctggattttatctatggaagcttttgtttttatctgtttgttacagtgaaaagcgaactaaattacttttaggggaggagtaattaggcacaccgtatgactacgctccaacttcttcttaaactatgcatcagtgcgtttcattttgttgcactggcgtattttacttgtttgctcactatttactgttatgaagagtttgcaagataccacatagtgttcttttctgacacagataagcctggaaaggaagcccttatgagtttgttccacgaggaaaggaatatggcctacaatgtccaaactacagaaaaacgcctgcagtcatgaattaagttattaaatccattgtcaattatgcgatttagtactgagtttaaatttaactaacttcacctcaataacttttactttctgtctagtttatgatttcctatcctctatcatctaactataatgctctatccttatacactcataaagtagctgtattctaattggcctggtcttagtctagttgctacatccctcttctcattgaagtagtcttctcagttcgattttgatgttttggtatcccagaagagaaggtagtcaaactcacaacaattaattgactatttctcattcagattatttcgatgataggaagttatttttcactgtactcttcatcaattgaaattttcttttaaagtcaagcagttcacttgtgaaataagaaattgaggattgccattaacactgtggctattattatggttctgacatttctcctgtgaatttcttttctgcttactgattaactatcatctggtgaaatgcgttggatacagatattgagcaaatactctcagaagcacaacatcgg

SEQ ID NO: 8456 - DNA, 945 bp, Carica papaya
  Intron number 1 from transcript evm.model.supercontig_9.31 8 (locus evm.TU.supercontig_9.318) derived from phytozome v7.0 (chr-ID supercontig_9; pos 2139603 to 2140547 reverse strand)
gcctcccttccttgctctagggtttgttttctttctttttctggttcgcttctccttttttttgttttccttttctggttgaattggtagttaggcctgttacagtgaatttctctgcgattctttaggattctatgatgtcagtcgtgttcgtttattttttttggggggctaaaataggaaattcgagaaatagaagttcgatatcatgtaggttttgtggtcaatagtggtttacgggctacgctcgtgagttgtttattcagtgatttaaatatatatatatatatatattcccgcataagacgacggattctttcttctgaacttttttatctgaatctcttgtgtttaactggtagttggtgcctcattctgttcatttttgagacttttagttaggctttctttttcttatttcctgaaattttcaatataagtatgttgggtttttactcattaagtaactaatgtactggaaattggatcttgcaaactgatctacctctgctgtcaggaatgatgttttatatttgtgtgatgaatttggactatttaatgcaatctagaagttaccattaattggatctttgtggcctataattgttgtgtttagaaacaagtttatgctaatgttgcgatggttttggtcactaacctgttaaatatcaatgatggtaatggtaggatgatggctgtgctgcaaatgacatgtaattacaggaattctgttatttggggaatgaaattggttcccttttgctaattctgtttcttttattttctttaatgtttttggggtttggagttcagatgatgcctagtactgggccattaattgcttgttgttgattttatgtagagcctttattctgcagtaatggagctcaaaaacttttttttaataactctttctctactacaggcaaggagtggtgtgtgtgt

SEQ ID NO: 8457 - DNA, 1084 bp, Carica papaya
  Intron number 8 from transcript evm.model.supercontig_801. 2 (locus evm.TU.supercontig_801.2) derived from phytozome v7.0 (chr-ID supercontig_801; pos 4111 to 5194 reverse str and)
aagaagacaaggtacggatgaacctttaacatctctccatccaacacattatttatatcatagaacgggaaacaagtggagatccatatttctcatagaagtcagattacgttgcaaattttctgttgttttttctcttttcacctttcagtagtttaccttttgggtacctattgtgagctgtataatgggttagctcaccatccccctccttttatgtcatcttcccatccttttttgttcatatgtgatgcatgacaaaaaaattagattaaaaaacaaaagaatgaaaagagactaaagaaaattagagactaaggtgaagaaatacaggaagcatgagataggttatatagaataataacagaagaataaacaaagagagagataacagtaaacaaaaccctcacagaaatttttaattaattgttgtctctcttttttgttggtagctattaggcttcctgtaagtattagttacaattaataaagaaaactatagaaaggtaaatctaaaagggggaaagcatgctggaaaattttaggaattggtctgaactggtcaagaaccagtctgaaaggcgctgaactgccaaaataaagcaaacagaaatggttgccttctcacagtcaggggtgcatgaggtcatgtgtgtttctgcagtcactagagagggtcaaccttctcatggaaggcttgtctagcaatggatgttcatgatcatttggattgtaggggcggtgtaagccactgtatggcagttgctggcgatctgaatagagcaggattcatgactttttttttttcaagatagaaactttctttttcttttgctggacttacattccttttctctttttttttttttttcttttttttggtttctttatacagtatagaagtagcagaaggtagggataaaaagttggaatctgatacgaactgatactaggacaagtttatccttcattttgcatcaatttaacttgatgtttaatatgattttttaaagaaattggactgttgattaagtgctttcgcatcccaggtgattgtctttgagcgtggagatctggtttttgt

SEQ ID NO: 8458 - DNA, 2197 bp, Carica papaya
  Intron number 1 from transcript evm.model.supercontig_64.1 04 (locus evm.TU.supercontig_64.104) derived from phytozom e v7.0 (chr-ID supercontig_64; pos 731246 to 733442)
tatccaagcctgaactcgaatccatactctacgaggtcagcgattctgctcgtctttgaataagttatatctgttcataatcaaacatctatttcacattgattgatatatatatatatatacagtaacatgcgcacgtattcgttaaccgtagggacgtactttcttggcttttgattgtgtgatatgaacaattggattttaagtgctttcttttaatacattacgtaacacgaatcaattatgacggaaaaaagtgtgagcatatataggtggatgtctatggatgtgattttcatttctgtcttttttttttaattgttcattatatgcgagtatcgtatggcggtttgtcagcgtaccggaagttgtttgatgaagaaattcgtacagattgcagattgattctgcggagagactgattctttggattgattaatcaatgaattgtttatttacatgtgtgtgtatttatttatgtctatttgtgtgtataatgtggaacatagtcatatatatattttttcgaatgtttgaacgaatgattaatctttgattttggttgtttattcgttcagttatatacggttatcggatggctgtttgtcagggtatccgaagttgttccctaaattgcttcttacagactgcaaattgattctgcaattgacggttatttgattgattgattatttagactgattaatcctcgaatttttttgtagtgcgtgagtgtatttattattgtgtttttatatgtatgttctggaacacaatcagttttttggtctccaaaattgtcttagtaaatatccttttcctgtaataacttgctggttctgattgtggttaagtcttaggatatgccaagtgtttggtggcgcttgaataaagacaactcatgttgtaggtttggaatgaaggagagcaaccacctgtttctttattgtcctttaactcatttaagcagtcatattactaatttaatgcttttgtactactactacaaaaaaaaaaaaaaaactgtttcctttgatgtgtttgccccaagaaactaggcgtcttcatatgaactttaatgtgatcctgatgctttcgtaatgttctagtaaaaggtagttgaatgacagtcctagtggactggtaaaagaaaattgagttctttaaatgcaaaacccgaaaactgtttgcatatgtgtagatagaaggagcattaatggctcaactacttactttccgtaacctactttttggtcttttacaaatcgtccatctccaaaattcaactgatatgtgggttcagacgagtctttggggttcagacgagtctttggggctcagacccgtgaatttattgccttcacaagagacacatgttaaatctattggtcaataggatagcttccctttcctcttttctgggacctttctgttgaatggttgacatttctctgtcaatccttgaagaaatgctttatccttaattcagtttttagtctcattggtttgtatttttcacaaagcttatattagtggacaagctccttttggaatatttaaggctacccaaagagaataaccaaaggatgtttctctggaagcagcaaactgtttcggatatttaagatgtttatgaagcagaaaacttgagttttccttctgaattcttccttctcttcttctctgttttctgtccatactgccaccactttctacttgggtgttgatagttcctctcatccataaagaatattcggtggaattacaaacaactacgaaaactggagtgtaataactcaatgtgtgaagatcactcattaatggtgcggaaaacactttacccaactatgttctggaaattgggaatgatttgcagataactacctaaataaatttgtacatggtctgaaacaaggaaagcaaggttgttttatttaaatataaaaaaagttcggttcatatagttacagtaaatgatttgcaatctcatagagacagaaatttgttgctatggttcttgtctggaactaaggatgtggaaggaccagccgaagtacgaattatgtattatatgcagattcttttatcatcaaagacctgtatgaaacatagtgcatataatttttcatctgatgtcgattggtggggttgtttttatgtaggtcgccatactgaagaactcaattgggttggcact

SEQ ID NO: 8459 - DNA, 815 bp, Carica papaya
  Intron number 1 from transcript evm.model.supercontig_7.24 1 (locus evm.TU.supercontig_7.241) derived from phytozome v7.0 (chr-ID supercontig_7; pos 2378938 to 2379752 reverse strand)
tccaaaactcgagatcaggttttcaccaaaagaaggtagaatgatgcagaacaagtatatcttaatttggaataaattttctattaaataaatcttttgtaattattattatcttgtcttcttaagttaaataggtttatttagacataaagtattttagttttcttttaggtagattttaaatattataggaattagaatattttaaatttcctcttttagaattttcctttttaattgacgaactatgatatttagtttcttttttggtggatttttaaatattataggaactataattttttaaattctcattttttataattttctttactagttgtaagcaatgcctatataataactagtagctaccaagaaagaagagaagacaatgatgaaatgagaattcctttattgagctttcattccctattataggtgtgtccttatggttattattctctctaatctatcctactcattttacctgtccctacattttttcaccttgcccttaattcttatagcctacctttattcttctattctgtttcccatactttatttttgtcactttgtaggataattctgattctaccataacttgtcttacaacagcatatcttgctttttgccctaattacatgaatttaattataatcaaaaggtcaagagagaccaaatatgggtttgagctgcaaccccccccccccaacttttgatctcaactttaatcaattgttgtttgtattgaggaatttatttgttgcttttttttagaccagaagagcagaattccagagcatagggctctt

SEQ ID NO: 8460 - DNA, 1971 bp, Carica papaya
  Intron number 6 from transcript evm.model.supercontig_131. 36 (locus evm.TU.supercontig_131.36) derived from phytozom e v7.0 (chr-ID supercontig_131; pos 287691 to 289661)
cagttctgggtttgttatgttcttctgtcacacaatttgaagtgctcctttttgttagaactgtttttgcagtgctacattgtgtctctcctattgttgaagtttttcataactgtggaagttttcaggaaaacaatatataaaaattactctcaaggttatgctgtgtaaagagaaaggtctcttggaaaaaagaaagcctaggagagctgttgcttttctgaattaagggatatatatatataatcttattaattgcttatcttatcatgtgaaaaccttggctgcatcttttttttttctttcccaataggtaagaaagcatattgtaagataaatacccacactacacacactgtgtttaaaataaagtagataatttttaataattttgtgttgagacagcattttgtattttttttttcttcttttgatccttctctttctcattctctctcactctcatttcttttggagaatagcttattatcccttaacttataacttttttgggtagattgtaaggggaaacttggattctttctctcactctcatttcttttggagaatagcttattatcccttaatttattacctttttgggtagattgtatggggaaacttggattttgggtctaattacaactggattcatcaatttgaaaaagttacaacttattctcagtgtttgaaacaaacattacaacccagtcccattgagatgttagaatcaccattggaacatgactaggtcttttttcccctcaagtgggtacatttcaaacttaaaagaaatgtgaaatcttgatacgaaagggaaaaatctaggaaggaaactggaaggagagtttgaagaactgcgataggagaaacttgataaaagttcagagaagtttgactggaagtatttctgtatagatgtaatttgagaaacttgaaaaaatatgtgtttacaaagtgttgatagtttggatgatttgcaaagaaaatataggtgataacacaacataatcaattacctaaaatagctcacataacgagtactttgcaattcattagaacaatcacaatttccataaccacattaatatatatatatatatataaattcgaaatcttcaaataagatatatgcataccagatcttatcaagcttctctaaattttagtcaagtttctccacattgaagttcccaaactttctatttttagcaagatttttcaattttcttcaagatttgtttttctaaagagggatttgtcttgtggcttctcgagaaagaaagattgatttatgttttaatgcttctctaatattgagcaagatttttataatttcttcaaaatttgttttcttttgagggatttgtcttgtgacttctcgagaaggaaagtttgatttatttttgtcatttggcttggacttgtaatatttgattaaaacacagagattaagttgtaattttttcaaacttgtggactcagttataatttaagttcaatatgtaaggagttccatataacttatccaattttatttctcttttcagtggtactttttctattacaaaaaattattttggtgataccaccctgcaaaattttttaccattaaataactgaatctttcagaggttttctccttttataagtagaagagaatctaaaaataaaagaaaatctggatgacaaaaaactgtcttaggcccagaagtagcatgcatatgaagggggagccctcatgcatcccgcccccccaccccaagagtacccacaagaactgttggtaggacaagaagatgattcatcatcactcggaaggggttcatactgcatatcattctctttgttgggactcttttgtgaatagtctctgtagatgtgagtcataactcattctattctctgtctgtaagattgttgcctcaattttcaggtgttgcgcaaaaagtatcctcagtttggccagtt

SEQ ID NO: 8461 - DNA, 831 bp, Carica papaya
  Intron number 7 from transcript evm.model.supercontig_232. 5 (locus evm.TU.supercontig_232.5) derived from phytozome v7.0 (chr-ID supercontig_232; pos 121686 to 122516 reverse strand)
catttgcaagagagttactccgtcgcggaactcaggtttgttcttgctatcttttctgataaaaaaccttactgtcttttagtcaaaatatttaatgacacatatacaaatttccgtttttagattctgaattcaaaatatagttatccactgtctataaatatatatatattttgatagaacaagaacactttctgtaaataattaatgatgattcttcagctaccaaccttcctgaacaaacttttttatagagagtttagttattggctatgcaactccatctcaagaatgttgtaaataactttttctgcttataaattctgcgcattatatggtaaaaattcttgttttgaatagcatatgaatactggggagctgcccttttctagtttctgttaacaaaaattattttcaagggtctttggatgcatgatgcaaaatcaacaatttaggatcaataaatgttgtatgcatgtaaaaattttcaatgaatcaatcaattttttgtttttgtttatttctgatggactatgttttcctttgaaaccaccaagaccttgtgggttcagggttcttttatctctattatggaggttcttatgagtctttgtgtgttcattctgagatatccttcgtggttaaaaagaaaaaagaaactttttttccctttcccttttagccttgtacacatcttcgtgtcttactaaaaaggggaaaagagtaggccggtctaatgcactgttcagaagatttatatgtttgattatatttcaactattatcctttaatccacttatttttttgaaaggcaggttgtcttggctgcta

SEQ ID NO: 8462 - DNA, 4740 bp, Carica papaya
  Intron number 4 from transcript evm.model.supercontig_29.1 19 (locus evm.TU.supercontig_29.119) derived from phytozom e v7.0 (chr-ID supercontig_29; pos 1108886 to 1113625 reve rse strand)
tgagaaagctgttgcatacaaggcgaacttcacaggtaaatttattgacatggaatgttattatatcttacccctaaggaatagaaacaattctattacaggcttctagaggatgttaaaaacttctcaatcaaggaaaatcccaatactgaatggttcacacttcatttcaccatggctttcttttcttccttctcttgcaagttaatggtgaatttgcaaagcttgttgctgcaaaagcctttttcattgtctccatgtattgttggatgcaggtattaatccctgcactaacactctgggcacaagaacttctgcaacagtggagttcttttcccccaatggttgttcaatgctaccatgtttgacagataatttcccatcataatatttttcctgacgatataggttcattctccatgtcactggcaaaatatttgctttctgggtcatacatttccaaatcaccacaaatatattagttctccaagtacttgcggctctcctctcctgaaaatctttttgattgctttgtcaagtattcattgcaatggatgtcatgttctccgattccctagtttcctttaatatggatttagaaggatcagtgccactagataattgaaaatttctattacacgctttagggaaactttgaatagctgattttcttcttcagcgagagaaaactcaggcaagaccacaactaaatcttcttggggaagttagaagcttgccctgcagaggcatctggttatctaattctttcatggtccatggatgctaccaatttaagtccttcctcaccagcagaaatcattgagtccttaggatctaaaccatatcctgagaacatgatctctaaataagtcgaattctccaactgttaagctgaaaatcctggatttggaaaacgaattctactaagagttgatacatggcttgtactgccggctacaggaaaattgctaagtagagatacatttctttccttaagcacaaataggaaacacacattcatctctttttagccttgctgttactgaaactcatacttgaagaagcacaaataatcatcattgacacttactgtcacctaccaccattctattctctgatttggcctccataaaatgagaaatgtagtaacaaataggttgacaaggggaaagaaaaaccacaaggcttaagccattaaaccaaagatacttgcatgagtgtttactttgacaactatccgatctttcacacaaaccacagatacccaactaagaaaactcttagggcctatttgattcgtttctcatttaagtttcatctcttaatttcaaattggtcttaaaataaaccattgtaggaattcaattcccacttttatttgtaagagaaactttaaggcagagatggagtaaaatttgagataaaaatcatacataattttctgtcaagactaatatggggattattattttttaaaaagaagattaatatggagattagaggtatgaacaaggagaatgaaacaggaagtgaaccaaacaagaactagttttttttttcatctccttttgagaaaagtaaaactgttttaacattatttgtagttgcaagtaaaaatcatgtatttggccctagagcctgttacttttacatagaaactgggtattaaaaaagatatttccattaatatcaacaaacatgaaaatcccttaccctctgttatatgcacatccacttcaggttattacagtacaaagttgagtactatgcttatgtagaattacggagatgaagaaagatagaagacacaggaaaaaccagagagaggaaacaagaagatagagaactgagagaaaaagtccaaatgtgataaatctttttatgcccttgatcaatacaagagacctatttataattcatttatagactgctatacttgtttcaaaaacgtatttataattcatttacagatttaagcctcttttaactattaacaaaagtgtccctgttattcctaattcacatgcatcaaaatgagaacacccttctgtaaaatttgcaacttatatctgaaacctttgcaaatgctctttggatcaactctcaagttgctagcagttgtctatgttagaaaattaattatctttgaactatttaattagttggtagtggagtaattttctcttcttggaattagttggttgttagtggaacaattttctcttgttggtaattacaaatttgtgtatttaaggctggtttatggttgaatacttttgtttcacattttttctgcatacaaagtatttgataaaagtgctcataaattttattttccagcaatctcattttttgttgtaagttattttgttctactagtccttgttattaacatctggtattagagtttgcttgacagttccagatgaccaataatcatgctgtagtaaattttgtacaaccatcaattccaattgttcaaggcaacaactatgatatatggagtaccaagatgaaaactcttgtttatttctcaagatttatgggatttgagataaggaatgattgtaacgaagatggagaggcagccgataatgtaagagatctttgaaagaaagatgctaaggccttgttctcccgctttgtgatagctacatcttgctgtaaaaagtattttcaacagaaacaaggccttagcatctttttttcgaagatcattgacattatcagttgcttctccatcttcattataactattctctactaaatcccataaatctcgagaataaacagtcttcatcttagtactctatttatcatagttgttatcttgaaaattcggaattaatgattgtgcgagatttactccaacgtgattgttggccatctgaaagtgtcaagtagacattgataccaaatgtcaatgataggggctgttagaacaaaataactgagaacaaaaagtgagattgctaaaaaataaaatctctgagaacttctatcaaagactttatatgcgggaaaaataaattgcaaaatctatctgtactcaaccataaaccagccttaaatacacaaatttataactaccaacaagagaaaattacttcactaacttactctctaacaaccaactaattccaaccagggaaaattactctactaacttactgctaacaacaaagataataaattttctacattaattctctaacagtctacctttaccaagctgctaaccagaatgtctacggcctccaggatttgacacctgcactccttattaactgaaactgaaagcgtggaaaagacctatcaaattgtcatttatcctacggtttcttcttccaatccaaaagtcacttttttgttcgcaagaaagcatgactttgcttatggggttttgaagatagcatgattcatgtgaaactactttgacataaacgcaaagaaaattcctattgctctctataaataagcattctatttcttgggatatatttcaattattctagaaagttcgtcaacaaacaacagcaaaatccagaaacaatgtcataagagtgccttattgctttttaaatctcccaagcttcaataagcaaattccaatttgtaaaactcactatgcacccaagactagccctgctaccgaacccgaccggtcctgaccgaatgcgggaccgaatttttcccaattttaaaattaaaaaaaaaagttttaagaacagaagatgaagacctgcggctgctggtgcgtggtggcgtgcgggcgcaagcgtggccacgtggtgcgtggggagggagagtctggagcctaggcgtgtaacacgttatgttggtgcgtcgtggcgtgtagggccaggcgtggccacgtggtgcgtggagagcatggtctggacgcgtggtgcgacttgcgtggtcgtggtggtcaggtgacgtgccgaggcgaggcgtgccgcgtggagtgctaaccgcgagcacgagtggaccaggcgaccagggctgctgtggacgtgtggtggactggtggggtgggggcctggtggctgcatgaagagaagacagaggacgatgataacttttgttggtgagtgagagacagtgtgtgagagggtgctgcttagggtgtgtgtgtgttgggggtcaggtgtacacgaactgttagtcacgtgagtgagtgtttttttttttttttttggttcagaccagactcgactgaaaattttgacccagaattcggaccgaaaaccagactgttcctaattctgtccggattgaacatccagttgttatccggcttccggtcctggccagaaaaatagaataaagagtaacttctctagcccagtttgataaaaagaattaagaaagaaaaacaagaaacagaactgagacaaattgggtgaagaaaaacaatgtggctttttatttcattttttcttaaaattttagatataacaacactctctaaaagtgaaattaaaatattctttaaaaatataacaaaaatgcaaaatacataaattttgttctaaagagaaaaaaaaaaaacaattgtaaatgcaataaaagcaagggaagaattatggcgccattttgaattgaatccagttctagcaaatctgacattttgttataattcaaattgaattcgtaatgcatacataaaatttccattcacgagcataatcattttgattatatgttatgacaggtgcagatttgagtgatacatta

SEQ ID NO: 8463 - DNA, 605 bp, Carica papaya
  Intron number 5 from transcript evm.model.supercontig_5.12 0 (locus evm.TU.supercontig_5.120) derived from phytozome v7.0 (chr-ID supercontig_5; pos 894235 to 894839 reverse s trand)
gttttcaaggtaaatgccacattatgctatattcttttggatttaagctttttgctggcttaagtataatgttggtatacgataagtctcccatattcttccctaatttatcctttaatctactaacaacacaatggggtagtggttaagattcttagttctacttgaaggtcacgagttcgaatctcattcagaatatagaactcgctacttagcgggtgtattatgggttggcggtggccggcctataatgcttgatttagtagaactgagaatttaatacattaatgtgttggtatggctgcagtgatcaagttgggttaagtgtcaatgagtttattacgtttttggactaaaaaaatatcctatggtggttatattctcttagttggagtagctacaatgggttaaaaatccggtttaaccttttttatatatatattaaaaaaacttatgctttaatttcctagattatagtttcatttggtcctaaattttgcaataagttaaaacagaagaaaatgaatatgtccgactttcttacatatgctattggcatgtatcaaatagggcttgacagtaaaagaaactgaagagcttcgtga

SEQ ID NO: 8464 - DNA, 4870 bp, Carica papaya
  Intron number 15 from transcript evm.model.supercontig_9.8 4 (locus evm.TU.supercontig_9.84) derived from phytozome v 7.0 (chr-ID supercontig_9; pos 410683 to 415552)
ggaagttttcaccgtaagtttctaagaacttttcctatttttttttcctgaattgttaattttttatctgacctaaaaagaatttggatgatcttctgttttggtctgattactttcttggttctcttttatctgacccaagaggttgggatggttttatagttattctacagatttccctactgtgtatatggtgcagttattattgtaatatttataaatacagtatagcaaagctttctgcttcttgctatttgctgttatattcagaaccttcattcttattaattttaatccttgtgcagtagacatcagctatctattggcattttctaaacttaaagctgaacaactatgagacttaggttttaaggatttggttgttgctccatcctctggtgcttcaggtggcatgctaattgtttgggataccagagttgttcagagagtggatgtggttgaaggatccttatctttgtttgatttactagatgtgaaaggaaaaggattttggtggataacttgcgtttatggaccactggcccctagatttgagaatctattctgggaggaattctcctatctttaaggcctatgcaatctacattggtgcattgcggaaaattttaaagcatgtaggttttccacaaacaccttggatgggggaagggagacaaggacaatgcgaagttttatgcctttatacaggactgtgagttacgggacttacagctaaataatgcccaatttacctggatagtggttagaagaaaaagaatttcgtcctgtatagattggtttctagtatcatcatgttgggagcatacattccctgacttgctacaggaagttttaccgcatccaataccaaatcactttccaattatcctggagtcccaaaagctgagttggggtcccacccctttcaagtctgagaatatatgggttcaacgtcctgcattttttgatagagtgaaggaataatggcaggaggatccaattagagggtgggaagggttcgaatttgtcataaactaaagctcctcaaggataagttaaaagaaatggaacaaagagctttttggcagtattaggaagaggaaggcagatatccttgaggagtagaagtttttggataatttggcatccgagaataccatttccccgagctaaatctgtaggatgaccaaaataagtaatgaactagtgattttgaataaagaggagcaaaattggagacaaaagactagtttgaaatgggttaaggagggtgatgctaataccaagttataccatagggtagttaatggtagtaggaggagaaatgagattaaggagcttgagttagaaggaggggtagtggaatgtgatatggaatctgttggatgatcaaggagttcttcaagcaataatatatcgaggatgaagtgtctaggcctttcattgaaggcgttgattggcagcccgtttgtattgcccaggccgaacatctcgagcatcaatttgaggaggaggagatccgaaaatctacttaggctataagttccaaaaaatcccctagacacgatggttctactatagtttttataccaatcttattggtatataatcaaggaggatctgctaaaggtttttcaagacttttatttgaatgaaaatgtttgtagtttggtgaccagcatctataaaattattactaagatgttgtttatataccttagtaaggaattggatgactctatatcacgggaccaaagtgccgttgtgggatgggagacaaatactggatatatccctcattgctaatgagccagtagagtttatcagaagagccaagagataggggttggtcttgaagttagattttgaaaaggcttatgaccgggccaattgggatttcttggatctcactatggcacttaagggttttgggtatagatggaggagttggatgagaaggtgcctgtctttttttttttaataaataatattattaacaatggcatcaaatgagagtcaacccatacacaagatatttacatacctattagtaaattaatatggttccctaagtcctccatagggtacaaaacatgatccaataacaaaaaacaagagttcagaaccacctattcttaattaaatcaaaaccattctcttctacccctttgaaagctcttatattcttctccttccaaaccgcaaaaattgtgatcaaaatgatgtctgcatctttcttcttctcactgattccttccacacccataactcatctctaactgatgccatcatcacccacttcactcctaataacccataaatcatggtcaaaagcttgtaagcctttgggcaccaaaggagcagatgattgcaagtatccacagcctttttacagaaataacaaccattcaccagaatctcaccccgtctcatcaagaggaggtgcctgtcttctgtttagtttgcaatcattgtgcatggcaaggtgcaagagtgatttaggagaactcaaggtattagagaaggcgattctccattgctcctttcatttttctttggttgttgacggtttaagtaggatgctgaatggggttctgaatgtgggggctattgagggttttatggtgtgtaaggacaaacttggggtgatcacacctctaatttgttgataacacaattttgttcatatcacacgataataggtcaatctgtaacgctcttacatttgtgggggtgtttgaggatatgtccaggcgtcatatcaatatggccaaatgtagtttggctgggattaacatggcagataacatagtgaatagccttgcagaggcaattggatgcagaaccccatcttggccaatcgtttatctcgacattcccttggggggtaatcccaggttaaatccttttgggatggtacacttagcaaagtgtccagatggttagagagttggaggtggagcctttttcaatagagggcaaggttatattcatccgggcctatctgtctcgcattcctatctattatgtgatcctacttaaggttccagctggaatcattgagcagttagagggtgtagtgagggatttcctatttaatcgaggataggacagatcaccttgtaaactgagaggtttattgcaggtctagaactcttagaggattgggtatcagaaatttaaaatcgaggaatttgtcattatttgttaagtggctataacattttgcatagaaagctaattcattgtggcataatgtaattaaaagtgttacacaaatcattggaatggttttggatgtcctggccatgagatttacccgacacggaagtccttggaaggcgattttcagcttgcttaaccttttagcccctcttaccagatataaagtgggggatggatccaaggtcctcttttgggaggaccattagttgcacaataaccccttggggaccaattttcttttgttgttcttgctttcgtcctatcataaagcaccaatagatcaattcttttgcctctctattgatacggttagttggagtttctatagctttaatgatagagaaaccaatgagcccctcactttgttaggtcttttaaactctcttcacccatcccaacaaccagattgcagggtttagattctacattcagctgggacgtacacctttaaatcattttttaccatatcacaaaaacctggattgttacggtagcaccctcgccaagacattctggcaagttaaagttccttcaaaggtggtgtttgctcaatcgtcaatcagttaaacaccaacgaatactgcagatccataggcctaatcgtgctttgtcccccactaatgtttgtgtgatgtgttataggagtagggagacacagaatcatctcttctccattatgagatggcttggagattatggagcaggctttttggcattccaacctatcttgggttgtccctcctttggactttctttgtgttcatgcttcagaggttttgggatcagggtaaaggctagaccattatcaagaggtacggtttttgcagggttgtggactatttgattggaaaagaatcaacatattttttataatcattcgctacctgactcgatcctatgggagaagatgacctttgtggcttctccttgggcaggctcatgagaagtacgtggagatattcttctctgttcttcatagaagttgggatgccatgatattttgactagttgtcgccttctattactagtgtcttattttgcttacttttgtttttttttctttgtccctcagcaatatgacttgttcgctgtaattcttgtattgtgtccctctttcctcaataatatttctttttctatcaaaaaaagaaaaagctgaacaactatgatgaatcccaaattctcttcagaggctttatacattttggttctcttccgttggatgttccctcatgaagaaacatgtgtgctaaatttttttagcatttattttcagtgttttattactcataaatgtctcaatggtatcccattgatgataaaagttattaacctttctcacataggccaagaatccatgtctcaattgctatttattagttttaatgtcagattcttttgaaggttgctgtcctttatgtggaggatctcggtgatgccatgatattatgacaatactttatttaaaatactctttatgtatatgggcagtgtgccttggagccttgtgaatcttttttatttaaaaaaaaaatattttttatttgagataagaaatacctcccatcgaaatattgatggatatacatgcagtatcttgctgcagaaaactctgttgcaaattactttctcttttaatacaggg

SEQ ID NO: 8465 - DNA, 1981 bp, Carica papaya
  Intron number 1 from transcript evm.model.supercontig_197. 23 (locus evm.TU.supercontig_197.23) derived from phytozom e v7.0 (chr-ID supercontig_197; pos 387394 to 389374 rever se strand)
gtgctgaaggtgaaaggaagcggaggaaactccaggtttctttctttctaattattttttctctgtatgatctaatcgatgatgattccattgttacaatgtagcttctgattggtcaaagtgtttaattcggaaaccttttgttgtttggttgatgagaaaatagtgatttgttattgctttttggaagttgggataagattgagttgattcgcgtctgctaaaatttgcctgaaaaggattgaggactgaataatgaacattcattttttaccttatcatcccaagaatcaccattgattaattcaagccaaataatctctttccaaaaacagaagaaggaaccaataatttctgttttggtactttcctattttatgttcttgtttatagacttggttgaattagatatatagaaaggccaaatcaaagatatggacagctttgacaaaatctaaatttgagtggccaccctgttttcagactttttatcaaaagaatttttcattgggcgacttcctttaatttcttaattgacataatatgagtttatatagccagcaacctagcaataacaattttccattggactgctaatgtgaattggacctataaatttctaacttgtttgataatatcccaaaagttcttcaataccaatagttttaggggaagtttcctcacatttgtgtggatttttatggtagatttcaggaccatgatgtgtgaaaattagaaagatcttggggacattaatgttcattttatcttccacggttagatatgagtttaaccagctatgactactcgatcatgtcaaagtctgtgcctgctttccacacaatattcatcatagatcaacaattatttgacccacactactagttcttagaagtttaagtttaaactattaataatatatgacttaagttcttatataaaatttaataatttttatatattttttcaacgtgagatttgagatattattgatatgttatcatcaaatagaatagttagtcaactcttacattaaaaagagggtgttgttaataatatttgactttcatttttttaaaagatttctcacctcatgccacattctttttgatgaagcttcttgtataaataataaggctctgaggattgaagtggccagcctggccagaaaggctgccggctttagttgaaaaggagggtgtattgaattaaaatcaatttaagtgaatgaagcgaccaaaagactagtatgccttctttagtggatgaacatgatcgagcctgacagaccacccataaacaacaatgacatgtctaattatgtataattagtggtatttaataatggaagtgcaatacataagacgtctgttcattaacttgtttactttttccgttcttaatcatccctattgatttttatctttgtttctgtctcatttgaatcatatgttttcactttttttttgccaaaaagtaaatataacagaatggagaaactaacaacagtatgtataaagcaacagttttttaatagtttatgaagctgtttatttctctgtttaccttctttaatatgtgtggtagtacccataagattcttttagttcacgtttatttcaataaaacacaatgtctagatgtttcataactccataaatcagcaagaagtacctttacatgtataaattaaagttcaaagtcactcatggcatgatgcttggattagcagaggtgagttgtacattgacgattattggccgcaatattggtgggacaagactggtgaagcatgccgattaaagatgacgtaatggccagggtctcatgggtcactaagcagcctgcttgatggctctgaatcttgcaaatactgctatttatttttctcctgaaaaaagtttctgttttcctgctaaatactggtatttattttttgtttttgtcgtgtttgatcaggaaaaggtacgaatagcacttt

SEQ ID NO: 8466 - DNA, 1744 bp, Carica papaya
  Intron number 2 from transcript evm.model.supercontig_34.1 6 (locus evm.TU.supercontig_34.16) derived from phytozome v7.0 (chr-ID supercontig_34; pos 100023 to 101766 reverse strand)
aacttaagaaaagatttgatcaagaaggtaaatcttctaatttttgtcttcttgtatatgatgtattcactttcatccagtcactaatttattttggctgtcagttttggagtctgtcatgcataatcctttagtttatataaactaaatgggaatcaatttgtagcttgtcgctggggaaaatatttaatatggtcttaggcatatgatgatattatgtcaatgagttgttagttgttacgtgattcttaagttaaacatctgagaagttctatttggaagatgatatcttaacagtttattccaagattatgatatccactagtttctcacttgatgccttaagagagttgtgtttagatgaagttttttttccccttttctttaatccaataagaaggaaaattcctcgatgatacttcctttccagttcacaaagttctatgttatcctcataaacagtaataatattagtaacacttgagtcatcaaagagattcctgcatcccatttcatggttttgtacccttttcaagtcatatttagttggtaaatgccaaatcctgttcatggttggaatggagaaagaatgaattctatgcaattaaggaacagatcttccaaaaataagaagtttgggatcaaaagttcacactgatgctatctttgggatagagattatcaatgtctttataaactccaggaaatttttctatgatggtatatgacataaatctataactgattagctgggccactctaaaacctaaagagtacttaaaacaaccttctaaaatgcttaggatccatataaaataaatgcaaattgcgtgtagctgacaaattttagaattacaaggtattcgacttacggagttagaaaaaaagagaataaaataaaaaacatagtagtaacctttgttgcaactaggagtttgatatttcttgatcccatgaatgtgtacctgtcttaaagcaagacttttgacatgtcctatccattagccctgcagagcttcttatttcctcatgaagtccagagaattctggaaaattccccttttcttgtgtctgcatagcaattgttcatagaagtttcaatgtaaaggggaagtagcaaggaaaggtcttttctctggaacaatgtagaaagcaaagatcctagttaacattctgtttacggtgtagagtcctatctacatgttacgagatctactgtacctttggaggggataatcttcaaaaaatattctttacttgttactataataaacttgacaactataggtttgaagtgatattgtacgaaagatttgttatgcagatattaaagaaatctagactgcttgagaatgccaggatacatgaggatttcacataatcaggcaattcaaacagattaattttcccttgaagccctcagctacattttccatcattctccttgaaattagtatttttttttttgtgtgcaaagaattatgatcttatgaggtttttgttctacggaaaattattcttgcattgtttgtagtttcagattaatttagcacatgtatgagcaattgattgaacatagcccaaccatcccatttcattttttaattacatttctcagcattgaagtttgatataaggtggcatcgatctgagttcgattttgccatctgctatcttcttgaatcttgacaacattctctggtttataggcatctcactggaacgtcctgttgcaacttcgtgt

SEQ ID NO: 8467 - DNA, 1461 bp, Carica papaya
  Intron number 7 from transcript evm.model.supercontig_82.3 8 (locus evm.TU.supercontig_82.38) derived from phytozome v7.0 (chr-ID supercontig_82; pos 527118 to 528578 reverse strand)
aagccacctgcccatcggccacaaatagtatggatcaattatttagttacatgcatgttttttccttccacctgctatagttcacataaatatgcatcggttcacatgcatggtttaccttctacccttagcttataaaagatcaaccttagagattctggatgccagcttgttgatctgaagtctatttgatgtgacaccaacaatgatggagccaagatttgttgtgtttttttagctaccacagatatatgtttttgaaaggtgaatatatgattattattatatacgaacatagtttacaataaaaaaactggcttacccataatccatgaaaaacacacaaaacaaagaaaactatcttctttctattatttattctcatactcatctagtgaataataaataattgcccttatatcattttagcgaagccattcgaatatgttttcttgcaaatttattatctatgcatgaaattatagatatttatatatacaaactcgttactattgtagatgaaaatttaagaaaggattgtattcataaaatatcaaaaattcagctccaacataaaggtacttaaggaaattttataccgaggatgctattattaataaactaatgactaaggctaaatataataaaatctaatatagtatattacatgcttaactcattgaaacattaattagttatttataatttgtagttatagtttttaaataatgtagtgatgactcatttaactttttactaaaaataaatgggtcttagaagtttttttttttatagtgtgcaatttcgcttttgaaaatttaattctgtattaacattttatagaataattcatgaaaatgtgttttgtgtatgctttacatatctctacatattatacatatagcaaataaaagtgtgggactggggtgtttgtctgtacagtgtgggggaaggggatgttggggcgtggtcccttccagtcttcattattgttttggttatccaaatcttaatttagggacgcaccactcaactcagctggctgaaaataaggagaaaaaaggagaagaaaaatgctgaaacacctgctgatatgatgtttggcctttctaacaacaagctctgctccttagcataattgaaggctgaagcctgaaggctggtacaccagcctgcaagaatgccatagattggggttccctttctagttattctctggatcttattatccttcttttcttttggttccaattgagaaatccttttttttcccaattgaggaatctttttctttttcctggctgcttcacaagggtgagagggagggcgggaggttagaatctttttttttttcttgttttggtaccatgtggagccttcttttctgaagaaaagtgtctcttacttgtaatattttaattatcaggcagtaattcttgctcttcagaagttcaagatatc

SEQ ID NO: 8468 - DNA, 4998 bp, Carica papaya
  Intron number 3 from transcript evm.model.supercontig_166. 33 (locus evm.TU.supercontig_166.33) derived from phytozom e v7.0 (chr-ID supercontig_166; pos 259579 to 264576)
tgtcaaaggtaactactgctctttttctctcaaaaaaagaagttgtctcttgttttggttacttcatatagaaaacaatattggcacaggagcaaaaaatatgatttgttattcttagttactcaaactgaatatagctcagttcactctccaaaaacaagtcttttacagaagattgatatatgtattgtttctgatatttggtcctttgatattgtagaagtcctaaataaagttggctctagaaagatttgcttcctagattgtaggagaagaactcttagattgcaagagaagatttgtttcttagattgtgggagctggataaccaggatctacgtttgattctaggatcccataaaataagtgtaaatctctttctttcctgatggagtcgacagaataggattcttccccaaattgttgggtcacaactcttttaactttctactatatatgtgtaattctggtaacctaatgaaatcaagatatagaattattaaataacatggcatcagagccgtctctgaatcaccttcatcatcgttagtaaaccatcacaaaagtgacaaaataaggaatgaacagccagcaatccatgacatctgaaatcatgtccaatcctgaaaattttcggataggaattaatggtggaacgaacagccctgtggggtccatcaccgggcataaactaaatagccagaattacctcccatgcttgcaaccgataataattttcatgtttagaaaggggaaggatgattacctcactggagcggcagttcctccaccaaaagaagacccaaagtatcgagcttggaaaactaaaaacaatatggtgatgtcttagctcatcaactcaatgagaaatgaaatgggggagaactttcttctatttggatcagcaaaggagatttgggatgcaacaaaagaaatttgctccaaagtagataactcatctgagttgtttgcaatgaagagcacactccatgacttgcggcaaaaagatctcatgtaacccaatacttcaacctcttgacccacaattggtagcagcttgacatgttcgaagaacatcaatgaaagcgtcatgaagataacttgaggtacgaacaatttgtggaaagaaaaaggctctacaagctcttgctcagactcatcaaggaacttgatgatgtttgagggaggattctaggttcgaaaccaatacctactgtctacgatgtgtcctccaaggtatgcatggaggaaagcagagagaaagtcatgcttaggaacctcaatccgctgcaaacacctgaaagtttgcacttgctgtccaaaacattcggataagccagagaaagacaaaacagaagaaaggaagacctagatgtgatcattgttggaaaccaaagcattcaacgaaaatctgctggcaacgccatggaaaccagtagattgagacgatcaaggaatccgaacagtaaagcaaaaggaaatctagctgtaagggaagactccactccaacagaaataatgttgtttagtaaggagcaaatgtagcttttgcaaaaattaatcaatgcttatcaaacaaacagcctactggacggcactaggtcaatggctcacttaagtaactctgtaaatgctataacttctaaggcaaaaattggacaacattggatcatggattgtggtgcttcaaaccacatgactggtgattgtagaatcttcgctacttataatccctagcatgagaacatgtttgtaaaagttgcaaatgagactttagcttgagtttttggagagggttctctaccgctaactagggatataaccttaaatacaacattttttgttcctagagtaaattgcaacctactatctgttagtaaattcactcacgagctaaattatgttgctaaatttgattcaagcctgtctgaatatcaggaactaagttcagagaggacgattgatactgctaaggtgtgatatagactctgtatcctcaaaagcaaccatctaggaacaaccacctgggtttacctcttagtaaaggcaagaagatgcaattatgttgtggcactatagactaagacacctcaaccttcattatctacaaaaacttattcccttgttagtcatcaatatagattttaagaatttccaatgtgaaatatgctaatttgccaaacattctcgtaattcttatcgacctcaaccttatagagagtcaagtatattctcattaatttatagtgatgtatggggaccattcagggtaaaagatattacgagagcaagatggtttgtctatattgatgagcactctaggatcacatgagtatatcttatgaaagaaaaatttaaagttggagagatatttcaaaagttcaacacaatgattcaaatccaattttttagaaaatttcagatacttagaagtaataatgtcaaggagtactttacccaaaacccttggaagatatttagaaacacaaggcattatgtattggagttcatgcgtcaatacaccccaacaaaacaatattgcagaaagaaagaattgtcacatcttagagtttgctagatcactcttatttgctactcatgttccatactatttccgaaggaagtcatagtcactgccacttcccttatcaatggaataccctcaagaatattaaacattctaacaccaagccaaaaactactcgtaacatatcttcaaaaccaaaccatttcatcaattcctctaaaaacatctaggtatattgcatttgtcatattcactcacaatgccacaataaactcgtagtaaaatatttcttccttggatgcactcaaaaccaaataagatacaagtgttattccgcaagcaacaaacgattttataccattatggatgtgacattctctaaaaccaaataattctacctcaaacttggaattcaatgggagagagagcaacaaggatcccatatttgggatcaaataggagaaaacaatcaactttaacgtcaaacaatggaaacaatcaagctatggaaccataatctatcctcaactagttgtaaaacagtgatggtaaccccaacaccttgaaagatagtggagatagtgagattgaaccccataaaaattgccaacaactggtaagcccacgactaaccaagaatggagagttcatggtatacccaaggaagaggaaaactcaagaggatatagagcaatgttcatcacctaagtaaagtaagagtcgagtgcaatatcagagattagtgtagtgagtcggtttatgaatcatcccactaaggaacattttggtgctattaatgggatcctgagataccaaaagatgactccagtaagcgattatacttcaagaagagctcatggagggacgtgaaattattcacagatgttgatcaggcagggttagtaatgggcaggagatcaacatttaggaactgctcatatgtatggggaaactaagtaacatgacgatgtaagaaacaatccattgtttctaaaagtagtacaaaagccaagttcaggactatggctctcgaaatttgtgaaggtatttggattgagcatatcctaaaacaattatgaggtgaaaattccactccaactgacaacctatcatcaataagtattgcaaagaatctagttcatcatgatcacggaacatgttgaagtagacagacacttcataaaagagaaaatataacaacagatgattcatgtgatacacattcctatatgtcaacatactactgacattatgacaaaatcgttagtaaaaaagaacttggagatctgagttccaagtttggtatggttaacatctatgtgtagcttgaggagagtgtagaagtcctaaaaagagctaactcttggaagatttgtttcctagattataggagaagatttctctcctagattgtaggagaagatttgtttcctagattgtaggagctaaataaccaggatctagatttgatattaaaatctcataaagtaagtgtaaatccctttttttcctaggagtcttaatagaataagatccgtctttaacttgttggatcacaactcgtatatatatatatagttttctggtaactaatgaaatcaagatatagaattatcaaataacagatttgtagtttaacaggatagtggtgctagaaaaacttagctgtaatattacatttgaagtatttgcaatttatatagtagcaaaagtgatactattttcatatctatgaccagtatatgatcagcagtatagatattaactgtaactgagggcatatagagtaaataattctgtatcagctacagcatattctaactgtctaaagaaaacataatgtgtgaattcagctgctgtttatttgcttccttgaattcttaatagccttttggttgtctagagtaatgtcaaattatttatctggagcttaatctattagaacattcatctgtttgtcgaagtagcaactggttgagtttttaaattttctatttatatggtaatttaatgaaattttgtataaaaagtatcagggttttaatttttaaatgaaacttcacggtcttgttgcagtatactgctattgtttggtaatactgagaccaacttgatgtctttgcctatgaacaatcaactctctcttattttatgttcaattagtttttttcttttttttttttttgtaaatttctcatttcttttatctttgcattagaagattctttttctttttcagttcaaatgcttttatgccacagagcttcatgggtccgtgaaattgtttaaatcattttgtccatatttattcttatgatcattttttacatggatgtcagttgttctgtcattataacctatacatttgttctctgggttctgtttacgctttctttactttgtctcatggattagacacttttttctcataaaagcataacgtttggtccaggttttatctgtgacattgg

SEQ ID NO: 8469 - DNA, 2463 bp, Carica papaya
  Intron number 8 from transcript evm.model.supercontig_8.11 (locus evm.TU.supercontig_8.11) derived from phytozome v7 .0 (chr-ID supercontig_8; pos 126683 to 129145 reverse str and)
gtgtttcttgcaagttccttgccttacttcactcggtgagtacataactgtgcttatcaaagcatcttattaagagtttctgtcaataaaatggcaaatgatattgatttctgcacgcatgtttcattcaagttgctaaatcttttcccatgaaatatgaagccattgtatgctatcaaagttcattgttttgcatgtattaatgggccatgctagctgcagcctccaaaggtgtccagaaggcccgaggctgattccaatgttcataagttggtttgagataatggccaattgtgagatgtttagttgtgcaccatggatctttagaattatatttccttgtagtgctgatgttgttttatttaagttacataacagtctaagtatatttgggtgattttctaattttgccattgtagtttgggtaggagttctagtcatatctattgtaagttttaaatagtagtaagattttatcttgtttaacatgaatctatagtttaaattctgttagtttcaagttgtagttaggctaggggtaaattggattttgtaaatactgttgtaactttcaaagagaggactttacttgttgaattctttaacccatttatgctaattgtaattttgtgaagtaatcttaatttatgaagcaatcattctcaggtatgtaatcccaaaatatctgggtatattatctaggtttgggcattattcatctgatattggtattcccagtgcggttcacattgcctggaaaacaccacaataaggaggcatcttttcccaattagtcttacatcatacatgtcatggagtgagggtatgttatgtgtttaataagacataacccataaagtgaaacgatttgaatatttcaaagggattctgtagtacatgcattagatcttgttccgggttggattactagagatgagaaggcagagcacccagccaggatttaacgttctgagaattcaagcaacttgtctatgcaacaatgattttcattctttaagagaaattgggggaagggaaaaggagtggcaggtagacttgttgagaaaccgtaacagttgggagattaatgagtatgagaatctcctattgaccttatgtctcataactttggatggtagcaatgatcaacctctgtgaagtcttaccactacaggttctttttcagtcagatctttttacaagtatctgacaaagcagggatattctggtatggacttcccttttagattaacttggaaggttaaagttcctcccagaatagcgttactttacgtgggaggctggaaggggaggcatcctgacaattgataaattgatgaggaggggtatgaatttggtgaattattgctacttgtgtaaaaaggatgcagaatcttgcaatcatgtttttctatggtgttcgatagtatacaagctttcgtttgtggtttatggattattgggtatcagctggatgatgcgggttcagttagagatgaattatgggcatggaaggcatctatgggcagaggaaatatgtggactttatcccacctaccatcttttaggtaattcagaaggagaaaaataaaagagtatttgaggcagttgatgatgtgggggatattgagaggattaggaatagatggtttcaaactcggctttataaatttgggtaattttctttattttatggaggatgttggggatcttgctgatattttgttagatttataaataatttgtatatggattgacacccctttggtgcttgttaatataattttgtattttttatttgtttagaaaaaacttatgtttttgaaatttttggaaatcacccgtagttggaggatgtaaaggaaatgttacttttgtatgcgaataaaagttatgaccactataacctgatcatttgagcaattacatacatccattattatcaacccccattgcatgggagcttgagcttttagctagatgttatcaacctataaatgttatgctatatttcttttaccttgggtttcttaagccatgtggtttatgcatgtttctgtttagaagattgtgagtctcaactgtctagttacagaatgagagcctgaggatggatgaaaaagaaaagacacaaactactgctgtcactagtgtcatagaaaattatcaatattgcttaccgtttccacaaagaattttctgaaaatttgatcttttactagaagatgtagaggtttgtatattcaatggtcttggaggcacgtgattttagcacaataccccagtggttatttttaattgcaattgcataaactgctatgcccaatatttaataagtttttagtatttgatatattttatatatctttgataatgtgataaagaacgaactctctagttttgcttcatgttttccttttattttcaggttgaaaatcaagaacttattttggaattctggaa

SEQ ID NO: 8470 - DNA, 1284 bp, Carica papaya
  Intron number 5 from transcript evm.model.supercontig_55.3 3 (locus evm.TU.supercontig_55.33) derived from phytozome v7.0 (chr-ID supercontig_55; pos 216208 to 217491)
gtgttaacagtttctatgtaagtgctttggtagttggtgtttgaatatattgcttttccagttattattttttgtcatactttaacgtttcttggattttcatttcttaacattgttagagaaaagcatgaattcaggttgagaattcttcacaagttcctcttcctatgccatttgatatacagatgaaatggggatctttttttctttatttttaataaacattatcctatatcatttacatggtctttttacctgcaatctggttgaacattttccaatcacaatattggatgtttttttgctttgttttgtaggtgtttataagcaattttaagagtctgttcaaatttagttgtttcttaatgtaataaacatagggcttgctttggctgttaacttctctactcaattttgcttattcagcttcagcttcaaaagacactgtaaaacttacatcaaataagttattttcttaaatgactaaatagacttagacaaaaaagtcttcttacactaaatagccccagcgttagttgcaaaaattgcagaagttccatttacacaaattttacgttactacctacaaacaacttttaagtattaagaataatcgtccctccccttttttgtattgacacagtgagttgagagtaactattttcttaatatgttcagttgcttatttatctttatagatttatttttgcaagaaaataaattaaatatgtttttaatgaaaaacatctttattcaaatacatgaccacttattttctgaaatcatacacgggtactttaaataataaatactttcaacacatttctttcggtaaaaccaaacgctctctgaatgcagttaaaacatttgaaataaattataagagtgattatttgaagaataaagagcaatggctgttatcaaggggtgatttctgagtgttgggttcagtggttggagcaaaatgcaggattttcagccaatgtgagagaggcagatttacatggccccttatgggctaaggcacatttttttcagtctagtaggtggatatcttatactcatttcttttactcttttagaacatctttttttccccctttatgacagatacttaggatttgctggatagaaaatgttagtgacataatatttctcgttcttttcccctctgcattttctttgtcatgttgaaggtatgagagttctgcagtatatagtaaatcctgcaaatgctaattttattcttgctataggttaaagatactgtacaagtagatcaaa

SEQ ID NO: 8471 - DNA, 1785 bp, Carica papaya
  Intron number 4 from transcript evm.model.supercontig_151. 6 (locus evm.TU.supercontig_151.6) derived from phytozome v7.0 (chr-ID supercontig_151; pos 52513 to 54297 reverse s trand)
atcacttacccttgatagaagccagcaggtttgtgatagtcttcccaagtaactctatgtttttcccatttgcctttctagttagaaatataatagaacttttgagagagaaaaatataactgaattaggaaaatgtggttcgaataataattaattaagttgagtgggtataagttctagtaattaggaacttaaaaattggattgtacagatttagcaactggacctgcaaataatagaaaaacacactaagtaatgcataaaaaattatcaggatttgtaaatcttcaagtcacttccagattttattttagttttagtgcatatgcttgttcatatggtgtatggacattatatttttaagctactaaaagaacttaatcaagctcataagcttgcatcttaaggcctttatttttgaaagaaattctttaagaattttttttgggccacgaagtccatggtctgaaaccaatgtttccaaaggtagttttagtcacaactcaggacaggggcctggtcaaggttccagggtgacaagagaaggagaaaacttattttctctcattgcttggctactttatggagtttttttttttcttttttttttttgaaataaaaaatgtaaaagtatattgataggcaccaagtgggtgccacccatgtacaacacatttacaacgtagtaatagtatctatgacatatttgcttccacgatatgtacaacatatttgcttccacgatatcacctccatatgaagtctatttgccaagtccgccctcaaatcatttctcttggttttctcctccaagttgagacccgattccccttccagttaatccagagcgttgtagcaattgtagatatgctcattgacatgtaattacttttgtacatgggaacacctccttggtgccatttacttattataagtcctctcttttatttcaaaagaaaatggtatctacgacattcccaggctacttcatgggttatttggaaatggagaaactgaagagcttatggagatgtaacttcctcttttcttaagctagaaatcgtgtgtattttgttgaagggtagccactagctctcttacttttgatgaggacttagggaaccttactaatattttgataactggtaaatgtctctctttttatacttggatggaccccaatggtgccttattagtctctttttctctcataaaaaggtagcacctgtgacaaggctggtctcaaatgcttgaaattttttggttttatatacttggttggaataaaaaggactattctatagcttctagggcagacattactttagcctttaggtgcataattacattgcatctcaacttctcttgtaaaccaagtaaagagagtgcatggagttacttagctccctcttattctctctcatacgatatcagcttcttcaatgtccattgagcttctaatctgaagatgagaatgtatcaccttgacattcttctacagaacttggaatggacaagtgtttggagttgttaggtcctcactttttggcaatggtttgtctgttgatttaaatctattctggttttcttgtattttcatattctgcataatttttcctgagtacaattttccatcttaacattgcacaattagggtattcttggcacttgattaatcaagtgtggtctgaaatgtgcagcgaaaatttgcttgcttttgtgtgtttttcacgttacagaaactgtctaataattgatagtggtgaatttgcaggctgtgtaat

SEQ ID NO: 8472 - DNA, 1760 bp, Carica papaya
  Intron number 1 from transcript evm.model.supercontig_318. 3 (locus evm.TU.supercontig_318.3) derived from phytozome v7.0 (chr-ID supercontig_318; pos 19963 to 21722)
cccggtcgtctcctacaggttttgcttcttaatttcaaattgctttcggtgtttcctttttgtcagtggacctttttaggatttaggagttttttggttcatcgttatttcagttttggccttgttaagctgcgtaagaatgtgagaagtgaacgatgactttttttttttttgaaaggggaaatgattgtggaattgacggattttggtcttaggatgatgaagatgttttgcttactggattctgtgaatttggctaagaaatggttgtcgagactccaatttattggaataatatttatgttttctagaaggaagttatccactggatagttagtgatgatccatatagggttatcgggttcttaggtttgcttctttttttccttcatacttcgatgattcttgtttgctatggatgtggcgttgttggctgttgataaaggcaaaccctaatccagtgtaggcttgtgatgagccttcaggttaacttcatcagtagaatttcagtgtactgttagttcctatatggtgatttcactggaactggaattttgttgtgtttgctttggctggtagtaccgtaaatttgaaggttttccatatattcttgccggagaaaattcatgtggcacatttgggattaacaaggaattatctattatggaaatcagtctgagaaaacttgggggtagaatgttctagatggagttccagatttataaaaagtatcttcgatagtggttgtttttctgctttcatataaaacaaggacactgaaggcatttccatatgtcagtcaaagtgatctagagcattatgtcttcatatggttcaggtttttaaatcgtcagcatcataactaccaagtccaagcctctatttatttgccatcagtctacaatggaagaggacaagtcagggcttgcttcctctcacttagaagggaatacctaggtattattcctaaaaccaaattgtgatagaccagaaatcttgtggctcgacttgaaatctaactacagtctttgctttagacctccagtctaacactaaatctggaaagttagtaaaaaatccttaagattaggaaaccagtgttacgttcttctctatgcaaatgtaagttacttcatcaataaaaatcaaccaataaagttagcaagagaactgtcttgtagactatcaaactttaggagattgaaaagttctccccaactagcccccaccacaggtcatcaaggccaaaaatcaaacaagtaagattcatgcttgctgcaagacttctcagcagtcacccatttttttttcaaaataaaagaaaattcgaattaaaaggtaccaacggggtaccgcccaatatgcaattctcagcagtcacccatgactagatccttaacatgggatcataataaaaagcttaatatagttgtgctttctcgaccgctaagatgaaagagcaattttttaggctatccttactgagtggctgttctctactataaaattgtcagctggataagatcttggaacagggattcaaggattttttttcttttcccctttctggtgatgctgtagttggatgttgcagattgtctactcgtctttatttggtgcgacaagatatcatttcatagtacaataatttttttgtagtctaatgcttcagtagtttgtcatgtggttgtctcactatgttgatgtattgggaaaaaaaaccagcaggacgttcattgtttggtggcctcagcaacagt

SEQ ID NO: 8473 - DNA, 4510 bp, Carica papaya
  Intron number 3 from transcript evm.model.supercontig_73.5 3 (locus evm.TU.supercontig_73.53) derived from phytozome v7.0 (chr-ID supercontig_73; pos 783646 to 788155 reverse strand)
ttgaaactgcgggtattacgaatatactcgaaaaggtattctggtggtcgaatgaatatttaaatatttttggacaattatgcttcttgacaaatatagttaatgaggattaaaaggtatttccattatgtccaaacagcacgcctaccttgaggaaatgatgaatttgttctttgatctgttggtaatgcttaaactggtttctaaaactcatgaactagtttgctgtcaatttgtattgaaactactgctctttcttgttggacatttccactcttcctatttcgttgaaaatcccttggtgcctagagtggaacaaagagcagttgaacttggtcacatgtcagagatcttttgatgcaggacaaaataggagttatctaaaaattttaggattcagtactctatagtctgtattaggacaaaatttatttttattattcagctttttagagcaagtaattttttagtggagagtttctctcaaaatctgtgttggcataccagaagaatcaagccattggtttattcttttgcctactttattttatttcttacaaataacttattcttgtattgtattaaatggtattggagcaagaaacaatcaggttcgatcatggaagccgagcaagcaaaaatccctggattaacacaaacccatagaatattgctattaataaagaaataccttattcttgtatgtataaattggaatttgtcatgaatatatgatgagcccccttgaggatgagactgattttgtactacttggttgtgaagagaactgatttaggaaaaatcgaggttaatttgactacgtaggaatttagagataaatatcttcatgcataaaatattagattacctagtaaaaaagattttaaaatctttctctccatccgaacaatagggctgttatgaatattattaaactcgttgaagagaacgcacttagtatttaaagacttcaaaatccttctccccatcagaagaatagggttgttatggatattattaaacttgttgaagagatcacacttacgaattcttagattttttttttgaaataataggagttcttagatatcacttgtaaaagtttttaaacattacatttaaagatttgattgcatcatgcaatcaaaaatttaagaaactctcaaaatattttattgaataactaaactctcttaaaagtgactctacaatatattataatgattcctacataacctttcctgaattgaattagattacaaatgctaataggattagaaaataatagtactaatacaaatgaaaaactaaatactaaaaataataaattctaaagtcagaattataatagtaggttgctaaatagtgtaatagcttatacttaatagaattatggtttctgatctatttaagcaatttaagcatagatcctgttggatcaacaaccatctaggtgtttaagagaaggatcttcgtcaagaatttgatgagattcctaaacatgtcaagtccatttaccttgcaataaatacataatttgatcaaatatgataatatttcatagtaaaagaagtgggacagaaagttcatgcaaggatgctaataatccatggtttagagaaagaatcgttgaagttaatgtgttttttttctttttttttttgacacggggacaaattgataaaaaatcatatgaataaagaaacagagtggattatatttggtaatcaaatttatctaggaacatagtggaatttgaagataaggttttctcagctactggagaactgatgccggacaaactaggagtttctaaaaaatttaggagttttacttctttacatgaaaaatgcaaattattcgattgtcttactgcccttagtcaggttacaagctcaaacttctaggttcgacaagattttttagtttaggtttttccgatttaagttgtctttggtatgttgattagtaaattacttttcttgggtatttaaactgttttattttttttttgaaataaaaagtataaaatatgtattaacatggtactaaaagaacgggagtatcgcccatgtacaaagtcatttacaatgaagttaaagtgttaataacatcttcaaaatccatatcactattgatatcataatttagcataattgacccaaacatatggatccacctatcttttaatctattagtaccactctcaacactatcaaaagctcttctattccgctctttcaaaatgaccctaaaaatagttaaaggaataatgttaataatatttccttttacatagaaaccatcctaagcccaaatctcttcccaactgaacccaagataacccaattgatccctaataaaccataaatcacataccataagctataagctgtaggacaccacaacagtaaatggttacatgtttcttctgcctttagacagcagtagtatctgttaacaatgattctgcccttgtttttctgtctgtccagagtaagaattctttctcagcacgcctcccatgcaaagaaagttattcggggagggatttttgtcttccaaatgagctttgccggaaacacccttctgtcagtagcacccttaacacttaaatatttataatgtgaagtaacaaaaaatttttcattctttgcagtttccatacaacctgatctgccttggttgacacctgctgtgaatcaaggagctgcagaaaattttcaaactcttcaatctcccaatcattcgaattccactttacattaacacgccatacagtactcccatttacaacctgatatgcctcctcaactgtcatcttattcagttggacatattgtaaattctgggaaacctcctccttaaacagccatcatcaactcaatcatcctcccaaaattaatttggtacatattctagctttcacttatataatgctgaaaggtttccacagcatcagaattttcctcacggaccatgcccgtgaggagttgttattttggtcatcactgctgctgttacatatgatcaccccatcttgtttcaataatccatctctaaagtctattttctttttcccaatacctccacaaaccattttctttgcacgccttcattcaatttaaccaaggaacgaatccccaatcccccataattaaggggtacttttgatgtctttcccaattgactaaatgatatttacgttcatctataccatcaccccacaaaaacttgcattgaatactttctaatagttttgtcaccttcatcggaatagtgattgtagataaataatgaattggtaaattggcgaatgtgctcttaattaaggtatatcttccttttggcagaaaacttctttttcaacttgcaagcttttgtttaaacatatcaatgatcggttcccatgtagtttgatccttatatttagcatccaacggaaccccaagaacttaaaaagaaaattttacttctttgcagctcaaaattctagcaaaaggtccagcatcaccgtttcctcctattctgaccaatacagatttgttaaggtttattttgagtcccgaaaccgcttgaaaacataataaaatacatcttaactgtaagagattcttcaaatctagtttttcaaaatattaaggtatcatccgcaaagaacaaatgagtcatcaccgtgctgttctctcccctgccaatagagacacccctcaacagcagccgttcatttagctctttccaatggcccattgagagattccatacttacattgttttatgattctcccaaagcacaagattgggtagaaatactttttagaattctttcaagaattagtactgcttcatttaggatttctacactatatatttggagaaaactaacattgagtcattcaagttttgggaactagtcaaatttcagtatttttatctcataaactctttagttaagcttcacagagtgaagcttcgtcttatgttttcttactgcccagttttctctctcaagtaatccagtcttacctatattaattttttgtttatgtcaatattgctcagaatttaggtaaaagcatatgggacactccaagagaaaagtaggcatatatgtcctactatcctctgcacttgctcaattctcatttctaaatcattataggatattgagttgctaagtgttgatttcagtttcatttgcttttttatcttgctaaattctcgggaaatatcagtttggttatgacttcaaaatttgccacactttatgtaagatgtaataataatagcgaagtcattacccggtttgtagtcacagtataatgattttctaagaagagttcttagttcaaattatatcactaccaatcatctaaactgatcacaactatgtggatctaacgtttcattgtcattgtatcagttttttcttaaaattttctctcattcaatttattcattctgcatgtacatgatcattgttttatatctgaattcgtcgacaggcttg

SEQ ID NO: 8474 - DNA, 2884 bp, Carica papaya
  Intron number 2 from transcript evm.model.supercontig_2.13 6 (locus evm.TU.supercontig_2.136) derived from phytozome v7.0 (chr-ID supercontig_2; pos 2085252 to 2088135)
atagcttcacatataatctttgtcaggtcactaccaaaaatttcacatttctttactgtttcatcttcatgtatacatgctgttgctggggtcttctctctctctctctctcgatgttacttgaacatgcttttgcattcctcccatcataatcaattcgggaacttgtcctattcgccatgtgtatctatatgccttctttcatttggagattggaaagttttagttaaaacgtaaggttccatttgattgccatgacaggggtacccagaagctggaatcagttaagggaaatgcttgcatctgatcaattaaattcaaaattttccccttttagctaagtttttggtattgcaagaacctgtaacgttggatttctaacgccttcttccctccgatttgcagcaatttaacataactaaactttgtatgagtcaattgctgttaggacgataaagggacctgtgtagtattgtatgtttcggtgtctagttcaaggggtaagagattatcactttgcttttcagaataataaagcttgtggatacaatgagatttttttctgagaggggactaggacaaggttggagaattcaatccaccactaagggtgcttagctaatgagctaagcttttcttatttttaagtatatgctaacctcattatttcttcaagtttgggcattcatattgaaactacaaatatgtcagttatagattagcattttgaagttatttatgagtttgtaactacaaaatgtcaatacgaaaatgatctatggacaatcactctatgtttctttaatgaagttacaattagtgcagataatgggatattacaccttagatatgattgatgcggagcagcactatacacccaaaagtatgcttaacaaaaagtcctacttcatatttttttggatctagaaatagatggtcaactgttcaaccttcagatcacaggatacactaatacaacatttagagaggacacccacaagggctctgatgttctggactataattccttttttagtgtgaatgcttctttagagggggggggggggtgtttgggtgagtcctctctcttttatttatacctttggtctctaaaataattgcaatgctttgtattttctggggcaggtctcgccaatgcctaatatccatgccaactgaggcagtggctacctaagactgcttagtgcgaggtggactaatctctatatgtcctttattcgaaaagtatatgagaaagtaggagggtgagagatttgatgtccactttgctaaggttgcactggttgaccgaaatcttttcctttttcttaggttgtctatggtcaaaattaggatctagctctgtgcagcctccggagttatattcaaaaacttttttgagtgctttccactcataacgaatcttccatagaaattatcagacttctcacagtgatacatatgtttaagggcctctgaggtgggggttcatatcaaagtgacacaaggctcaagggcatctaaagtggggcatcgtatcaaactccttttttgttgttttagctccaaaatcaccatatgaagtttagaaggttggccaatccgttttcttgaaattgaaatggcaccatatggaagggatacataaataataacattggctatttttaagatttcccagtttacaaaatttaccattatgggtggggaaggaatttcaaatacaatatttaccattatggctgtaagctttattacaaaaagtggaagtctttgggctgagctgttgaagagtttcacatattgttagctgaaagcgaccaatccttaatttagagagaatataccttgtagatatgacatttcccatgccaatagcttgaggtactgcttcttcaaaaattctgttttgtttgtttggaatcttctatgcagtcagaatgtgagataatcaagtttggtagcgagaacaaccaagtctctctaacaatatctgatggaatttgcttcttaagattcattgactcatgctccttttgctttgcggggataactttttaaaagtcatcttctccattttcctgggtttgtttggaaatactaaaagtatctgaaaaatcttttctagtgaaaggaaaatgaaaacaagaaaaagaggaaagccttctcacattttcttgtttcatatatttttcaattctcagtttctcttctaaagcccaaaagtttctttctctgctttatgtttgattgagatttctctaattaattactttgtgtacatgcctaattactttgtgtacatgcctaactaccttgtaattttgcaatcatttataatctggatatttattttttttagcttattgaaggaaataatttattcttttagttgttaaggatttatctcaggttgcactcatgtttttaaaatttaaagtatttttagcaaatctaatatatcattgtacttgttgttatatgtgtttacgcaaagatatttgtataatcattttaaaaagtttgatgttgaatacatgccaatcaatggaaaatatttttagtcagaaaatgtttaaaagaaaattcatatgggaaatcattttctccaaatcaaatgaagaaaagttaacacttctttccctcctcatctatttagtgaaaaatcaatgaatttatggagtatgattctttcccttttatcctgcaattttccctcttctgggctggggatgtttgcaatttgcttaacctcttcaataattttttatctcttacctatatttgctatatgtctcccactttatctctcacattgtgaaaaggaaaaagtatgagaaatttcttcattttaccttattctgcaataatgatactgtagtac

SEQ ID NO: 8475 - DNA, 4803 bp, Carica papaya
  Intron number 1 from transcript evm.model.supercontig_170. 51 (locus evm.TU.supercontig_170.51) derived from phytozom e v7.0 (chr-ID supercontig_170; pos 267750 to 272552 rever se strand)
ctattacttgaagcgcaacgtttatctccctaaaggtaatactcgaatccgcctatgtcaacgtttcttaatttttttttttggtcgttttggaatctggtctcctttgtggtggagttttgagtttgatgtgataggagttttcggtttgatattaagtttgaatcggagggtctttgatgattgcctgcgtctattctctatttttcgttttccgatattcgttgctgatttaggaacgtttctgtttaatgtgtgggatttgatcattctcttgttgttatcgttcttttcttttactcttacatgattatcttcccgactgtttgacttattttggaattgcatgtttgtcatgagagggtttgatctccaatctgagtctgtacttctaaacttgttcatgagtgtttcacgtgtgtttggcttaatctgattcttaacgcaatttgatgttggatttgctgttaacagtatttggatcagatttcagtaaatgactggacgagatgacgttctgttttttttttttttttgggtatagcttttgaatgtggtttctttatggattcgttttatttcatgttagattcctctcttttgaagttctgatttttatttttctccttgggaaacctctattaatttattgttgatttagtaacatttgattccttttttaatttttttacctctgcattttaagcatcatatgtgttttcctaccaaaattcaattcttcttttgtcaaattttcagtcttcaatttgtggatatcatttgttaactctgatggcttaggaattcatgacccagaagttttcttcccttattttgctatttgctaatgaattctacatttcattttttatttatagacttctttggattttaaataaatgatatttcacctctcttgtttggcttaagtggacttctgtttcgtttgatttttttgtttttgtatggctgaagtcgaaatgtgagagaaacagaaagagaatcttgaaatttcaaatttggcttttgcatttaactaaatgcaggaaaatttgcgttgtaatatggtctaatgtaatcagttgtcttagatgagtggagacttgtatctggaaagttttaacaaaatggaaggcagaaataaattcatctgttattttcagtgcccaagataggccaaagatcagaggtgtaaatggactttgtccttttcttattccttttaggatcttgagtacaaaagtttgccaagatccaactctttggatttaaatttagaaaaaagaaaagaagttaaaattgtgaagtagtttgatttggatggttaaccaccacaatgttttttttttgttatttaaggcttgcttgaaacaatatttttcaaacagtatatgaaaatctttacttagttaaaccaccagaggatgaaacttctacttcaaatgaattctgaatagaattgaattaatgcatcttaaatagaaatcaatttggatttcaaataaaactggaataatacgtttcatttccatcacaatttacagaatttgaaatgtattgtctaaatttcactcagaatacatttggagttgaattttcattttgtgtttgaatgaactatatgttttcaaatgaattagaaacacttcaatggatacctcttagtcgtgtttagttgttccaaatatatgataactgtttctatttctaggaatttctgcatcttgttccatctttttgctttttctctggtaaatgtattaaagatttttactcgttaaggggctatgtgcttgcttcaaaattctttttctgctgaactttagaagctgcttgtttatagatgatccatggatatttgaaagtagcagtttgccccccacatataggtttcttttatctgataaaggcagttacagggatatgaccttagcacttgcttgtttgcatgaatctttgggtattttactacttcctaagagtaggagtgtgtggttgttccgattaggcttgttgttgctcagggggaaaaaaaggaagaggagagaacgcatggctgtcacaatcatgacgtgggggcaaaattccgcaaaaataatcatttgcacagaatgcaaaaggagtcatcagtaatccatttaaggtaggattaggcagccaaaacttgtaccagtctaataaagagaaaccaagcccagaaaacagaactagttgggaatgggtaaggcaccgatctagtgcataggctttagaaatggctaagaaaacatttataaatgaaataaaataaataaactaaaactaaagaaacatctaaatttgaagaataggaaaccacacctaaaatagtactattagaaaaaaagagatttattgaaagctatgttacatattaagccttatttaagcctttaagtatttttacctaccagcactcttaaatgcccaaaacagtcctggctttcttagtcatttttttgtttcccttaaaatggccagtaaattaccaattttctgtttaaagaacgacaaaacagtcattaacaatagaagcctaaaacagtctctgttttcttatttcttccatcttccccaaacggcaagtagcacatcaattttctggtttaagcaacactaaacagcatctagataagaagattaaagcagaaatatgaaaagagacccaaagattcgttgtatcccatgtgaaaaatcaagagaaatggatagcaaaaaaattgaaaggtcagatctgatttatgaaaccaaagtcaatttagagccctaaaaagattagaagaaagattcaaaacgttcatacttcaaagagagaacatagctttgcgtctaaagaacttaatacactctaaataggatcacaaccatgctcgaagaaagaaataaaaccggaaagatatcaaggtttggaaccaaatttaaaatacctatggaggaagtataactgtatttgaaaaacaagataaaggctaaaacaactttaatgcttattcatcaaacacaaacagtttaaagaacagtcagacatttgcgagtctaacatacattcagaagatccttaggtggtataaccaggacttggaaataagtttcaaataggcatgatggatttgaaattctgaaatgaactctgaagcatcaaagagaaaatcagaatataaaaaaaattgcaggggaggtccttttacaattcaaagcagctgcctaaaccataaaacaccacatctagctcatggttattctactatgattatcagtctttcctcctttgttttccgtttaacctaaacatacttcactctataaaattaaattaagctataattgttccatacattcatgataccagaatcacgcaacaatcaacttaagctcaaatgatagtggtcttgtgaaattgtcattcattctcatacatgaggatttcaataaaacagaattcagatccttttacacatcttgacatgttcataatgatgtttttctcaaatttaaaatacaaataaaggtaaaaataaattaaaattaaaattagaaagtagaatgaaagataataatactaatgataacaatcctacaaccatggtaatctcgattttgttaattttccaattactacactactaaatttctattattattattattattattattattattattattattattattattactaggttagataaaattgaggtatgacaataacctttgtccctgtctactggaatttttatgtatgtatatttccaattcctagatactttcaagtctaatatgatctttatcttttagtataggctccatattaagacaatgggaaaaattaagaagatttcaatacatttagttttttaagtaaatttctaattgacaataatcaggcaaaggacaaaattgaatttctttacaagattgattcagaaattaaagcaaaatgctggtgcatcttctatttttcctttctccgtagctttcttcatggacttctgtatatttcgacaaaggagctgactgggtgtgatgacagtgcatagtattacatcatatcttgatgaatgtcatttacattagtgtgtcaattgtgtctccaaggcactatatcctaactcctaaataactactactaatgtttactttagtatagtaattaaatatctccaagtgaagaatgtaggtagggtggactggaggagctgtctttgctggttcttgggtgttgtggttggaaaaaaatgctagacttttcaagaattgttacttctctctatctttcccatgagacatattgattttctttacatctttgtggaccaaagctcatggctgttttggctaatttgcggagggaggatgggatgttttgatttttatgtggttttttcctttttcttctttttattggcttaggaggatattttcccctgctatctaataattatttttaataaaaaattaatatattttttgaaataaaaagtataaccatataaaaaagctatggcaccaagggggtgcaacccatgtgataaaaaattaatatattagtcaatcccttatgtagtaatctataaaattgtgtaatatttgacaaaatcgctatacacatatcaagtgttgctaggcaatattagtaaattactaaatcatgttaccagataactacacaacattaaatattggaggtggatttctggggcctcaaaggcaccatagattcaccatatacctgggcctggaccatgagcattttctgattactgatttttcttgctgcag

SEQ ID NO: 8476 - DNA, 680 bp, Carica papaya
  Intron number 1 from transcript evm.model.supercontig_119. 92 (locus evm.TU.supercontig_119.92) derived from phytozom e v7.0 (chr-ID supercontig_119; pos 641189 to 641868)
taccctcccatttaccaggtatactattttttttttacatgttaaacctgataagggtggcaaattaaataagatattaataaatgatacaatgttacctcttttgtcgactcgtatcccaacgactaatagacttctcatctaaacactctgttgcctggaggtgagagtttatttcttcgatcaaactctcatattgtgatctgtacgtacacgcaagaaaataattcctgaatctgctctctcaaaatctctcttcaaacgttcagagttccaaatgagaatattgcttttacaataatgaaaatcttatgtattgtttttcttgatttatgtacaactgggacagctgagacaatcaatcatcttctaatatatatatggaaagggatggatcaagttgcgtcaatggccctttcccgagaccatattgaacaatccctgttctgagccaaaagttcctagacttgagtaatttatagacattgatggatcctgtcttctggcattgtttctgcatctaaatgaaaacaagctttcatattttacttctcccagtatgcagattctggattttctaaaattgaaccactagttacacagtgaagtcttttgtgtaatatttagttatgtagtttgcttcttattgcaacattttaattttctatgttagtgtccca

SEQ ID NO: 8477 - DNA, 1510 bp, Carica papaya
  Intron number 7 from transcript evm.model.supercontig_130. 80 (locus evm.TU.supercontig_130.80) derived from phytozom e v7.0 (chr-ID supercontig_130; pos 925350 to 926859 rever se strand)
gccagtgagtatttcaatctccgtaagctcaacctttttttttttttgcagagaaatatgcatctaataatattaaagaacatggacaattgagttttgatgtgtaaactggggaaacatatggcatggtttttttaattctgtcatttttattatttggtaactaatttgtcttgattatgccctaatgttttacaaaatttatgctaatcagttgttgaactaccaattatatgtaaaaaagatagaaaactatatccttccttgtgttcactctgcataggggtacaagtgtcgggtaactggatcttgctcatggagtcaggatataaattgagctttcactgagcccagcctctctacttttatgttctgaatagaaaatggtgtcttagattattgttattattatttttttttgtatggagtagtcatcttgcattcattgtagacacttgcatataagtttcaaacttgtcaaatatcatgcatggatctgtttattttcactgccacaacagcgatttcttgcttattttataattgaggattgcaatcaagcagtttttttttcccgtaggtaccaaaagaaagctgctaagttaattcaagggttcaatgcccgggcaaatgaggtcaaggcagaaactaactttaactgcttatggaactatgtgacttggttgagatattaattttcagtactttatgctttcatctaggttgcacaagaaacactttctatgatggggatagttcgagcatatggaacagagagaaaagaatttggagggcaaggattctactgctttcatcacattttttttgggtctaactaagcaaaaattttcaagatttgcaataatatgcacctttaagttattcccaagataaacatgtttttgctacttcagcacaatggtgggtcaaaatcatagcagattgaccccaagcagttgatcaatagatcaatttttcacagtattgacctgtaatgcgtggcacagtgtcgacatgatgaatttgccaggctgtcattatgtgcctcatcatggacattgcacaccttgatgtagtatatttagcactttgcctgccgatatactgcaccatggtgcagtgttcttctggttaactcagcacatacagggaactattattttttagggacatccagggaattatttttgagcatattttggtatgtgtttgtgtatagatttatatatgttggagaattaacctgtagatttaataaataacaaactcacatagatatgagatggttttgggtgtgactgcatgccttggtgtcacattccttaaccttttcctaggttttccatttaattgaggtgtccatatccttactagtttcccattattgacattggagtttgaaagtaaaatgatgaattaggcaatatttttgtaaacttgcacttttgccccagacactaacagcataagttattaacttttgcatcctatttggtggtaggtacaagca

SEQ ID NO: 8478 - DNA, 8749 bp, Carica papaya
  Intron number 7 from transcript evm.model.supercontig_173. 18 (locus evm.TU.supercontig_173.18) derived from phytozom e v7.0 (chr-ID supercontig_173; pos 204149 to 212897 rever se strand)
tcaggagggcctgttgtgagctttttggttacaaggtatcatatgcatattggtttcgtattttcttctacattctcctaacttttattcaccagaaaatggggacctaaatttgacggattagctcagtgaatgctaaagggggtgctgatgcgagtggccactcacatatttgtttaacattcttgtaaagaagacatatttgtttgttcataatgttaagtatgaaatcataaataacctctaccaagattaccagcatatactgctgagtttcttgtttgtttgtttttaatagctaaattatctagaactttaatgtccagtggcattaaaataggtgccaataggttggccacatagatttgctgcaggacccaggaaatggactaagaattggtttcagcttcttacaaaattaccctaattaaggtgaaataatataactctttggtttagaactttgaattagagtgttttaaatttttcacaggagattatcaacttggaccctaaaagcttggaaggttcgttgcaatagccttttatacatatgtattccaaggagttgaatacatcatttcataaattacaactaattataatgtttacctagatatcaattgttctttctactaggctcaatacaccatgattgtatgcctatagggccaaaggtctgacaagtacaaaacctaggaccgtagaaacttggtatcagaataggagatcatgaagatcttgaatctaacttgtatcccttttgggtttgtgaataatcgacgaagatacgttaaataagtttcaaaacatttcggtgaaaaagaaaggctcaggttgtgtttaacagataaccatttatcctctttgctatttcgttttgttatgggctatttggacatgagttttcatgggtgatgcctttatttgagaaagtggagagagttaggtgaaaaaatcatgcacattatcagataggtgtcttttgattttagcaccaaattgaatgtgaatcatagcttggaattctgaagcacattgcttatatccaatttggatttaaagaggaatatcgaagagactctaatgcgatcatcaataaaagataaactattgtgacctaggacatattttgaatagtagagggtccctgaatatcgatatggaatggtaggacttagcttctttgattactgattgaaaatggaacacaggacttagcttctttgattactgattggaaatggaacacattcatgttttgcaaattcacaagccttgcaattgaaatgatcagcacttagtcctttaaaccaaaaaggaagcatggtttcttaaaataccaaaaatgtgcacccaaactaaaatgatgtgtccaaataatttttttgttggattatgatagaagtaatggagataatctattggtgtttgagttcatttacttgcttcttcaatatcgtagtgcctgttgtacgttgcaagttcaatcctcttcctaaatcctgttcttgaaataaatggtaagaatgataaaaaagtacattacaattcatactatgagtatggccttacttgaacagaatctgtcctataggctcgtacctctatgttcttgtgtcctaaggagacagaataattgtgactgtgtgatcagagtgtgattaatgacggagacggttcctgaaccattgatgttgtagaggattgctctcagttgagtttgatcctacatgggttggtcactcgattatctgacaaattaatcaaaatatttttttatctcaaaaaaaaaattcgtaccatgagtaagttttttgtatagatatgatgtcagtagataatttgggacatggagaacatttttaatgaaacggtgagatttagagctcttattactgcctcctccgtcaaaaggatgagaatgagagcaatgtgctgagatgcttgaacgaggtattattcaaccaaggttatctcgtttgtcttccccaatactattggttgaaagagcagttggatcttttagattatgtgtggacaatagaggttcgagaaataaaacaaggaaagacagctttctaacactagtcattgatgaatcttttgagtaactatatggagcttgtttttcaccaaactggatcagtgtcactagatctagatgcatgatagtgacatagacaaaactatattttgtacaaatcctggtcaatgagttccaatcatgcaatttcaaattgacaaataaatagttagcatttaaattcttgatgaaaatggttttctaggagaattactgattttcatcttgttcttttttttagatatcctcaagtgtaatagatcttggaaaagcatctttcactctaatcacaattctatcaggaaattgataattttattcattgaaataattaaatttggattatatatctttggaataaattcattgtgagcctacatttggttcaatttctatttacttcctagtcaaagttcagatctaagttttatatttacttcctatttatctacatttccctctttttttgtttgggaagccgctaaggagcacatacttaattttggacaatcttcaaaggagaggccttagccttggtgaacagatgctatctttgtaaatcccgatcggaatccataaatcacctgctcttttggtgtcagttctctcactctctttgttctctggttttcagcattgtgggtctgaaatgggtcactgctgggcctgtaaaaggggagctccttgcttgggaaggtttctgcaaaagcaatcctaatcataaaatcattcccttagttattttgtagattatttggaaagaacgaaactatagaacatttgagggtaagttatctgattttgctgttatcaaggataaatggctgcatcttttttattccattgtgctcggtcacactcttgattattttgttgatttagaatctattgtagatattctcattgatctgtaaattttttgtacataagcggcatccccttgggtgccttcttgataacagcaaaatctaaaaaaatatcagtcttattatatataattagaacaaaagttgtttttaacttatcgacatcctaccttaaattttttgatggttgggatgacgcataatgggttattgcctaaataaattagagagtataatttttttcaacataaaattactttactatttagcagtctattattatagtttttgtattttttatatattttaatatattcccatttaggattttattttattttttatgttcttattcttttaatgactgggctacttctttccacgagctgtgaaaaagggctctttcgcttcattatggattaaggcacatggctgctattctaccacaagcaatatggagctccatccaaactgagaagcttttatctctagtagttagggaattgattatttgcatttctttattatcgtcatttttggcttttgtattagcattatgaggtggatgtgtcattctccttgattgtattgttctgtttcttaccatcactattaatacttcttcttttatcaaaaagaggattaatattcctaattgttttagtattagtatttgcattttattaggagtagtatttctaaattagtttggctatttcctaatctagttgagaaaaacctatttaccactataatattatcattttcttttgagaggaccattcaagtattcaatattatattttgatagtttctatgtatttgattgtgtgattcaatcaacttttaggtatgatgccctaagaaccccaggtgtgacacttaggttttttctccctaattttttagtaggtaacttatctctaatttgtccagcatcgatttgatgtcagaattaaaaatgaccgtttgaaaagaaaattacaggaacccaaaaatgtccgttagttccaattcaacagccactagaggtggtcgacactgcctctaccaccagtcttagaaggtcccaacaggtggagtcccaaagcctgtcgcgggattccacaaggaactgccaaatttgcttacgcaagctgtcctagctgctgtctctcgtgatcccgaactttcgtgtcttacattggcctctactctgtgaccaacatctcccattaagcctactgctaaagggtcaccactgttcaatgatctgaagtcagcatgtaaacccacatgtgtctaataatgagtagtcctggctcaatctgttctgtttaacttccttgacgtttcaggttaacgaggctggctcttgggacagttctcgcttcaaataaacctttctagaaagaagtttagtttgaataatggtgactaacatgaattaaatactaaactgtatatatgagaggcaaccactaataccagacttgaacaatgcacaacataattgatgtaggcttggaagaactaagacgcttgcgtacaacacaagtaccaattcagaatctacaagttacctatgggagatatattgaagataatgccagagatcttaccaagaggataaatttcagagatcccaattttgatggaataaggtatctcgaacttggttagcttgattcaatagaagaagacttcagttggtatgaaatttcagacgcgtgaagagcttgatttgtcaagataaagctagttggacttgcaaaaatatagtggtaaactatttatgagagcataacaagaagacaatcgacaattgaaacatatgcagagatgaaagtcattcctgatgaacagtatttatcttccaactacttcgacaaactatatactcaagcttacactttttagttcagtgtaactgaatacatacttgaagaattaaaaatttggagtcaatttgatggaaatgatagtctaacagtatctcgattcgagacgtggttaaaagttgaaactaaaagagggttaatttgacaacctcttgcagtcatagcacaaacttacaaactttccttgatgcggaaaaatatttgaaatatccaacgtaggtaacattgtttttccgatcatggaatctgcttctaaatccttgaatcagaaagtaagctgaagaatggatcaatatcaatttccataactacttctaaagctaagtaaattgcttgctttacatgtggacatagtggacacaaagttatgaatgccaaaagaagaataacttgcacgttggagtgaaacaaaagggactagtgcaagggagagatgatggttatatatcttaaaaagaggatgatttagctcgtagtaaacaagtatctcctttcttatggtgcatatcatcagactcgaaggtggaagagcaagaagaattcctattgcccaagatctttccccaagagtcaactctttgaaagtcccattcgaaaagggctttgacataccaattggtcgatatgttgatttcatcatccaccaagattttacactcttaaacatttgcatatttatattatattaggcattgacaagaataactatacataaaggttacttagtttttacagggaagctcgaaacttaaagttttagatcatttgcctcttcaaatttattgacaagttttctctagccaaggcagaatgatgcataaatagttttggtagctttaggactttattttttcggtatctagacttccaattttttttaaaaagtatttagacttcctatttattctaatattcctacttgtattaggagttagtatttctaatcattttagtacaagtattcctgttttattagaagtagtatttctaaattagttttggtatttcctaatttagttgagaaagacatagcactctatatatatgattgtaacctttagatggtcattcacatattcaatagtatatttttttcagtatttgattatgtgatttaactcttaggtatgatgtctaagaatcttaagtttgatacctaggtttttttttccaatttcttaataggcaaaataattgtaatttttcctccatcatgggaattaatttttgcctttaaagatagagaatagtggttactcgtacacaataaattatgttctaattatgccaaataacactaatatgagaatttgaagtagaaattgccctggaactgaatgagaatgaactcaaacactatgtagtagtatgatgtattggatatgttttagaaacaatggtattagattaaaagaatcataacgaaagagatggttaagcttttaggttaaccttaaactacttatgacgttgcaagatggcatcagcttctaatttgtggaacttgtttttttgaaataaaaatgtaaatagtatattgacatggtaccaaaaaaatgggtactatcccatttataaaagatttacaatgtagttaacatgttaatgacaattccaaaattttcatcactcataatattatgccttaacaagcttgtcccaaaataattaataaagattttggagaaaataaacttctaattttattttttatattctctgtgtttacacttaaaagatatatatagagtaattgtcattttttaagaaaattctaattacatgatatatctttactattagaactctaactaataaaatatcatatttagcctaatactctacttaacatagaatcattttgaacaatttttcacccatctcttaatttatacaacccaacttctttcccctcaaatgctctagtatttctttcttttcaaagaacccaaaaaatagtaaatggaaccaaagtggtaacactgccattgatatttagcccatcctaaatccaaaattcacccctagcattcccagtcataacccaattaattcccagcagcccataaattgtattctgcagactataagctacagggcaccataaaagtaagtgattgcaagtttcctcggcacacatataaaggtaacatctattaacaataatctgccccctcctttttaatttgtctgtagtgagaatgctttctctgcatgcttctcaagcaaaaaaaggcactcttggaggaactttagaattccaaatttgcttaaaggggaaactccaattgtcttccccatccccaccaaacagaaatctgcagtatgactggacagaaaactttcccctcttttctaatttccagaagaccttatctgagctctctttcactttctgcttttccaaaattgacaaaagctcttcaaactctttaattttccaatcatttaagtatctattaactctaacagaccattcaacacaatcattgtaaatccaacatgcatcagccaccaccctcaatttcaaatgggcaatctcaaaaattatgggaaacctgttctgcaagctgtcttcgccaatccatttgtcacaccagaatctgattttgtccccttttcccagattccactggatgcagctaaagaaactcggccattgtttcattatattcttccacaagcctcgtccatgaggcctagagctggcccgagtacatactgcattctgatctccccagcggacaagcacaatttttctccacagcttgtaatcttcattcaaaaacttccataaccattttccttgaagcaccaaattcacgttgataagagatcttatactcaaaccaccactaagaatcggttttttgacctcctcccaattaaccaaatgatacttcctatttccatcttcatcgcccatagaaatctacattgaaacttctaatttgtggaacttgaaaaccaaatttctataccatctcggatgtatttggttttgcaagcattagtatctccaaacatttaattcaaagcaagctctcgcacatgaattggaaatcgggtgcccctccaagaattgctttttttgcctgggaagccgtaaaagagaaaatcctgacaattgacaatttgatgaaaagaggacatactactgtaaacaagtgtttcttatgtaagagatatcttgaatcatgtaattatctactcttgaaatgtcaaacatctcacaaactctggagcatgatattcgggcttctggggatctcttgggcaatgacagattctatttattctgaatttctggcatgggaagggttgaataataacaaagcgcttagattaatctctcttaccattttctgggttatttggaaggaaagaaacaacatgacttttgaggggcttgaacgagattttattagtataaaaaataaatggtttcattatcttgactctactgtttaagagtataatttaaaatgttttgaagattttgattctattgtagatatgctaattgacatgtaaattttttgtaaatgggtgttgctctcttaacacctcacattaatacatcttctcttcttttattaaaaaaaaaatggtcgggttttctagtgcatcatctaatactccctgccttttctatttttgcttgattttttttttaaaaaagaaaaagaaacatctgttaataaaatgtctaatcatcactattttgcttaatattaccatgaaatgggctaatttctgcttgttttttattttttattatttagaagttgttataatgattaatacatttataccttctatctgttaggcatgcataataagataacagttattatctttgtactaggatggaaatatatatatatatattttgataactttttctgcagattgta

SEQ ID NO: 8479 - DNA, 4617 bp, Carica papaya
  Intron number 3 from transcript evm.model.supercontig_43.9 7 (locus evm.TU.supercontig_43.97) derived from phytozome v7.0 (chr-ID supercontig_43; pos 1231634 to 1236250)
agggtcctcttaaagggacttcagttattttcaaggtgatttttcattctttcttatttgtttttacagttttaaagccaaggtagtttttgtgtggagcagataatattcatctggtatactgaagaaagctggtgctttattatggtaaatgcatttgggcaatatcgaactatgtgagcaactgattctttagcttaaatttgtataactccttagaggttttgggccatctgaatggttcttttccagctgatgcttcttgggagttggtttcgcatatgttggctcgatagctgatgtttggcttgaggacaagcgcctttaggaggcagggaggaatattatggccctgttgagagtcaaatccaattgttaagggagaagaaaaagagtaaaagaagaagctaaatgttacttgtaaggaatggggagaatggaatgactacctataataaagcataggcaaatgtgagccgaccagaagaagcaaggctctgattaccaaatcctggacacaatcttccgtcagatggggagccgtttaccttacctttcctagcctccccttcttgcttgcttatctagctcttctcttagtgactcttcctcttttctaggtttttgttttttttgtctgtgttaagaaggtaggtttttcatttgccaatgaattgcccgattcaatcaatggtgggattcttggctatatggttctataaataaaccaagctggagcctaagtaagtattcaaatcaagcttcgagtgaaattcaagctcagcttcttttgttcctacccttatttgtaagttgtgtattctgtcaagatagtatattgccagatgtaacaagttagatgtttgttagtttggtattctctcagattagtttactgccaaatgtcacttcagacaggttcatcatctttgaatttttactggttgcttttttaggctagttagtttctagtctaggcaagatgtttctcttttcctgtaagaaggaaagttctctgtaaggaagatggaagggcagtggagaattaaagagttcttttgatgatttattttgccttgttggtttcataatcttgtggaatctataattttggtttaactttcaattgtctcatggggattaagataaggctggaatttttgaagattttgaggagcatctccaagcctttcatatcctgatactttttttttttatatatattaaaaaaagtattaatacgagaaagaaagagaaatataatcatggagaatatttctgatcctaatacttggtctctttaaagctcaaagattgagctcatatgttcgggaaaacgatgaagactgaagaactaaaactggaatagttttagaattaaaaagatctatgtaataattatctttattattagtttaaatttgcttcacttatttaggtaggttttactttattagaatttagaaattgtagatttccttttttttactgcaatattttcttcttagttgtaattagtgcacgtgtaaaggcccattaactgtcaagaaatttttgtgctagaatttattcttgtcatttctctcttgtttttcccctctaattattgtttttttttttctcacctttcatgttctgtctctttctttacctagacttcaccttaacgcctaatttcatatggttaccgttcatctgttttctcatctatgttcttctaatttctaagctatccttgggctagttattttgaaacctacttctatgtcaaaatattattttgtttttaagtcaagaggaatattgtgagatttacatgctaaaatgctcatgttgtgcgatcaaggcatgaagctctattgtctctcatgcattttctttttcattgcttttaattctagtgtctcttccttttatgcagttgagaagtatcattgcttacccaaggaatcttgtttcttctcatgcgattgatttgttatgctagaaaaattttgtttcaggcgcatttagtatttacttgtctgatggatacctaactggaactgtaacaactcggaactagaaaagaaataaattataaattgaatgcagaagcgaaataatggcgttagaatttatatttcttacaccgagggttacgtgaatgatccttttaaaaaaataacgaaaaatcaaagaaataaatagaaaataaataactgaacatcctattcgcaattctcttgtggatcgggatctagaaatagttaataaaaaagagaagtacactagctcagtaagaatgtcacactactcaccgatatagaaatgaaggttggtaaaaattatgaaaacaactaatggagctcttaatttaaaaaaattcatttatcataaataaaattatttattgtacacttactataacgaaattccaaaactgatctattgagacaataacacaaataatatcatattcaattaatcagaacaactttctttttttatttgactactggtatccatgggggtacataaggatgtccccactatgtatgaacccttattcaacattgttaactaaccagccgtccccattccctgtccggtatgagtgccaaaaataccatccctcaatatcctgtccggtatgaaagtgaaatgagccgtccccatatctcgtccggtatgagtaccaaaatactaattctcgatactccgtccggtatgagacaatgtttacggtagggttccctatgcacccggtccgtccaccacctctcaggatatctcgtaagattaccattcatttattcacttgatcaaacaattttctatttacatttaatttttagtttcacaatttaagtgtaaatcacgcaaaatgaataatacatgcatcaagcaaacacaactgaattatcttaccaactccagtatattatcatgcatttaaaactgtaaaattaatcaaacagaataaacagtgaataataaccagttcctcctccattagtaacctgtgattaattatcgagattttctaaattgtacaaaataccacattatttataattaaggttcaatttcataataaggaatagagtgagggattcttacgcgaatcggtgtctgaacattaaactttcagttgcgtctatttgcggtctccgaattccctaaattttccttcgaagattaaaacacgctctaagtacgtagaaataccccaaaaaactcataaccggtgttaaaactcttttccgaccaatttcaaaattctggtatggcggcattgccgtgctccggtgacgacaccgccgcttgcggcagcggtttgccttagactggccgttttcgaccaatctcagctaatttcggccggttttgtactcatcgctgagagaaaatactttaagtgggctcggttggcccaaaaaaattgaaaaacagaagcttactggaggcgggattttcctgtgcggcgactctgccggctcacatttgcaattggatgttttttttcagtcaacctgtgggaaacagaatagtgaatataatagtggaaaaatcgtacgaaacgggaatcagggagggcctcattgaaggcggttttttattttttccgtggtggcgccgctgggtttacccacggtttttggctcatccactggtctttttgctccgatttggtcataggagtgttcaaaatcaaatttcgagcgaatgagaaattttttttttttttttggctatcgaaggtggctccggctcagcgacgggcggcggtcggctcccttctccagcgactggttcttcttctccgacaggggattggcggttagggttagggttcggtataaagtgaggtatttatatccgtctccctttaatttgggccgttcatcgtgtttaatctcaactgtccgatcgcgtttaaataggaaataaatctgaaccgttcatcgcgatttgatatgaactgtacgatcgcgcctgaggagggaacggatcttaaccatccatgcacgtgggaacaaatccggaccgtccgatcgcgggcatgcggattgccagtagggcctcccacatgataccacgtcagcgtgccttgtcatgcagcgcgttgtgattcgtcgggactgctgactgagcggtcctatgtggcacattttttctaaattgcgttttgaccaattttttctaatttttttttcaaaaacacccccagaacttaaattttcactcattttttccaaaattatttttaatttcattatccacctatttttttctaatttttacattaactaaaaatttataaattaaaaaattatattttatatattaatttaatttttttttaaaaaattaattccggatattataggaaccattgcattttgcctctttgttgtttatcattattaagacttcaaaaatttttattggaaaagcatccatttgaaaaatctattataatattggtgagaagtgttgaagattactttgaatgcaagtcttgtattttgatcattgaaaaaagtcctgctagatactcctgtaatcaattgaattatgcttttccatttttgtgaaggtttatcctggaagacgagctgctggtattgaggc

SEQ ID NO: 8480 - DNA, 9136 bp, Carica papaya
  Intron number 5 from transcript evm.model.supercontig_8.29 7 (locus evm.TU.supercontig_8.297) derived from phytozome v7.0 (chr-ID supercontig_8; pos 2216636 to 2225771 reverse strand)
ccttgtggagaaggaacattctgctcacaagcgtaaagttctttgtgcattttgccctttctagaatttatcatggtaaaaatatatggattctactagcatttgcaccagtgggtaagaaggttgatggctaagttctccaaagttattgttgataaagattctatgttaagtagagtattagactatagttagagttttaatagtagacatgtattatgtaattagaattctcttaaaataaggataattactctatatatatctcataaatgtaaacataaaggatataagaaataaaattagaaatttattttttccaaaatcttcatagtatcaaagtcaaaggaaagctattttaggttttgaaaaaaccctaaaataagtaaaataggccaagttggtactcaactaccaaataaaccaaacccaggatcacccaaacggagtcgccgctcaactccagccaaaacaaccatagtttccgcgcgtgccagctacacacgccaatggcttcatcccatttggctcgaaaaacggtggaataccgtcagaaaagcccaattgagacaaatttggctcatttccgcacaaaatctagcttgatcatgattatcaagccttttttcacgcggctgcgcgcattcggaagatctgttgttctgcgccctccgccgctctgatcgggctgatctgcgggttgactgatcctcctacacaccacactgctctggtcgcgctgcattgatcggatagagcccctcccttgcaccagtccgctttttcccgcacgggacatctggtatggccattctgcgtgccgaaccactccgctctgattcgtccgctcctgagcagagctgtccatgtctgagccggtgtcgagccaagccagatttgattcctgtttttttgtcattttttcggttttttggtcctttgttggctctttggtgcaaatttggaggttcgttttttattactgggtatttttttcttatttttagcattctaagatgatagaagcaaaaaaggtgagagttaaatgttacagttttgataatccttcattataaatcagtcccgtaaaacttgataaaactaattattttgcttggtcaatatcttatttattgttcatcaaatttagaggattgtagggttacattactggtgaagtgaagaaataagatgttaatagtttagaatataatagatgagattctgagagttcattggtaatatcatagctcataaattccatgcagtctcatattggcagaacatatctgttgcttaacactgtcgaaaaaatatggaatgcaacatttcttacaaattcacagatgagtaatgacccccagacttatgaactttataataaaattcatgacacaaagtaaggagggatgattatttctcaagattttcaagcagagtatcctgcaaatgtagtcaaatttcagaaattgatagaaaaagagcaaatttataattttttagctggtctgaatactaaatatgatcaaatacgggtccaagtgtttggtaaggattacttttcttcattagaacaaacttatgcttatgtccagtaagaaaagagtagaagaaatgtcatgttttacattgcaccaatcgagaaggctggattagttgctcaatctgatcaatctagagatatatggaagtgtgactattgtggcaaaccaagacacattaggaaaacttgttgcaagttgcatggaagaccaattagaggtcggggaggaagaagaggtggaaccacaagagctcaagtaaattttgttgaagctagcgaaatacctgattcaccatccgttggagttttttccacaaaagaaatttaaaatttgaagcgcgttctgaatcaacttaattctccaattgttggcacatcaattatggtaaaatcagatattgcgcatctctatcctaattccactcttgatagttggattatagactctggagctaactactatatgacactcttctaaaaaattcttaacttatgttttttgtattaaagggaaaaatgtccatataacagatgaatcatacaccctcgtgtcttgaacaagttatattaattgtactcctgctattacactgtcttcagttttacatatgtctagtttttctgacaatcttttatctgttagtaatataattagagatcttaactgtaaaattaaattttttcctgattattgcatttttaggattttcaaaccggaaagaggattggtactagtagactacaaaatagcttatatatcttggatatgcaccagaaattaattaggaatcaagccaccattggaaataatatggaaatactacaatgacaccgacgattgagacattctttcttttttattttagaaaaattatatctagtttatttaaaagaacttctatggaatctttgttttatgatacatgcgaacttgctaaatatgagaaaaattcttattatttaaataataataaaagtactgatccttttaagattattcactctgatgtgtggggacttacgcataatacttctctttctgttcatagatggtttgttatttttattgattgttgtactagattaacatggatttatttgttaaaagcaaaaggtgatgtattttcatattttcaatcattttataaaatgatatgtatacagtttggtactaaagttaagattctgagaactgacaatggtacagaatatatgaatagtgggtttcgtgcctatttggagtaaaatgggataattcatcagatacgttatgactacaccagtgaataaaatgaggctgccgaaaggaaaaatagacacatactagaggtaggtcggtcattaatgttcaccatgaatctaccgaagagttattggaaagatgcaattttctcagctgtctattttatcagtagaatgcctttgcgagttctagattttaaaagccctatgaaggttttgtcagaaaaaagttcctacattgttcccccaaaaatgtttagatgtgcgtgctttgttcatgctagaaatatggataagttggaatttagagctctcaagtgtgtatttgttggatactcttatacccaaaaaggctataagtgttatcatccaccatttatggatgttacatttaggaaaactgagtcttacttcaactcaaacccaacacttcttcagaaggagagtgagaaggaagaagtgacacctaattggataactattgagagtcatatttagggagagagttctattgcagaaggtcttaatcaaaaagataatgttggacgtctggataaattagacttgaaaaggtattcaatgagatataagtcagaaaaagtcatcatgcagtctgtcccaggtcaaaaatcttctctgatttcagaagatactagtgagttatctttctcttgtgatttatcagataaatctattgctattagaaagtgaacgagaacttgtactaagcatcctatatctaactttttttcctttgactctttatctctctcttatggagattttgttttatctgtttcctctgcatctattccacagaattggagaaaggctctaggagatctcaagtggaaggaagtcatgattgaagaaatgagagcattgaaaaaaaatgaaacatgggaacttgtttcacctccatagggaaggaagatagtcggttgcaaataggtgttcaccgttaagtacaaaacagacggatcgatcgaaagatacaaagttaaattggcgggtaaaggatttactcagacctatggaattgactattaggagacctttgcacctgttgtgaaaatgaatacaattagaatacttttgtctttcgcagctaatcttgattaggatttataacagtttgatgtaaaaaatgcattcattcatggagacttagaggaagagatatatatgaaaatttcacatagatttgaagatgagaggatgcaaggaaaaatttgcaaattaaaaaaggtcttatacggattaaagcagtcttcaagagcatggtttgaatgatttagaagagttatgatctcttttggatataaacaaagtaatgctaatcatatcctgtttatcaaatatcgtgagggtacggtcactcttctcattgtttatgtagatgatattgtggtgactggagatgatatagaagagatgactcggttgaaggaactacttactcaagagtttgaaataaaggatttagaaaaattgtaatacttcttgagaattaaagttgtcagatccaataaaggattttcatttctcaaataaagtatatcctacatttactaaaagagactggtatgatgggctgtaaaccaacagaatcacctattgaaagcaaccacagactacaagtaagcagtggtacatcagttgacttgggaaaataccagagactagttggacgactcatttatctcttacataccagacctgatatagcatatgcagttagtctagtgagccagtgcatgcatgattctcatgagactcatatacatgttgtttttcacatattacgatatctgaagtttgcaccaggaaaatgtatgctcttttttaagcacggttaccttaaaatagaagtatttacagatgccgattgggatgggtctctagatgatagaagatcaattataggttactgcacacttgtataaggcaacttggtcacatggaaaaataagaagtgaagtatagttgcccattctagtgcagggaccgagtatagagcaatggcccaagtagtttgtaaattattatggttgcaaaagttaatgagcgaattaaaactgcttaaagaggagagactatctctgttttgtgacaataaaacaactattaacattactcataatttagttcaacatgataggataaaacacattgaaattgacacttcataaaagagaaggtagttggtggctttctatgcttatattatgtattttctggtgaccaggtggctgatattttcactaaaggattatacaataaattcctcgagaacttggtttacaagttggacatgtgtgatatttttgcaccaacttaacggggagtgttgatgaagattctatgttaagtagagtattaaactatagttagagttctaatagtaaacatatataatgtaattagaattttcttaaaataaagataattactctatatatatctcataactgtaaacacaaaggatataagaaatcaaattagaagtttattttctctaaaattttcaactataaactgtgattatatctcatgtaaagcaaatttgtaaactataaaaatattgctaactagtaaatctaataatctgaaatagaagtaagttttatttgtatcacaatgttagacaggacaataactatattagacgtttagcatggcggagaacccttgaaaaatgtatttcatgaacttttctccatgctagggcagaaaggggatttagctgtctcttcagcaactgggtggcattatagaaggtgctttttcttttatttcaaaatgttcaaattgggatgttgaggcgtgtcaaggattttttcagtttttgtcaaaaggtaaacttacatatggaggatatggtgaactgaaggcatatttgaagaagtatttcttttttgtcaagtcgtttaaactaacaggggcagtcaagttttgagaggataacctagttctccttgccaaggcagcttgaaaagttacttgttaccctctcaaagttgcattttccttttttcatggcggtgtttcgggaaagaaatttgagcttgactatcatgaagaggtactgcaatggagtgaatattttacccatcattagtataaagcaaacaaatctaggtaagatgaaggaagttagtagtctttaatgcattgagggtttgagataaaaatgaaagggatataggctttcatgcttattgttttccgagaaagatctcaaaagtgaatgagttcttgtaggaacaaggaagagggaaatgcatgttctcaatgcagacatgcatacatacaatcaatttaacaagaagttacattagtttaaggaaatgtggtactgccttggtggcttgttaataacatacttccagttttcgttccaaaaaaaaaggtgacatgtatgttgttagtgataaataaaataatagcagtaaaatgatgctgtgtttattgtacctccatggatatctttggcatcactagtttaggagcctttgttctttgtttaagggtgattttatcaatgatcaggtcgatattggttgctacataaatgttttgtttctaactctattttgtaaattatgtcacctttcaatgaattttttttctttgcgaaaagaaaccatgtgttaggggtttgatagcggagttggaattactaagaaaggtcaaagaaggataggaccaagaagacttgtgaggaagccccatgattagaatttttcttttctcttttccaaaatcttaggtccttatagcaatcttactataagaagtagtacaaggtttgagcttttatgataaataagttgttttttttttaattctatagtaaataagtcaaaataatttatttgttatttgttgtaattttttaatgatacatatcataatttttaatttaaaaagtaattatttcatgttttgtttcgttcaaatatattctactttattcaattcctagatcttgttattttatatgtaaaagttaagtcatagtcctacatatatgatataaaacctaaatcaaattcgctcatatattcaattttaagatgatggtgatgtggaatggattaacattagattgcctaaatagttttaacatcatgattctattaaatataaaattactatactattaggaatctattcttatgggtttgatgactttaggattttatttttattagtggtatttaggttttctatttatattagtagtattattttaaatcttattagtcttggtatttctttgtccaatcctactctgagaaaacctacttggcactttataaatatctttatggtctccttgaacgatcattttgttatccaagataatatttaaagagtttctcaaatttctagttgtataatgcaattttacccttacatgtgtgatatttaagacttttttggtgtaatatctaaaaatagatgtgatatctagagatcctagaagtaatataagccctaggagtaatgtatagatttttactcccatctgcaaatagagaaattatcctaatttgtcctagatcagtttggtgtcaaaagttacaattcctacaccaaatactcaaaatactggacctaaacagtctcaacattacaaaatcctgagaccacaaatcaagtgccagtcaattcaccaatcaccaccgaccaatgattgaaactgacgttaaatctcaaatgcccacctcgattgagtcaagtgccagtgatcgagtgcttgaaagcttgtgtgagagccacacgcgtgcatgacttgcgaatgggcattgtagaattgtgctctgctttgactcttgatcaagtttgaccgaactgattttcaacagtttagaaacatttctcaacaattgtgcttgttcttagttttagtctcctcttgagaaaagttagtatgatggaaaattttaaacatgtgaaatcataagcaaaagaactagttgacacatgtataatagacttgataaatatttcttgattgtaactaagcacaactatgcagttaaagtgaaagaaaattgaaagcattcttcaattttccaacctagtttgctatggaaataaaggcaagaaacttgttcatgaggattgttgcaagaactttgtttcaatctctacagttgaacagcctaatttttcaactgcatccatatccacatcccaaccatacagactagtttggacaggtgatataagtatttggtgactcagcaaagtcttgtttccatttgtcatattacctatgttgatgttttttgtctgaaaaaaaatgtacctatgttgatctagtcctgggtgatatagtttctataatgttcacacatgtttatcccagttgaccttggctttatgattgacatattcaatatgacaagactaccaatactttactactttctgttttggcatagagaatttagttttaaaacctatgaccacaaaagagagaagtaaatataaacagaagcacctacagactgcagtcaatgaaaaaatggagagaagaagcggtttgaggttgaaacaataagaactatcaagtcttcctaagaatagatatgttgaggtgacgtaggacctcctatggaagttgaatgcaaggagaaatctaagccaataattgacatactgatgctcaactcaaaaatgaagttgaagcgcagattggtcaatttgttgattttaaactctttgacaattatgtctttacattatgcttgccaccgaataggatgactgagcaccgagtttgttaactttttgttacggagttcttacatgtctaagaactctaatgtgttagattttcatcccgaaattcctaatgaaggaaagtaaccttaaattatcctatattagatgaattggatttccacttgtcaagttagaaattacaaagatatctaacttgagttggagatggaattaagatgaaattattttctttcaaaattctacctcatttgtggtgaattctgattatattctatgtaattagaacttgaaccaaacttaacctaaggaaaggttatttgttctatgagtagaaatgcgctgttggaaataaagataatgattagatgacaataagatattttgtaataagtttatttgatctgattcaagtatcaaagaggtaacgtggcgtgattagcaaatcctgtaaagatgaattgatcttgtaaaaaatagtacaatttatagtaattaaagtatttattctagcatttcactaaagaataaacattctttctggttatacccctgcacttattatgttgaatctaccatgatgagtgttaacag

SEQ ID NO: 8481 - DNA, 4984 bp, Carica papaya
  Intron number 1 from transcript evm.model.supercontig_73.2 0 (locus evm.TU.supercontig_73.20) derived from phytozome v7.0 (chr-ID supercontig_73; pos 351848 to 356831)
agtctgaaatccaggtattactcctatttattatctgaaaaaaatagtttttgttcaatgttacctcttttttgtttgtagaatataatgttcgattagtttgaattagttgttgaatttgtttagttttggattccttaaggccattgtgactgctacttagactatgtttggaattctcttgtaggttattttcattactttgtaaattttgacacttaggatttatgtaaatttagcatatcaaaatggcatttttttcaagggaaaaaaaagagagggggctatatgaaagtttaacatatgaaaagggcaatttttgggatgtttgtgtctgtgtgtatttctttttttttttttttttcctttttggggggagggggatggcaaggggaagggggggaggagggattacggttatgcttgttaagtttgggaagagtaatggatgtgtgcctctcctcttatgttattcttgcggattttcggtataggaacattgatttggatatatgttatcagataagggttgcatggatcatctacgtggctttcccgctgaatatttagccgacaacatggatagttctttaaatctgatatcctctaggtttgtggtaaagcaatacattgcattgaaagattccctgatgtgagcagtgggggaatcacacacccaaacttttgggtgaccatgatgttgttgggtttgaagccctagcgaaacaagggagtcaccatttacaaagatctggaaaaggaataacacaattccttttcttttaggagaactgaataatccatctcatttaaacgtccaaaagttatgtatgttctaggaaccttctcaaaaaaggtaggatctaggaaaattgttaggtactctaaattgcttgaacattgtagcggacctcccacttattgcttgatcttattagtccttttactggtggaaatagtctatcattaatcatgcaacatatacagatttacatatatatgtatgcacatatatctgttagtccttttactggtggaaatagtctatcattaatcatgcaacatatacagatttacatatatatgtatgcacatatatctgttagtttattagcatgcatccataaatacataatttgtatgatttagaaaatgtttacatgaatgcacgatttaagagataataaaggagctttacatatttaacacattttgatatataaggcaaatattgtggtgccggagtaaaatattaatactcatggttctcatatatagaaataagcaggctgaaaaggggatttagaatttgtgatgacagggtacagtcacatagctttttagatagtccatgagacactgattccagtcatgtgactttggagctgagtaataagcctgaacctctgtcaacagagcaaggttaataccaatcaatagaaagacgctagtacgacattagtgattttaaattactaaccagattttaaattaatcaagtaagaaaagtgattgaactgaatgttacccttgggtcttatgccctcctaagtggggaaatgacttcttcctttgcttgcttggtttggtttgagcgaaatttggtagctaaagcttatgaatatatgtaaaggtttgtagagttggggagtaggtaaggaagtttaggtgagtctaaggctgagccagatggctttctagataattcccaaaggatccttcttaataaaggctaaaccgatatcaaattgtgtttaatggttggttatccagatacaatggatttttggtcacaaagccagaatggcatttatgctaaaaattctttatgttaagatggtgtttggtttggcttttttgagttaaaccacccaaaaatgctgtagaggtgtttgtttctcttattttggtttatgagccaatgactaataagaagagtgagaaaacttttctttttgccttataaatgatgcaataaagcctatttcgtcttttgtgcttttcactaaattttctttattaaaaattactaaacatttcggtgtcatttttaataatcttattaaacattgttttaccagacacttattatttttgaagaccttgtaagtcaagcaaaaatgcattaactggacatatttttctctaattttctatgagcttataaatcttgttagcttataaatcccacccccacttctaagcctagaaaaatttcaaaccaaatgacctctaagcatacaatggcgtatttctatttgcttccactaaactctggtcgaaggtgcaatataacatttactaattgttaatgagatgcatggattatttcaaaaaaaaaaaaagagatggatggattaaatgctatccccttagagattgaaatagatcacttgattgttttagggaagatgaggtgattgtcttgagcatcgagcttggatagaaagctgtaagcttagagattttgttatcattagtttgttcgaggtcttcaaacaaaataagatatgttacgatatccttgttgattgtctctaagctcattccttatgcttcttcagctagatgtttctatttcctttgcctcattgttttatgaggaaatatattgcatagatatattggttggggatctctattttatttgaacttaaaggtcactccttttaaacatactgtcctgtctactgtttaaggtgaagtaagaaaccagtcgtatttctagaaagcttaaaattgataccttcttcattatcgtcctgctttgttaaatgcccactggaattccagttggctttatgttccatgtaaacttctttaataagtttttcatgtagttggattgattgatgaagatgtcatatttgctttgcttgattgaagtccagaaaataagtaaattctcccttcatactcatttttaattcaatttgcatgcacttggaaaagtacttgcacatgtttccattagtagctccaaatattacgtcatcagcataaatctactaagttaaagtgtgttgttttttgaaatgggttggaaacagagtggaagagcaatattttgatcagagtctatcatgcaatttaaatgcagagaatatggtgtttaaagtttttcaatgccttcgaatgggttgacagtttttttttttgaaatacgaatgggttgagaaaatttagatacttcatcttctcttcagcatcatggtctcattcattgtcaatctcttaagaagctggtggggctaaagattccctgcatggttgctaatccatgattcttgttgttagctggaaattgagtatcatttagatttcttctcaagtcttcaggttttattagaagatgtgtaaacatgtaaagttcagtttgagcccattgaaggttttatcaaatacgtttcttaatcaaaagatttagaacttttgaagtttctcccattgaacagttacatctttttcagaagaaaaaaatatgattatatttagatgataccaagtaggtccaacctaaatggaagaatttagaaacaagtaaaagtatcgacagagttccccaaatcctctacaacgtgaaccagttgatccttaaacctaaaagaaaagaagtcaaataacccaaacagtagccagggggttaagagagatcttatcacctcgataacatatcatgaccaaagttcgtctgctagagagctttatgtattctgaagaagtcaagaaccatacagcgtggtagcatgtgaaagatacgttaacaaaatctagttcaggatttcaactgcactctaaaattctggaaaaaagcatccatgcgcaggaagagctgaactctattgtttcagcatgtatagtcgttgatatgcccatgatgacgatgaacacattgaagatgtctctttccataaagcacattatgaatgtcccatgtaaacctttttccctttcaactatataattggtatccactgggttccgtcctgccattgaacctccagtttttgtaatttctcttctccctcagaagaatgatatagaatggatttgattggtatttctgaatgtacttttatgtatgaaagtttaatgcaactataaggagtactattataatttttgtagcattatgattttatttatgctctaaatgtcttttaggtttcctgatgaaatttctagtcatagttagattaggattaacttaaatccgtatgagtcaaccattattcagtgaaagtaattattaggattaaattaaatccttatgagtcaaccgttattcggtgagagtaatatgcggattttctgtctaccctggttctttgatgcaatctaaactttaattgtgatacttacggacaaatctttttaggtgtagtttctaagaaactctaacttcgacatttatgttaaattcaatttcctaagttcgcagattaatacctagtttttcatgcactaaaaaagtcccaaattccaaagattttatttgaagtgtatgttcaagttttgcagttggtgttaggttattcaagctattggaaagtatgtgtataataattgtttagtttttcttttcaaatgtaatgttaggttattcaagctatttaagatatattagtgtaattttcaatttataagggtttacaaatgttgatcttttccttgttagttctcatatttctttatttgattgcgattaatacatgtataaaagtttctaatcaagagaataatattggatttgaagattacttcagtcagtcagtaatttactttggtcagtaattttgttctggtatcttgttttcttccctgatattctgttttccttccccaagttcctcgattcaacatctcattttactgatgcaaaaagagaataggctaaagtgaaatattttagtgttaggagagatctctttttttagtaattatgaaatcttgactcatggatttatgtgacaggattcttcag

SEQ ID NO: 8482 - DNA, 13003 bp, Carica papaya
  Intron number 3 from transcript evm.model.supercontig_191. 9 (locus evm.TU.supercontig_191.9) derived from phytozome v7.0 (chr-ID supercontig_191; pos 185345 to 198347)
tcgatctcttttctattcacaagttagtgtgtactagggttccttgcttttacagatatcttgtcttcttaatagctgtttgtatgaactgacttttaagtagaggcaagaaaaaggggagatattcagtctcaagttgtttgctcatatgcttttagttttagaaatttgatgttgacttgttcgttactgaacaagtcaaagctattgtatccaattgttaaataaatgcatctgtctgtgctctttgtgttttatctattagtgattcatattgcaattttagttgtagggggagagagtttgacaaccatggtgtctcctggctgtatctaataactggaataatgcactgaccattcaggaataatactgaagtatgaatatgtggcaataatagaacacactatcttctgccagttcaatagattggcagcagatgcattttacgaacttttttcccttatctttgcgtactcatttaagatgcacttggtgtttagagatgttcatttgaaagtcgctcatttctattattgtctaatactatgtttatttcatgaatgttggaggtaaatctaaattaaacagatctcgatactgtaggaatcctacttcttctagaagtctgatacctaaacagattggcgtcttaaggaaaatctccatatagaatcatagtttcctttcaataactgaaaggtcttctctttttatgagtatgatttccttctcaaactctttctaattttcttatattcgtattttgttgttgtacattatgtaccatgaaaaaaattcaataaaatagaaaatttagtttcaaattttcattgtatccgagcaggatctttgaactcaaagaccctttctttctctattgccgatgaccaaataccgaatgaccacgacaagaactagtgatctcttggaaggtacatctcagtcaagtggaattattttatcaaaccacttgaatcgaaaatctctaaaatttcgattcaccagtcacaagctaaatgcaagaaactatattaagtagtatcaatcagttaagatgtttaactacggaagagggagaaaagaatacttcatcggagaagttacctactgagggcccaaaacccaaagttccaaactcaaaagactgataataatttggctatgttgtagctgattaactccataacaaatgatatcgattagaatttcttgttgtacgggatgatatacgaaatttgtgaagcagctgagagttttattcgagtaaagaaaacatgttataagtctttgttgttgaatttagtctccacgacttgtagggaaggaagtctatccgtaacccagtactatgatctgctcactggtaacaggtaacaactcgatgtgtttgagaaacttgtgtggagctattcaatgatgcaaaatggtgcagagaaattttagaaagaataagaattttcaaattttttataggattaaattaaaattttgatgaagctcgggaaagaatattgagaatgaaattgtacttgacattgttgaagtatttttgaagtaagaagagaagaaaatagaaaaaaaaaggtaatgttgggaaaaagattcacaagccctaagcctaaacaaagctttgtcttgattgctggggccctcatcccaattcatacatccgacaaaaaagggaaggcctcgatcactgttgaaaaccaagtcatgcttgtcataatctctggaaaattcatgaaaagcctgttgatttgagcatcacaaaattagtcacggagaaagaaagtaggggaaattatgtctccattaatgaagctatgtttctaattaggaatcatgcctatttagcaaagagaagataaaacccctccaaaacattttcccctatgaaaattctatcaatgacaacataggagtcaggaaagtaacctcaaaagataatttctttagtactcccaattctattccaaaaaggtaagatacttgaatcattggctcatgtacgtctgaccacatgatgggaaatagaactttattcttaggatataattcatgcaatgagaatttgattgtaaaaatagcggatggatctcactcaagagtgaccagaataagtgatatctctatcccaaaggagttaactttaaaaagagtgcttcatgtatctaatttggattataacttgtcaataaggaattttacccaagatcataactgttttgctaaatttttcttaaacttgttattagttaggaaacttgtccaagatcataactattttgttaaattttcctcaaacttatgtgaactttaggatttggattcaaagaggacgattgacaatgctaaagtttcctttgggttctttctctcaagtataatggactttttaggagactatcctataatgtagtatgtattgagtttcaagacaatccaacgtagacaattctagtacaattatgttatgacattattaattgaaacacccaaactttgtatacttcaaaaattatttccttctctatttagaaacaaaattatgaaaagcttccattgtgaagtatgtcaattgtcaatactcgtactacatatcccaagttgccctagaaaacctgtaaacctaatacatcattatgtttggagaccatctagaatcaataaatagatgatttgtatcatttgtagatgattatgtaagaattacatagttttttctcataaaacaaaattagaattgaccatatattcagaaaattcaacatagtcaaaactcaattccaaaacaaaaatataagtgctgaagacagacactgcaaaagaatattttgaagaagagttggatatgtatcttgaaaaaaaaggaattgttcctcaaagttcacatgttgatacccatcaatagaatgagatagccgaaaggaaggataaacatcttttagaatttgctcatctctcatgtaaagactcaaaacttaaggaaatagaaatatcgaattatatcaattataaacggaaacaatttagaatttaaggtttacattccttacacagtaaatcatgatactcattaaggttacgagaatatctttttatagaagttcaaagtaacggaataaataattaaaacaaaatgaaataaaaatcctatggggttaactttcgttggacaactctgatgaggtttagaagataacctttatttgcaaccctcttgctgttcaggatctgaattttggttttcttgatttgaaatggttaaataagagaatgagttacaccagtatagtaagaatatcacatttaacattgatacggaaaacagaagattggtaaaaaatcataaaagaatcaatgaaaccatttgctttcttaaataaattcatttaatataaaagaatgcaagtttcatacttgcccttaagagtttccaaaaccggcctgtgaaatcaataacccgaattgtattttgatttcatatacaaatgaacaataacaataaacttacctgcttacgagtacttctgagggtccatagggatatctccatatgtgtgaactcaatatccaatttctcgattgactggccatccccatatctcgttcgataatgggtgtgaaatataccactccctcaatacctcatccggtatgagggtgaactatacctcccaaccccttacggtatgggatttctcagtcccgttcgactgatataatgtccatggtatggttttccctatgtattgggtccgtacaccctttcccagggtacccgataagcatttcatccacagatccacattatcaaccaatcacacatcacataccaacatctcatctataccaatcaaccgtaaatcatgcaaatagacaacatgtaaaattaagaaaatacgattagaacatttattttagaccaatcaacagataaggataaaacggttacgtaaactaataattaaaaagacaattaaaatcaataaattaaagtacccgatataatggtaagcaattaagacaatatagaaataaatgtacaacacagataaactatacactgaccaatttcggctttactggtgacttgtaataaattttaggatttttctaatttttacaaacacaatgttattaattattaagtttcaatttaccataacgggaaaaaaggtgagagatttttattccggatcggtattcgaaacatcgtacgtttcactgcacttcctggcggttatggagtttcttggatttttcatgcggaaattagaaatacgcatcacgtatctaaaaataccccaaaaggccaaaatatgtgtttttaaactttttcggccaatttagggttccagcacggcagcgtcaccgtcctccggcgccgcctcctctcggcttggccgttttttctagtttaggccagttttgaccggttttgcatggaaacttgctaaaaacaaaattaggggccctctgttggccgaaaaagggaaaaactgaaaccttaccgacggaagggtttccgggtgcgacagctctgccgttcctcctttgcggtcggggtgtttcttcgacttaacttgcatcagaacgaaacaagggtaacgatgattagaaaactgaagggaacaggaaaggggaaggggtcatcagagaggttttcaggtcgcagccacgatggcgcgatttagcttcgctcaggttttccagctcacctgctgccttttttgctatgatatgggtgtgggaattcaatttcgagtggaaggggaagatttttacctttttcgacgcagtggcatcaattcagcggcgacggtgtccctctggcggttgatcttccctttggccgtcctccatcttctccgattagtggttgtcggctagggttttggggcagactgaatcctctcgatcttgaccatttgttcgtgtcgacatggagcgagaagaatcgtccgattgttgcctatttagtccgattatgtgtgcaaacttgggttgtccatcgcgatcatatccagtcgtccgatcgcgtttgaagaggaaacggattcgggctgttcgtgtgtgcgggatgcaatctgggccgttggatagctcagacacatggatcgtttgcgtggctcctgcatggaagtggtgtcaacgtgtccgcggcgcgtgctgactacaacgtgctgctgatgtggccgtatttttgaaaattatgtttttacccagtttttagatttcttttcaaataagttctccttttatttctattttgaccctgattttcgaaaatgttttcaaatacattcaaattccaattttcaacaaaatttcaaaaaaaaaaaataattgttttaaatatatttttttattaatattaaattatctcgggccaaatttctgggcccaggtgttatatctcatgtttacaacacaagttccaaaattttctgagggaagtcgttctaactgcaacatactgaaggtaaacctaaaaaaatgaaagggaaaaaaaaaccttcttcttccttgatattcaagcacaataatgtgcttatttatagagaattttgggaaaaaggatgcctacagcaaaagtggtagcacgccccactacctgcaattctaacaaaaagggaatatttctagaaaaaatattttccaattacagactgtaaataataaattaacttcctactaaattaactttttacacttcccctcaatttagtttacatatatgttaagtaaatttagattggaaatgatgttctcaaatattggtctcggtagcgcctttgtgaggatatcagcaacttgttgatttgttggaatgtgcataagggctatggttccatcttctatcttctctttgatgaaatgttgatcgatctccacatgtttggtcctatcatgatgaactggattcttgaccatgctgatagttgattgattgtcacgccaaattttcatagtagtgtcagtaggtatttttagttattggagcacgtcttatccatattccttcatatattccgtgggcgagagcacgaaattctgattctgtactactgcgacagacaactgattgtttcttactgcgtaaagttaccaagttttcccaaacatatgtacaatagccagatgtagaccttctatatgtttttgaacctgtccaatcggcatataaagacttcaacttctctagtcacttttttctggaagaataagccctgtcctggtgtcttttcgaggtatctcagaattctgtacactgctctcatgtgtatctcagttggttggttcataaattggcttactgtactaattacaaagctgatatctggtcttgtgtgtgccagatagatgagtttcccaactaatttttggtatctctctctatgaacaagtttgttacaatcttcaaaactaagttttatagtagaatccataggtgtgtcagctggcttacagccaagcatccttgtttcttttaggagatcaagtacatattttcgttgtgttacagagatttctttctttgatcgtgcaacttccatgtctagaaagtatttgagtgctctaaggtctttgatctcaaatttttttgccaaatattctttagtctttggatctccttacagtgatctcctgtaataatgatgtcatcaacatatataatcaaaattgacttcttacttgaatcaccatgcttgatgaaaagagtgtggtcggattaacactgctcatacccaacttgctttactgctcttgtgaacctctcgaaccatgctcttggtgattgtttgagtccatagggtgattttttatgtttatacaccttatgagggctctaagatatttcctcagatatttcaaatcctggcggaatatccatataaccttttcttccaaatcaccattaagaaatgcattcttcacatctagttgaaacaagggctagtcaagatttgatgcaaaagaaaacagtatccgtatcgtattatgtttggtaacaagggcaaaagtctcttgataatctatcccatatgactgtgtgaattattttgcaacaagcgagctatgtatctgtttatattaccattaggattatattggttgtaaaaacctatttacatcctatcccggtgctttcctaggggcagttcagtcagctcccatgtctcattcttttcaagagctctcatctcttcttgaatagctgctctcaattctagtatttgaaggacttcatgaattgtttttggttttagaaagcttttatctagtttactcacaaatgcatgatattctgaagacaaattgccaaatgacacataatcttgtataggatgattaatgcaagatctgataccttttcttaatgcaataggcagatcatcatcagagtagggtttgaagcattaatacctggtgaagcctggacagttggaaacaaggttgagtcatgacagagttcggtctcttctggtactttccgtttctgagctttgttcctcctagtatagacatgtaactcatttactgtaggaaatgtgtccttagttcctaccacattctgattcagtttcattttgtgtggataatatctgtgaagggcttgagtggactggactagatgaagatatgatggcatcccaaaggtgatattcttgagtaactttctccccctaaatctcacttttggtataaaatggttgattttcgacaaggttacatctatggtgttgcaaaaccgacgaatatccggaaaaaaacatttgtatcccttttgatgggaagaatacccaacaaaaatacacttgagagctctaggatcaagtttgccacgtagatgagaatgaacatgaacataggcagagcacccaaagactttaagtggtaaagaatttagaatgtgagattgtggaaaagattgtgaaagaagctcatagggtgtttgaaactgtagtatacaggaagacagtctgtttattaaataggtggtgtaagtaaggtttccccccaaaactgttttggaatatgtgtggtgaacataatggatcgggcaacttcaaagatgtgcatgtttttcctctcggctgccattttgttgagtagcatggcacaagaactttggtgaattatcccattttctgcaaagtagtttttaagggttgactcaaaatattcacatgcattatcggatctcaatacttgtatggtagtatcgaactgggttttgatcatggtgctgaattttttgaaaattgcacctcctaatttttctttcataaggaacatctaagtgattctagtatggtcatcaataaaggatacaaaccatttatttttggtttagtgattctggggggaccccagacatcactgtgaattaatgaaaagggttttgagggtttattatttagactaggaaatgaacttcgaatatgtttagagaattgacaaactttgcattgaaatgaaagtagatttttattcgtgaacaatgaaagaaacattctttttaaattcaagaaatttggatgttttaagcgaaaatgtcataacataatttcattgttactactagggctacttgtaaaaactgaattaacacatactgctttttgaatttgtccactagagagggcagcttgaagtaggtagagatcaggtttcatcctaacactgccaatcgtcttctccaagtccaagtcttgaaattcacacaacgttgaatcaaatttagcaacacagttaagttccccagatagcttacttactgatagcaagttacagtccaaattaggtacaaagagaacagaacgtagagtcatctttggtgatataataacagacccgattccaaccactttcgggatagacccatcaacaattttaattgtaaaacactcagtgcacggtctgtaatcttgaaataaggaagcattaccatcatatgatcggatgcctcagaatcaattatctaggtctgtccacttgttgagcaagctgtaaaactgagactatgaaaagtcttacctttgtgagaaatagtcacattagcagaactcctggagaataatttttgaagcatctcaagctgctcaggagtaaaaagacacttttccgttgctgctgagggagcttcttcactggtttttgtcaccaaatttccctgaagctcggtcgcattttctggtcttgaaggcttttggtcagctcgctttccatggagtttccagcaccggtcgcgcacatggccgggcttcttacaataatcacagaagggccgacctttcttgcttcgactatccagacgtattgtgagggcaaacgcgttctcagctgcagtcgtcgctgtctatcattctcccatcatgactttcttccgactctcctctcgtcggacctaaaaaaaaaacttcacgaatattgggcaacagtttcaagcccagtattcagccgcgcacgtcatcgagataagagttcaaacctagcaagaacttgaaaatccgcttgcgttctgtaattacttgaaaggcttttgcatcatccgtacaactctatcgatgctcctcaaacatatcaagttgttgccaactgcgagttaggatgttatagaattgagtcacagtatattcacctcgtcgcagatcatggagggcggactcaatctcaaaaatggctgaagtattctcctttgttgagtaggactctcttgcggacacctagattttgtgagctgtttcataaaggagaaaattttctccaatttccgacaacatggaatttaccagttacgacattacaaggctgttctccatcttccatgttcgcgcattggggtcagttgctgggagcggcgttgcttcaccgatgagatactcctcacggcctttgccccggatgaaaagcaacactgaagatgaataattgttgctgtttagtttgtagcctgtaatcagatatgaagactactcaaccaggccttggttgagttacgaagggaagaaaggccccgaagagatctcgggtggagaagacgacgttgcaccggaagccatttgcaattctggctaacccgaaaacaatgggcaaggatcagaatggctgctttgctaccatgaaggtaaacctaaaaaaatgaaggggggaaaaaaaccttcttccttgattattcaaacacaataatgtgcttatttatagagaattctgtaacagaattttaggaaaaatgatacctacagcagaagtggtgacacgccccactacctgcaattctaacaaaaaaggaatatttttagaaaaaatcttttccaattacagactgtaaatagtaaattaacttcttactaaattaacttcctacacataccttattaatagaatgtcttcgtgggtcattgagtttcaagcacctttctaagtcatacttcaaagctttcctatcacatgcttctatctactttatcaacaaagtctttggttgtttagcacatacacaatcatcacataatcaaactaaactgccaattaactaaatgtatctttgtcaagtactcatcttatcctaaactaaaagagatataattgttattcaccagttatcaaataattctataacaatatagatgacacctttcatgaaaacttaccatactataaaattggtattcagggggataaaaatagacaaaaatcccatttgggactctaccactaataatcttcatcctccaactaaccaattcgctccttataatacacatatcatgatgatagacttagatctggacccactcatcgcactgaagaacttaaactttgggtctatactgatggaacaagaaccaagaacagaaagagccatgacaacttgattagagtcataaatataatctgtatttagatacagatccagaatcactaaatacttcaggtaatacaattttagatctatcccttgattgcgtatataataatgatggacttattgctctaagaaaaaagagaagcatacactgattattcaattcacaattttgtttgaaaaagaggtttgtcttcaactcaccaaatatttattagcaatattgataagatacagatactaaaaacaatacataaaacattagaagtacccaaattggaaactgtaataatggagaaaatccaagtgggactgcaaatagaaattatcactatgaaagcacctagtcggctgtaaatggatgttcacaatcaagcataatgttgatgatagcatcaacaagttcaaaacttgattagtagtcaaagatcttgctcaatactatgaaattttattatgagacatttgcaccagtagcaaagtttaatacaatccggatacactaatgtctctagttgataatttggattatattccaattggatgtgaagaatggttttcttaataaaaaactagaggaagaaatctatatggagatacaatctagatttaaaagccaagtcgttaataaaaagatctgcagaataaaaaactctttatatgatttgaaacaatctctaagagtatggtacgataaattcactaagacaatcaaaaagttagatataattaatgacaaacaaatcatacgatgtttgtcaagtatgattctttaagaaaaatgataatttttatcgtatgtgtagatgatataataattacaagtgatgacatagaggagatactcggactcaaaaatatcttaactaaataatttgatattaaagttcgaatcttaaatacttatggagaataaaaattgctatatgaaagaaaggaatcttagtttctcagtgaaaatatgttgaaccttttaaaaaagactggaatgtttagatgcaaatccccagaaacactagtgagttccaatgttaaactaggaagtaaaattgatagtgtttagttaataaagaaagatatcaatgtctagtgggtaattgatttatttctcacatacttgagtagatatcaatttttcattgtagttagtcaattaatgaataactgaacttaataacttataaagatagtgtttcggattctcaaatacctaaaaatgatagctagataaatactatttttcaagaaaaacacaaatcaagaaattaaaatatatactggtatagactgagctgattttataattgatagaagattatatattagttacactttttatttaaaaaaaaaaatgattgatagaagattcacttttggatactatatatatatatggagaaatctagttacttttggagaagtaagatgcaattagtaggatcaaggagtagtgttaaggttgaatttagagccttagctcatggtatccctggaagaatatgggtagaaagaatttgatcaattgagaatttcctctttagagcctatgaaagtgttatgtgactattaatccacaataagcattgtaaagaacctggttcatcatgatcgacctacgcattgggagattgatagacaattttttaaagagaagatagagttagaagcactatccttgtagcacatttagtcttgccatcaaactgaatatcttcaccaaggcgttacctaggaaaacttttgaaaaactatgttccaagcttgatttgctcaatatttttaaaccaacttgaaggggagtgtaggaatccgacttcttgtagaagttcgatccctgaacaaattggtatctttctcaagctctctcgtatctttgcctatttatatttagttgttgtaaattaagtattatgaaaaaatattcattaaatataaaatttaattacaaattttcagatactaaggaagatatttaaaacaaaaatctgggaaaaattcttttctttgcttgctgcctgtgaatgctattttctttatagatttcctacggacactatcttgcccttgtatctgttgcaaaaactgcatccaaatgattgttttcaaaatttacatgcaggtgtt

SEQ ID NO: 8483 - DNA, 1655 bp, Carica papaya
  Intron number 8 from transcript evm.model.supercontig_151. 34 (locus evm.TU.supercontig_151.34) derived from phytozom e v7.0 (chr-ID supercontig_151; pos 305454 to 307108 rever se strand)
actgctgtaggaacaggactaaacacaaagaaagggtatgcatcagtttgagattgatgggaacttttatataaactagaaattttgtcctaagcatggtagcttctgtgttgtttatttttatttatttttaaatctctagttttgacttgtatttttcttttttgaaataaaaagtgtagaaatatattaacatggtgccaaacaaccgggggtaccagccctatacaccaagctttatagttttgacttgtatttgcatgatcaagtttgatacccaaggccaaaagtgacagattatatatctttcctatcggtttttgttgtaaacatatattgggagaaggctaggttgacccgtgcatgttcctctgttatatgttatatctgccatttagaaatgtgcttgattttaactttttttttttatttgtgatgtatgacattttactgcctgtgttatttcctaaggttcttagaggatcttttgtttaaaaaaaaaaaagagtttttggagggtctttggcattactagaaaagaattacatttagttggttaaaccagctgggttcttatcttaaaaaaaattaattatgtttaagagggtaaaatgtaaattagttaggcatgaattaaaacctacaaagagtaattgagtgcttattctttttcttgcttatgcgttcaggtaaaaattagtagagaaatagagagaaaaggaaaggaaaagaaccagttggtttttagaggaaagaaaaaagaaaaaaattcttttttgttttgtttggataactaacaattaaagaagtaaatgcaaggaaagaattattttggtatttttttccatttaactttataaagtaaaactatggaaatgattacttataagaaatgagtcaataataccctttcgtaacagaattataaattaaacaataagataaaaattagagttttcacatcccttcgtctactttgctaagctaatatcttctatcaaacaagtgaaaggatggtaaagatcccctccttcccaaccaccccccaaacccaaacttctctcaatttaaacttagagttaaaagttactttttaagcatctaaagaagcaccatgcttatttcattaccaacatgatttattttgaagagagtatttagatatttataggtaccaaattagaaattccaactgtcctgttaaagaactaatgcaaaatcacgtgttggacacagaacgctcatggccagccttttccaaaaacttgcacgagcaattatgtgatatttcattaaattgatttcattaaattgatttatataattttgtaacaaaataaattatatagtgagtttccctgtgtcatttttgtccagtatccttgtcaaaccatgaaaatacttgtgttcatgtatgaatcattaattccatttatggacagttatatgatacttgcataaatagttgttttcacctgattcttaggaattgacgttgcttggcactttaaaatttgcatacctcagatgagaaaacacatagcaatatagtttagatatattgtttagtttcataaaaaaaaagttggctactttttctctttgtttgttgatttctcttgtagtgttcaatgtgcaaccttcttctaggtttg

SEQ ID NO: 8484 - DNA, 686 bp, Carica papaya
  Intron number 7 from transcript evm.model.supercontig_9.19 8 (locus evm.TU.supercontig_9.198) derived from phytozome v7.0 (chr-ID supercontig_9; pos 1332400 to 1333085)
ttcttgttacctcaaaactaccaaattatctaaaggtactatatcttctttttattgttgcttgatgtgtatgtgcctcatttcaatactttgcctattagcctccggttcttgcctgtggaattactttattttttggtggacatgaagttagtaaatctttatcatgaagattgcattccttgttaatgcatgtgaaagaggcaagttcattctgcaaaactgatccaaattagagcatgttcagaaatattaggggaaagaaagtgaagtgaaaaaggaaaaagctgaagaaaagcaaacaggattatgtagtcagtttgtcctagtagtttgtggataggcaccagtgtacaataggaccctatgtggaccaggcgctgcacaatgccaatagaatcatctgtgagctctcataatgtcgcaattttgatatggatagacatcctgtaatagaaaagaaacgtgtgtaatatagatatttagcatctgaactcaggaagcttgtataaatctcttatcagactgacatcagtgaggtaggttagtttctaactatctttcttggaccaaaatgatgcatctttttagggctttgaaaaggaaaaagttatgttcttacatgaggatacctattttcatgagctgcagtggtcaagggcagagcaaccagaaaattctcattc

SEQ ID NO: 8485 - DNA, 626 bp, Carica papaya
  Intron number 21 from transcript evm.model.supercontig_108 .76 (locus evm.TU.supercontig_108.76) derived from phytozo me v7.0 (chr-ID supercontig_108; pos 917310 to 917935)
gttcagttccagtcctttgatcacctggtactactctctgatctgggtttatctctgttgattctgtttatttggattacttgaatttgatgtttaaaatgatgagtgtggtttgacaattgatataacaataatataattgataaatggtggaactattcataaatatctattgtatatgtttttttttttactaaatttgatcagggtttgtactgcaattgaatatgagttttgattttggacttcgatcagttattctggcagtagcagtacagatctttgttaaacttaaatgtgtagatgggttaaatgtgaagtataaatgaatagtatatatgtaattttaaaataacgtatgtttaatataacagaacatttcacaaacttgtgggttaaagtacttgtaggtttgtactcagacttgtataatctcttgaggaaatttaaaaaggagagcttagtggtttaaattattaccaattgtgtaactgttctattagactattattcacatctttttgtgatttgaacatcttggcaattggcaaatttatagtcctctgtatatatgtgtgagtatatactctttgggttgttgaagtagctcatttgtttacttccag

SEQ ID NO: 8486 - DNA, 526 bp, Carica papaya
  Intron number 1 from transcript evm.model.supercontig_8.8 (locus evm.TU.supercontig_8.8) derived from phytozome v7.0 (chr-ID supercontig_8; pos 107020 to 107545 reverse stran d)
ttgcatcctcttcctgcttcctcacactatcactggtatgaaatatgtgctcctttattgctgtacatgaatgctttctatctttgatgggcggtccttttttcttaccttttttttggggatattccttattttgaaagcttgaacctaaggatattaaaatgccaaagagaggattgtgctattgcattcagtaggtgcaatttgatagaatcaagacttactaaatatgatattgctgcgttgagtcatctttcatattcaatttttggtttcaatttgcattttagttttacaaccaataatcaaaatcttctttataaaaaaacactaagttggggtgagaatttaatcttaaaacagagaaattgaattctgtcatcgaataactcaaatataagaaatcatattaaactagaactaaagtttatgaatcatcaatagaatcattatctgaattgtcaagtaacttatcgtagctagcaccaactgattttcttttgttggtgaccctttttggcagctg

SEQ ID NO: 8487 - DNA, 2662 bp, Carica papaya
  Intron number 6 from transcript evm.model.supercontig_3.23 6 (locus evm.TU.supercontig_3.236) derived from phytozome v7.0 (chr-ID supercontig_3; pos 1664614 to 1667275 reverse strand)
cagccttggctactcccgagtaatttctcaatactgcctgtgccctttttttggggtattagtaaaatttttaaagtataactgattgaaatacttgtaatagcgaatttcagagacttctcgataaatattcgtattgtgggtcattgattcctaaccacataatatgtaacacccaaatttaattttaatgtaatttaaaattaatttataaatataattttttattttttatttttaatttagtgtaaaaatgaagaaaattttatagaggatgaaattgaaaacaattttgaaaaaaataggtgaaaatttaggttttggggatatttttgaaagaaaaattgaaaagtagaggtgaaaatgtaatttaaggaagttgtgctacatgggatgcccggtcagcaaccccgacaaatcaggacgcgtcgcgtggcaacagacattgacgcggtgccacgcggacgatccacgtgcccgcgatcgaacagtccagattcacccctgcgcgcacgaacgactcgaatgtgttctctccccaaacacgatcaaacggtcagatttaaacgcgatggacaactcagattcgttccctatttaaacgcgatcgaacgatctagattagattgcgatggacggtacagattcactctctataaccctagccgccagacccccctcgccggaaaagaagacccagctgccaggaaggaggttgccgccaccccctgccgcgccggagccctttccgactgccaaaagaggtaaaaaaaaatttttactcagaattcaattttaaacattcccatggacaaatcgaaacaaaaggaccgacggattggtcagaaaccgcggataaagctcagcggcaccgccatggggaattgcaaaaacagcctccgatttttctaccattatgatcaccgtttccttctctataggttgaccggagcaaaacactcaactgcaaagtgagccgacggagccaccacaccggagagccctgtcgatggcgagtttcggttttccatttttttggccaattgagcctccttaacgtgtgttttctcgcagggattgatacaaaatcggtcaaaaacagccgatctgaggcggatcgccggtgcacggcagagccaccgtgccggaattggccaaaaatgggtcctgagactgattttggattttttggaacatttataagtacttatagcgcgttttaatttccgaagaaaaatttagagaaccgagaaccgccagtaagcgcaatcaacagtttagcttttcgagtatcaaattgagtaagaatcacttactttattctctgttatagaattgaaatcaaattaaaatcaatacagtgttttgtgcaatatagaaaatattcataattaattacgggttactaatgaaggcagaactggaaattatctactgttgtttttgttaattgtttttagggtttgaatgcatgatagtatttgattgattgattttatagttttgcatgcatgtattgtttgttttatatgattacggttgaattggggaattggaggcgaagggtagacggaaaattttgtgattaagtgaatagatgaaaacgacagccttactggatattttgggagctggtgaacggattgaatacataggaaactctaccgtgaacattgtctcataccggacggggtattgagacttgataatttgacgctcataccggatggggtatgaggacggctcatttcatccttataccggacggaatattgaggtttagtaatttagcgctcatatcggacgggatatggagacggtccgctaattgagaatattaaagaaaatggttcacgcatagtggggacatctctatgaacccgcatggatgccagcaggttgatgaaaatgagcagttgttgttttgattaattgaatataaaattataatatatgcatgttaccgattgcatatgaatcatgataaatgttatattattatttttataggttgttttcgtaaatttcactacggtaagtggatggtaaatgattttattattagtaaatgaatttgtttaattaagtgctccattagttgttttaatttttctaccaaccttcatttttttgtcggtaaataacgtgatattcttaataggttagtataactcattttttatttaacaatttcatatcaaaagaatcaagatgcagagtctgatctacaaaagagttgcgagtagaatgttagttttatttattttgcgcttattttcttattttttatattttttttaaaatggtaattcttataacactattcggtactttaaattattgtgtaaaaaatgtaaatcttaactatttatttcgcttctccgagatcgttacatactagttaactaccatatatacttgttgactcaaatagggacacctacaatatatttgcatcaatagctagggttcaccacgttacaattcttaattcttcgaagttgtgaggagcacattattgtggagttgcatgttgttaagtccttgcttaagtcatttttaatttaccttgagttcaaattagcattgacatttatggttagggtgttggtccttattgcttttcactgttttaagtaatttatggtcatacattaaaagg

SEQ ID NO: 8488 - DNA, 3471 bp, Carica papaya
  Intron number 11 from transcript evm.model.supercontig_37. 14 (locus evm.TU.supercontig_37.14) derived from phytozome v7.0 (chr-ID supercontig_37; pos 105288 to 108758)
aaagagtaagtaattgttttttaaaactttaccaatcaaaatttggaaatttttaaatgattctatattcatgaatctgaatttaaatgaggttgacgtgacagttgtcaaatgtcttggaatggttgaaaataacctgtaaagaatgaagaactggtgaccttagtttctgacagatcatctgatgcataagttagaaagtttctgagagagaaatgaaaagagagcttgtcttagtattattacaaaaatgagcccataactatatggtgccacaaataattagtggtgttggttaagaaggttggagttacataataattacatgcctataattagcctaattattgttggagttacaattgtaattatcacatatttagtctagttattgtgggagttacaattgtagttattgtgttgtaatttatcattgatttctttgtctataaataccaaataaactcttctttgtagacatcaagagttgtaatcatatatttcagaattgagttaagagtgttttggctttttttcattttatacacaaggtgttgatttggaacacaattgttataactattttaattttgattttctatttcaattgttcttaatgtttgtttcgattggattcaaggggtattatttatgttttttgggttctatttaacttctaccatttgggtgattgaacaaatttgattcttttttacttgtgatctaaatcgattgaagagttctaaggttcaaataagggtctaaggattccgcatcatttattcctggaggtaacttccgaagccatgcccaatgtcacttcgaaggtgtttgcaagctcattggctttagttatcttatgttctttgagatgttggccacctatgaggtgttaggtactctttcacctcttaagggttagttaccctgttgtatcatgggtttcaatcatctccaaattaatagtatagcttgtcatcctcgagatttttttaccctgtcaattctcaggtattctcgtctctaaagtaccaggttcttatcgctcaagtgttggtcaattctaatgtattagccatgatgaagtcaagcctctaccctgaatccaacaatgtcttttactggaaagaaatccatatgagaggataatggaaaaaagacaacttttattggataaacatagtagtgcatgaggagaattaagaaaatacaataagaaatattagaatttcttcttgtctgattttttaagagttgtctcaatctttagtgggtcacagttattactgggagtgcaaggtctctcctagtgtgcctcatcaaatttgtgtctgccaccacttttcctacttcttcctcccgagttacacctctctgatatataccttatacacaagctagctctttgcactcatctttgtcctgtctggggctattatgaaaagcatagtatctagagttgtccagtttcttagtcttagttttgagggatggaggccttttattattatataattccattagaatatgtgagagttgtgtatttagtggagtatcaccaatgcttggtcaagcccctaggccccagcttgtcatggcctagcctgtcttgccttacttgcttgtcttcattattttgcttggtgtcttgccttcctgatctctagatctcttttcttaggtgtctctccttatctcttgcagccatggcctactcaatattcaaacatttttttgccttggtgaacggctccagtaaagtcttgagagagatcttagaaacttaaagatagaaatcattgttattgacccgattagagatgtctgagattatcatgccttcatccagcttgcgtaccgttgccaacttagttcgaaagttggtgaatcccataggctctcctctctcttctatggcttattgaacttcttgtcattgatgaagcgaggtaaaaataggtcaactagctgcttgaagctatttttacccttggaattgagggtttagaacaactcctttgccccgttgagtagcaaaatgaagccctgtgcagcattgcctttgttgcctgtagaactccagtttgttcctagattaatgagatggtttgctgggtcctgggtattgtcttattgtcaagctttgcagcaacttgaactttgctggtataggttcctcttgaatttcatgggagaaggggattcaataatgtaggcaggagagttttccttgaggacattggttttgagcttctccagtatccgagtctgtgaggttcttatcagtcatcctcatcacaggtttgcttttttccttgttaaaccacttgtatcaactttgaacctccttagaatgttttggcctcttccattgtttggcatccatttctaaacattattgcttgctcttcagcaaatcttgctcaaggtcctatctctccagggcacaggggaatcaatttttcttacttggcagcacggttgctcataggttcatttaagtaacatcatgttggtttactagtggctggaccaatttcctcaactccttaagctggtcatgttttggtttctctgttagttgaggcttgtggatccatcatcttttacctgagtacctttttgaggtacttgactagctggcttatccgtatgtgagtgctggctctagagctctttccttgccattctcacatgcttccctttcctgccattataatcttcttatcattcccatagacatcggatgatatattcaaaaattgtaggagcctaagatactagttttcttggaacagtcaaaataaaatgcaaacaatgaacagacatggcccacatgattgtttatgagagattgattcttaagtcagtgaagatttgagagggtaaaataaaagggatagagttttaaaggattttttagggaacaaaatgtttaacttgaacattaactctgcatggttttggttgaaatgtcaattagtcttccttggttgtaaaaagttgttttgaattccattttcaaaagtcatttatgtttatacataaaagaacatatgtagctgttgaaaataaaagcaaggttagaaaaatgatagggaaactagaagacaatctaaaaacagttttttattcttttcgaactcatatcatattttactatatgttttaatcttatttttattttcaatggctatttatatatatttgtgttcaaaagcaaatgaacttagaggataagaactcaatccagtcttctataattaagtagtgtcttaggtttccttgatttttcctgctttcatctattgcttcgaaggaaacacatattttattggcaactatgtatccaaggttatttacaaataaattctaaatagttccatcagtaatgatggaattctataaaactgctgatgaacaagtgctttattctggtgcaggggcaatctgatatttcagttggtggca

SEQ ID NO: 8489 - DNA, 2200 bp, Carica papaya
  Intron number 1 from transcript evm.model.supercontig_108. 9 (locus evm.TU.supercontig_108.9) derived from phytozome v7.0 (chr-ID supercontig_108; pos 121549 to 123748 reverse strand)
ctgcgttgtcgcttcctctggcatcgcctttagcggtacgtacgcttgaccgtcttcattgctttttggttatgaaacgatgacgctttttctgatctaacctactcatcttctattttagacatacatgcatttatgaacttccactgttaatcgtcgtcatcactatgtgaatctgatcatgcaaattacctgctgattataatttttagcagtttaaattttttagagcactaattaatcgagatttctattcttattattaatcgtagtggactatatttagaaaattgaaaaagaaaacttccatggccgtccatactgattcaaatttctcaaggttgatcggatttggacaagcattaagattccagcatggtagcataatttttaattattgtaattttgaagaaaaattatattataatttaaactaaagtcggtttgatcaatatacatttacaaattatattacatatatatactaaaagatctttttactcttcatatatctatatatatatataaatatgtatatgctgtttggtgggtcttgtttccggagaaaatgaagaagaaactgattaatattaggcggagaagaaaaagaaatggatggtaagttgagcgtcaggtaacgggataataaatactcgttagctgtctctgtcatgatgtatataaatagtggtcaatgccactaattaatccaatatcctaactttaacatatatatcaagatttttggcttcttgaatccagaggttatttttttttttaattattaaaagtaaatcaactttattcataagaaaatattatcagtgacacatatgaacgcaaacattattagctcctgtacaaaaccagtcattatccttagtgatccctcaaaaaacaatgtctccaaggatcttaggttgtcactagctgatactacataccatatccaaatttttttttcttaattaaaatgatatcacatactataaaaaataaagtttaatgttaagttatatatgtttttatcaaaatattatataaaatattttttttacaataaatttacgatttattataattacctctgatctactccaagttcatacatgtttatggtttaaattatctatggcacattatcttcataaatcttttataactaaatccacaatttccctttttggttatttatttgtagaaaatagtcaacagtattggcagtcaaagagtcaaaatgaagatgtaagggaatcagatatttctattttttttaaatcgattatttgatttttttgttgtagataacttaaactcaaaaagagaagtctaacttgggagaacaacaattttgaaaagttgagccacttgatcaaaatacaaataagtcagaggtctaaatgttggataactataacttagcaaaccattatcttgattaatagtaactcaagtaggtggttgtttagggattggcaatgtgttattggaattattgagagtcaataactattaatttcctcttcggcagagcacctagttcacatggcttgatgaggtcaacgttattaaaataatactcatgaagcaacatattttaagtaaaaagcagtttatagactggtaggttcatgcagtttacgtgcattaattaataagtaatccaactttgaattatttgatacaagtatcttatacacgagattgttttattctattaattttttactaaaaagcagcttgtagactgattttagctcaacttattttgagttaatcggtttaggtatccatctaagtcaaaagtaaattttctgttttaagttatagacaaatctcttgtaaattaattttaaaaaactaaaaattttattttcttagaccattaggcatttaataaagtttattttgtttcttttaatttttactgaaatttctcaatcataaattgtaaaatttttgtttgtgcaatttgaagttgtttgttaactttttaatttataagtactctttttaaccaacactcgggtatttatttaaggtttacaaagaaaaatagataaacaaaaacaacatacatataaattcagaatatcattatcttatcaatgttagtttttagagtttcccatctcttgcttccattaatgcattgctatctcaatgaaaaacaggtggttttggtagctacctgtttgga

SEQ ID NO: 8490 - DNA, 2023 bp, Carica papaya
  Intron number 2 from transcript evm.model.supercontig_15.2 0 (locus evm.TU.supercontig_15.20) derived from phytozome v7.0 (chr-ID supercontig_15; pos 403472 to 405494)
ctgtctactctgcctgccatagaatttttagcgaggtacctgaagttataaaattttacatggtattttttgtagtttacctatttcatgctgctgggttcttatatttttagctttcatttatggagattgtgttttagttatcatattcatttggctattatggtttgctgtagatggccggaccatatatggttcatcaactaggatcacgagctttatgggaaaatgttagtttttcatggatgcatatcatgcaaattctcgatgtagtcgtataagaatcaggatgtgctctagaaagttacatgctttctgacttacctgaggggaatggttttattctgtgcttttctaatgttcatcgaagttttagttattatgttttgttggacctttgtatttttctctggaaggataaatggctttcctctagtgaaagagaatattgacagtattagagtagtagtggagaaaaattttattttttctttgtgaagattttgtttatgttttaagttccttttaaattaagtttccaattagagttccttaattatggttaaactaacattctgaattaatgcagaataaatatttaatatgatgttggacaaactagaaactgatttgcctaaaaaatctagatatctgacctcagcattcttaagcataaaccttaaagctataattgcatcagacaacaaaaggattgagaaaattcttaaagaaaattttcactgaattagttctctcaaaagtgagattatacgagtgtttacagtgtttctcaattaacatgtttgtgactattgttcattgtggaaatcaagcttaaaaagcttgttgttaacaataagtgtgttgtttatatttggtttcaacttcaaaaatggaaactttcaatctcgcaactcaaccacataaacgatgatggaatggagcatgagtagatgacacaactattttggtactgcagcagtgccttttttttcaatgtggtttctgttttgtgtatgtatccaatatgatgttgctataaaaatgaaccatattcttcttggttccctctggatgggaatgcacatcataatggaaaggaaatacctactccttttcttttggaaaaagaaatattgttttacaaccaatgaatacaactgatatgaagggttatgtagggaatgggaagaagtatgctcggaaatgagtgcataaatctaaagaacatgctagagaatagaaaaagtagcttcatattatggcaaacaagaaattggaagggacaagcagatatggctatgctcatttcaagggaggagcaggacatgtgttcgttcattcagaaaaagttcctatcgtagcatgcaccgagttcctggtcttcacaagaaaatctatgccatcaactcaacagggttgagtttttcccacatggggtagtaaacgtagcttcatattatggcaaaacagaaattggaatggaacaggcagagatcactgtgctcatttcgagagaggaacatggagcgtgttcatttagacaaagttccttaagtagcatagagaaccttgaaaaaattagagtagtatcattctttatgttagtttagttttagaattgataggattttatttatgttcaaatacctttacgtttcctattcgaacgcagtaattatagttaggtttatattccaaactgaagcacttaaactattttggaaatcacttttactaactccacttagtaaaagcgtgaaaatttctcgcgattttggttgtgggtttcaattcttaagtatgaagcttgagaattcttaggaataatatcttataagctctagacatgttattttagatcaccccaaattttttaaataggcaaattagcctttatctagtagcatattggtacttgccttggacgtttcagttatctgtccgtgatcttggaaatatgttttctgctttttggcttttcttagattcgtagaaggctaccagatttctctcctgcaaa

SEQ ID NO: 8491 - DNA, 5202 bp, Carica papaya
  Intron number 1 from transcript evm.model.supercontig_1.39 (locus evm.TU.supercontig_1.39) derived from phytozome v7 .0 (chr-ID supercontig_1; pos 788076 to 793277)
gattcgccattgctgctgagagacggagaagcattgtgaactttcctttcccccttttctcttttatgttattccagttactggttttacatgtcggcattttttcttgtctctatatttctgatctctgtttttgcgattcctttttaacttgtttttctatcttgttttgagattatttatcttgcattgattgcttcgttccttttttagtatattaagataatgaacacatgattattaaagatctatgtgttttgcggtgattgatcaatggagttctttcgcttttttagaaaacggctgacgtagtattttgtcatgttgttcctactcttgtacacgaaaatatattactagggctgaaatttcttctcgttgaactagttgaactaccggtcgtctcttctcagtttctagtcttctggtttaacatgagttactatcttgctgacttctatattttatagtgtgtgtgtgtcttaggatttgttttattctcctatatatatattatgtaaacgctaacgtagtagtatatcctttttcttttattgacattgaccttcctttgaggcaataagatttaggagtgattgtatatggaggctaacaagagagctttctttcagctcaaaacatcagaaggtgcctagttctgtagataattttctccgaatgatgtcttctggcaagatgactcttatttggcattaacaattaacattgcttataacttttttttaaactgatacttgggatcagtgttatgtggctaccgcaaatttcctttcagaaacataatgtgcagctcaagatgatgtgctcttcaccaaaccttttacttgcatctctgctttctccaccaaactagtattatacatagttcttttttctttttaacaatatattatctgatgcgggaaaggaagacccttagaattgatattaatggatatttgtgaaattaaagcgtgtgttattaaggatattaagcttatttaggaactactggaataggcttattgtcagctagtattttatttttttattcagttcagagtcttattttattattatttttctatttaattttatgtcattttaagttacatagacactataaatacatgactgttttatcattattaaataaattgcttatgaataaaattattgatttttttctaattgcactgcgtggctgacaaccacgggattgtggttgtaaaaaaccctctaattgtagttgttgctaatatccccttgattgtggattggatttatcctttgttttctttaattttcctatctctctaaactctactatattacatcgatttggcatcagagttaaggtttttgtttttatatcatgcttccacaccactaaaccctcaaatactccagaaagaaacctaaaatctaacataccaaacatatacaacttggagagagaaataaaagcaacagccatcccaggtccatattatatctcctatcatggctagggaggtggttgataccacctctctcattgtccttagaggatcccaatcagcacctccaccaaatctcaatgtctattatctctggagtttgcctcattagctagaaatctttgcagtttgcctcactagctaggagaaccaaggccactttgtaatcacttgatctcctccttccctactgccatgagtaacaccaataccagctccagagctggggccgttagatgattccttcaccagattactaatgtcagaagacagctagaagttcgtttatgactctgatatgtcgaccactgctcattggtttgaagccctatgctgattggtttaaaccagattgagtcaatctggttaagctacctatagactagttcttgaccagtttagactcagtccttgaggtttttggtgttctttcactttttggggtcagtttggtcaaattcatattctatactcactttttgacagactgattagttggaaagatgaattaatgtttattgatatattcaccaaggccattgatttagaatgtaccttagaccttccaattggcagaatggaagagaaaatggacgtgtactagtaatgttatagttccttaggtaaagggcttgaatatggcttatgaatattgattattgcttacaaaccctccatattaaagtaatgaacttcatacttcgagccaagttaattattgtctcttaaatgtatattaaaagctagtcaagttgatggtagatgcactttgttattaagagcactgattgctaatcaatttctcaagtactcaaatatcaatgtcaaacttgaaattgcttactgtatatgtgagttaactagaataatgcaccagatattccttatgatgatgcacaaatgaagaaggttcttgaacttagtgtttctatgtttgaaatattagatgatagagcaagataatcacatgtcaaagagataccagtgatgttttaacgtccttaggtaaagggcttgaataatggcttatggacattgatgatatgcttataaaccctccacattcaattaatgaactccttcatcccttgagccaagttaattattgtctctcaaaatttatcttaaagctagtcaagttgagatgcgcttttttcattattaagggaattgattgctaatctattttgtaagcactcaaatatcaatgtaaaactggaagttgcttactgtttttgcgagttaaccagaataatgcaccagatattctttttgatgctgcacaaatgaagaaggttcttgaacttattgtttctatgtttgaaatttatatgacagaacaagataatcacatgtcaaagagatcataattcttaaaatggttgtaagacttaagactatatttagtaagtttggatcttgattatgaaggatcaattgtagaaatgttcaagtactttctagagtctatccgacctcaatgaaagaatgtttttgtgtacatggaagaaattattgccattcttttaaaagtgaatttagctcagtagagttgctctcttaagtcctacatagtgttagcagatataacaaaagagttttgccaattgctaatgtgtagccgggagacttctttaaagctggctacttagcttgaatcatcttttatgcagaaaatgaaatcattaggtgtttcctgcatgattgtagtaatttagtgaccatcatatgctatgaccaatctgtacttattgagcaaggtgatctcattatcgttgatgatccaactaaaaacaataataactatatgaagaaactaaggtgattgtgaaagttgtcctgatttttattgtaaaaattgagtcatctggtcatggatctcttaatttagttgtaaacaagaatgttattgaggttgaagacaataatgctttatatatatatatatattgtttgaggaagaagaagaaagagactccccattatgatactgccttaaatttttcttggctcctaatggtgataaggagagtttggccattctctttttgcggattcaatcattcctagttggttcactagttattaaaagtctttttctttggaagcattctcattttctcataacaacctcaagttttgctagttttagatttttgaaaggcatgtccgaggtttccccttgttgctttgacattttaaatctcaagattgagttttcactaaataggggaggatgatgcagaaaaaaagaaccccaaaattgatgtactttaaattatggactatttttgtacttcaaatacttatgtattattagggataatgagcatatttaggactagtaaagataggtttttggtagtttaatattttattttttatttagtagaagttgtattttgttattattttcctatttgaaaactaattatattaggctatatagacaccttataaatacataaggttttattgtaattaaagagactgcttataaatcaaactattgagtttttccgtttgaattgagttcttcacaagtctttattatgattgccaaaccctgcaatcatggtttggattgacttttatttgttttaatttcctctctctctaaaccataatcatttgtgctagtcataatacgttttgagtgaaacatgcaactgataatcgtgtcgcatcttgatattgatccatcatcgtatagcagtcatgcttctttaaattataaccgagtatcgtcatccctgtctcggttggttggtcccaagagttatcttgttctctgatcaccaagttcaacctatttgaattgctgatgctgctgttttctatgtgtgtgattaatagaaatttcttttgaacaaaagcattctcaatctttttaattggagagcatggtttgatggtgttgctgataattgttggggattaccaaatgttggatggaatcatttcctgaaaattgttctggtacttaattgctagagtgtattcagtattaacagggaatcagcaactgtgattacacatcctaagcagatacagtaactaccataacactgaccagggattatttgagtcttgtgtcatagtctaatcctaatttaattagactagaattctaataagaaacttgaaagaatttaaattataaattaaatcttaatacaaatatctattaatcatactgttaaagcaaataacaggtttgaaggaaagaaaatttttaatttgtttagagaagtcacactctgttctggcggatagaagaaaatattttttgtagttgtaaatagaaacaacgtttagcaaataaaaaaaaaaatatcagccaaagtataaaagtcaactttttaggagactgtcttttgtttatgcttaatcaccataaattcacatgttaatacatgtttttctgtacagacgcgggtagaaaatgaacataaaaaaaatttgttcatgaaatgaagtataatagctaatcttctctgcatcagtaacgatttgagatattgtttcacgtggtgtagaatttgcaaaatctgcagttgaagtttagaaatgtgttggtggatggcaccatataagaatcacaactatttaagaaagtagaaataccagctggatagttgattctcctattattgtcaattctaaatatgtaaatcggctgttattttctgcatgacagggg

SEQ ID NO: 8492 - DNA, 1449 bp, Carica papaya
  Intron number 2 from transcript evm.model.supercontig_39.6 1 (locus evm.TU.supercontig_39.61) derived from phytozome v7.0 (chr-ID supercontig_39; pos 1082164 to 1083612 revers e strand)
cttgttctttacctaaaaagaaaagggtaaagggtccatttccaattgccatggcttcatttgaccttgcaacatgcagagacaaaattgcactatgttgtgctctaatctctctgatgtcttcgttgatttcatagatgatcgcatctatcttctccccctcactgctctctcttttttctctctgttctatctttagtgttaagtgtttggggaggaaagatttggcaattttctgctggatttttcctgtgaaatatgctctgtagtaaaatcaagccatagttagtcaaggagaaaagaggccaaattttctgacaaccagcctttggcaaacaactaaaaactcaacagtatgcctgatggtcggttttggctgacattgtgctaatgagaacccaactatctaaaatgactgtttgttggaatttatctagaatgtaactttggtagatatgtaaattagttttcagactcgtggtacatttgtccaattgatttatgtgagctcgtaactgggagtcataccccctcgcctatgaagccaaattacaggtttgtaagggaatgacaattacaagcaacgctactcattaaatcagaaccaaacatagtaattggaactggtaatgtaatggttattatgttcatacttcatttcacctttatttactgaaggaaacatgctctaagattaatgttaaccctaaaatgctcctacacatgccataaaataagcacattaaccatacaagcattatggcaaagacaaagaatcatatattctacaaatttaaaatgggagatctctcctcctcaccaagcctctaaacaatccttcgtagaccctcaagtcagcatgcatctaaggacatccatcagtaacataaaggatggagaaagagtgaccgcttgcctcacatctctctgccaaggaaacaagatttgacctcaccataatgataattgcaaagaacacctaagataaacaccctctaatccaccctcacctatcattgaaaccttccctaaacatgagtttatctggaaactcccgatttgccctatcacatgccttctcagaattcaatttaaaaaccagccatttaccttttgaaattttagacatcctctgcctcttcattagtgtaagagagctgtctacgatttcggtacccttcacaaaggcacatgctttttctccgttttatttttatttttattcttcttcccaaatgtctgcccttctgtatttctcttcttgttagcttgtgctgcatcactttctaggccattttataggattacagcactaaacatgcacatatatatgtgtgtatgtgtgtgtttatatgtacacatatacacacatggagatgcatatatatatatatatatcaatatacataaaacagaaaatgttgcattttttccatgcaggcttttttc

SEQ ID NO: 8493 - DNA, 938 bp, Carica papaya
  Intron number 2 from transcript evm.model.supercontig_33.1 43 (locus evm.TU.supercontig_33.143) derived from phytozom e v7.0 (chr-ID supercontig_33; pos 1450227 to 1451164 reve rse strand)
ttccatcccaggtaagatccagttctgcctatcatttactttgtcaatatgatcctgatgcttttggcttgttaatctcttcttatcattgaccattcctgctgataagttctcagattcttcagatctggatatttttgttaatgtagaaatagtttgggtactgaaatgaggttcataatgataaggtgcttgtgaccgacttaggagttgcaaattctattaaagtaagcagccattattgattgctgatttatcgaataaaggagaaaaaataatgaaaatgattttgaaaagtgagacatatactggataaactatgtttctttcagagtttggatcctgaaatttcaggtggagaataaagctatctttgagaattgagctccattgcttaatttctgtatgtcaaattttctttgcaaggaattttgcatataggtggtctctttgcctctatgtgcttgctggaatagatagctggtgtgggtagataagtctaaagtcaaatgagatgtttcttttcatattgtattgtctacttgttcggggttctagagattagtgtgagagaacagtaagtagttgatgtgacttggagactaagtttgtaaagttataggagctatgctgctttctttttggcgggtggaggggacataacgtccattataagttggaattatcagattatgattctaatacttagtattgtctccaataaagtcattagtattatggttatggggtgctcgtattatttctatcaaatgaagtttggttgtatttaattctagtgcagcacaccttaatccatagcgacaatgaagaacttgataataaagtgttcaaattaaatagtaatggagccattgcacccgactgtcacttaagatttatgttacgtgttctgttacctaaatgtatgcagattctag

SEQ ID NO: 8494 - DNA, 1521 bp, Carica papaya
  Intron number 3 from transcript evm.model.supercontig_59.1 23 (locus evm.TU.supercontig_59.123) derived from phytozom e v7.0 (chr-ID supercontig_59; pos 1116607 to 1118127 reve rse strand)
ctaatcaggagagttcatctccaataaagcaagaggtatattcatatcgtatttttttaaatataaaatgcatgttaaccctgagcatacttgacagaagaaaaaggccgaagccttagaacaggctgtagtagattagtagatatgaaatgcacacttaaatctattcgttagcgaagtaatcctccgatcgtccacattccaacaatttgtaaagctgcagcaaaagagagaaggcaggagcttccttgctctatagctttataaaagcaccaaaataggttctttgacaagagcatcaaaaggattggataagaaggtagggaagctgggatcatgattctctagttaattcccggaagaaaaatctttctcctttctttctcgtatctggccttaacagccttgcttactcactctcttttcagtttgaaaggagctaattaaaatctcgatctcttccagagaaagcaaaaccaacgagccctcggttaagcgaaagatgtatggctttgattttgaggattactagaatcatcagttctttcaaatcctttggacagaaaggaactacacaccacactattcttttttctctgtagtttgaagtctttgatgccctgaacagaaagcaccgttttagcatcaattgctcgtacgagcttaaatcattcctgcctttactctctttaagtgagaactggtggatttggtaagtctcttgagcagattagcaccatcaattagtagcagcatcttcaccgctcaatcttggagcttggctccctgtgtttgagtctttcattcctattccctctcaaactcatcaaaacaccaacaagggcatccccttcacttatcaaacgaaagtcgagccgaatctcatctcataggactataatctttgttgcaatatattctgttgtcttacagttgaaagatggacgaagtttgtaaccatttcctggccatgagaggatggaaaagacacaaaagcaaccttctccgattgaaacgacaatcttgcaaattggcagagctttgcgtctgacttgagagattagtgattagtagataggagagaggaaacgggggagagagaattagagattggacatgtcgcgaatggacattttagacgtttcattggtgtttttctttttcatatttaatatatatgcactgaaggtaaggtaccttaatttaaaattgggctaatataatatttttatgagattcttttgaaaaagaagaaaaataaattatattttatatattcaaaaatacaagttaaaatttatagaataacttaaattgacataataattattttaaaatttacacttatagttactgcatttatattagcatccttataattaggtttcaaatgattttgttgttcaaaaccgtatgcacacctcctgtgtgcatgcatggcaaaccggaggaagtacaattttgattattgcaaataaactactaaaagagtgttgtattttgttttcaaggagaacgcaa

SEQ ID NO: 8495 - DNA, 1932 bp, Carica papaya
  Intron number 3 from transcript evm.model.supercontig_195. 21 (locus evm.TU.supercontig_195.21) derived from phytozom e v7.0 (chr-ID supercontig_195; pos 126103 to 128034)
aatcggcgaaatacaggttagagttcttctcactgtttctatgcttcgcggatgtgtgctgaattgctttagtcccttatgattgtggggagtaaattatctagctttcttgcttatcatccgtatgctactgattgaagaattttctgttctaacaaggacattttgtattgatatgaatatttgaggctctcttttgagtttgtatatgtagtaattttgtaggtttactgaaacacatactgaaacacaagagaatgagaattagaggagttgaaccaactgggggatggatatgtttttaagttataatagaggtctacgttcttaggatgcatttgttatcttcaaggttaatcttctactttggaagttaagaaataatttattttggcttttatctcttatttaattcctaaagaacaataagagttgcgtgggtttgctgtagtcttctttgcagcaaagtttaaactttccagaataactgcttctcatttcatttatgtcaggtgattaagtttttattaccattttgatgtgtgatgaaatccttaaaaaaattatggaagtaatatgaacccaacatcctatgggcgaatggttttcttatcaattctactattatgtttacgttctatatgaattccaaaaccatttcattttaaacaccaaattttgttgaaactaaaagtggcagctggaagtatttaagaatagtgtataggaatacttttgtgcgatattttactaattttttagggcagcaggaattaccaggactagttttagaaaggttaggcacttctgtatacatcattacaaaacatggatgtctataatatatgcatgtatgtacatttgtgtgcatgcactcttctagacaactcacttaattagaatgtcacccaaagtctacttgtagcttcttgttcggaaataaatatatgagaagattcgtgaaatcctgagttagaaatctcaatagatgaaaaattaaagatcagtaaaggtttgctgttacatattttggggagtgattctccatggatagttatgaagctggaaatattgctataagtttttattaggtgaagagactaaattttatgttgttttgttgagaagttcctccagagaatggactttgaaacttcttcattcatggtgccacagcctgaaattttgttatctatttgcattactttctataaatggaaatgtttcacttcttcccatgtagcatccactgcttatttggttatctgaaatggtttgatttagttccactgtttgctgtttagcatttagttgctccatatttgtttatctgaggcttattgttttagctaaatactaaaagaccagaaggggtttggatgagttttgttaacatgttccaactaaaagaaaaaaaaaagaaaatcacatctaaagttgccagattttttgaatcattaccgttcatttggcaaggtctctttaaataagaagctaacataaatggtaaagaatctatgtgtcatgatttactagagatattttttttttggtttgattaattgaaatgttgattatgttgcagtttacaatgtgaactttgtcatgaattgtttgccttttcttgttcgttatattttgcttttaaactatttgatttgggggaggtgttatatctttatatatctctgtaccattttggctgttgacttttcttgccaatgcaatagttgttgttaaagatggtgagactttttttttcactttgccagggaatgttgagatctaaacctgttcattattagagctcgtttgtttccatgagtatttcagtcctaactattaagtgtcttttggtctaactattaagtgcttattggtatgttggtgtcaacagaaaatttggtggaaaatctcttgggagattttgag

SEQ ID NO: 8496 - DNA, 975 bp, Carica papaya
  Intron number 4 from transcript evm.model.supercontig_21.1 10 (locus evm.TU.supercontig_21.110) derived from phytozom e v7.0 (chr-ID supercontig_21; pos 1305355 to 1306329)
ttcgagttgcttcaaggtatttatgtgctttgtgatttctctaaatagcaaatgcattttcttttatggtaattgtaaatccaaatataatctaattgaggggcctgttaaatgcaaatttttttcttctttcagcataattcctgatttgtttctgtatcttggtgaaatagatttactgaagtgcttgtctacttatgttcaacctgtgtttccttcactctgttcgtgtttgcttactaaattttcattaatgtgtcattttccaaggcctgtggacaatagctattttattagatatgattggcatagtttacctttttttccatgcttttctgttatttatttgtattttccaatatgaggggttgatgcatcatacaaaattcaaggtggtttggttgagtctgccaccaacaggctagttggaactgacaatgacctatcctgttcatccttcttcaaattcaccttcatcattgatatgctaaaatgagaaagacatgcttataattcattatttgttccttaacattatgttttgatttaagatcagtatgtaaaagattagagactggagactgttgaaacaagctataattgatgtaccattcatgcgtgtgatatatgatgttatgctgaattctaatgctatgtataattccttattaactctatccgtctctctatttcatgcatacacacagaaggctgcaatcatgatatagcagtagtattcttaagttttaagcctgacagcatctttaatgtctaatagtagtggttgtaggttgtagcatggttctaaattaattttgagatttgataggaaggaaagtttgcttaggtggcttatggttattttaactgctaacatgaagaacttatccaagttctcctacccatgcaaaaaactgagacttttcttaattgattttaggtacttcaagggtcctgaactccttgttgatttac

SEQ ID NO: 8497 - DNA, 7670 bp, Carica papaya
  Intron number 13 from transcript evm.model.supercontig_10. 74 (locus evm.TU.supercontig_10.74) derived from phytozome v7.0 (chr-ID supercontig_10; pos 1195143 to 1202812 rever se strand)
attgaagaagctatagacattgtaaaccggaacaggtacttgatttaacttgtcctcttgatcacaagaacaaatgccatagttacaaatgttcttctgttgactcctaattctaatgattttttggaaattctaattgtcgatgcttggtgtattttacaagtgtgcttttctgaaatttctaattgtagtcaattggaagtttcttgatcaggtgatgggtgataagggattcggtaataggtggagaaattggattcgaggatgtttatcctcatgttcgcctttagtgattgtccatgggaaaaacccgatattggtttagagcctaaaaaagatttaggcaggatgatcctctgcccctttttctctttaccttggtgtgaatacattaagtaggatattgactagagctataaagaggagcttaataatagggttaagaatggggttacaaaatgtggaggtatcacatttacaatttgtggatgatacgtttatattcctagaaaatgacaatagatctttatctaatgcttttgctctcatccatgtgtttgaacacatctttggactgaaaatcaatatggggttttgttgaatatgatattttattattttagtttattatttaattagttgatattatgtaattagaattatattagaatagaaatctcatgtaattaaaattttattagaatagttatttcctaatttgtaggttacgaattgtataaatactcaggtgtaacaatttaaagggtgagaaataaaaattatttatttattttcctaaaatcaatatggtatcataaccaaataaatttattttagggttttaatttcaaaattttttaaaaccctaaaaataccaaaaataggctgagtaaaaagagagcaagataagaggaagacgggaagccactgaactccctcttctgcacgcgcataggaagcttctgagagatcacacagattcgcgcatgggaagctctagctaagccgcatagtccacacacgggtagctcagccaagttgcgttgtacttaataccgtgtctttccttcttcctccgcgcccagagatgcgcgaagacctgattgatcaagcttcttccaccatgcatagagacgcgtgaagagccgatcgattgacataacttcttctatcaccgcgcatagagccgcacgatttgtctcacttcaattgcacagagcctctggctgcgacttactgaccttctaccgggcacgatcttccccctttgccgcacgtagagccttgtacggggagtttttctggccagctgctttgagccgatctaagccattgagccgagccgcttgcgccaagcctagttgagtttcagctgagctaagctgtttcttttgaggcgagttgttttcccgagctgagctgtttttcgagacgagccgtttttcgagttgagccggttttcgacttgacttcgagctgttttgagccagtcgagttgctgatttgctagacatatctgtttcttccgcatgcgagccgctatgatcaacttttttttatcctttttctggcttctctgcgcgcggctgcccctaagttcgcgaccaagccttctttgcgcgctagctgctttgaccagtcttttatggtcctttttgtagctcttctgtgcacgtcgggctctaattttgcgatctggcacagattcgcttcctttgcatgagaatgctccgaccagtcttttctggtctcttccgctcgtgtacgccttgaatttgcaatttggtatgtaagttaagtatgtgcatgtgtgatatatttacaccaacttgagaggggaaatggttgttaaatataatattttattattttagtttattatttaattagttgatattatataattagaattttattagaataaaaatctcattgtaattaggattttaataaaatagttatttcctaattagtaggttaagaattttataaatattttaagtgtaacaatttaaaaggtgagaaataaaattaatattttttttttcaaaaatcaacaggtttaataggattaatgtgggagatgactcgattaaccatctagcagactcaagggattgtactatgttatcatggccccttgtgtatctaggcgttcccattaggtggcaaggccaaggaggatgattttctgtgtaggagtagagattaaggtggctgggtgtcttgagaattagaagcatggtctggtcactcttgggggaagggtaatctcgattaacgcttgcctttctagtataacactcaattttctatttctatttaggatacatgtcagaatagctgagaggcttgggggtagaatgagaagattcttagggattggtgttgatgagtggtgtagggattacttaatttggtgggaggtttgttatcagtccaaatttttggggggtttgggcattgggaatctcatattaaaaaacttatctctactaggaaaatagttctgatatttcttcatgaaattctctatggtatagggtgataaacaatatccatggatgtcaaagaaacgactgggatgcccttgttggaagatacacaattcactaaagtccttcgaaatccattttcctaatctaccctttgtttaccccactcatcggtacatgtgggaaatggaactagagtattgtttttggaagatatttggttgggaaatcaaccacttgccacaaaattcgctcggctttacgagttatctgctagagacacactacccatgtctctagttttgctgttaatatcgagggaagaactatcttgaaatttcattttaatcgtaagatagggagacttctgatatgttaaacttattgaccatgcttgaacccatacatattacttgccaactagatagacattcatggattcttcaaccttctagttaacacaatttcatattgcaagatattttggaaagctatagttccttccaagataaaggtatttccatggacttttatcaaccaaagacgcaacaataatgacttgcttcaaattcattgcgctcatcgtgctttgtctcctaatatatacgttttgtgcttcagagatggtgagattcattcccacttgtttccacaccacaccatggcctagaattatggactgatctgatgaataagtttcacctctactggtggcaccttttacagtcaatagttttatgacttcttgtatctagggggttggcatgagaaaagaggctacgacactattgcaagatgctatttttgcaggtatttgctgtatttgtgtagcaaggaatcaccgaaattttcttgatcgggcaatgtccttccatgagctgaatgagagggtcactttatggcttccctttgagcaaaagcacataggcatttcccgaacataaatgtcttagagttccattgtaattggggtactatcatttagagtaaaggggagagatcttttgcacacattgttttgacttttttattctatttatgttttcaggaggatgtcttgttctccatttttataacttattttctttttcttacacctttaataaagcttcttcttttattaaaagaaactttaattttataaaacattagaatatgttaaggactactcacttgtaatgttaaatttaaaattttcgaagaaagactaaaacttccttaaaatcctattcaattcaaaatatcgaataaatatctataaagaagaagcttgtagagaaaacatattaaccatagatgaggaggggcagctgcatggctaatcgttgtttcatgtgcaaaactaatgaggaatcgtgtaatcatttgttgatgtggtgtccgctgacttacgatttatggacaatgatttatggacttttgagaataaaatgggcaatagcaggttccgtgaaagctgaaatataggcatggactggtttgtgcaaaaagagaaataacttaatgcttattcttttatcggttttatgggtaatgtggaaggaaagaaattcaagaacttttgaggggattgagaaagatttcaattgtattaagaatagatggattcatacttttggttttctattattgggtcaatgatatttcggatttaaacgaaattgaaatagtgttagatcatttaatagagatgtaaatgctgtgtaattgggtggtactcccttggtaccgattttataatacaatttcttttatttaaaaaatataatacatatgcatatcgataagaagagtaataaatgatctatgtgatctaagggggtatctaggtagtatcactgatcaaactccaatttgtaaataattaaactttttgggactaaatatgaaaatatgaaactaatttagtttattactcctaaaattcatcatgtttataccacataaattttaatatgaaaattatttgcataaagaataaccaactttagggactcattctcctagcacagaccaaattgataaatgaatctcatatacctataactagatatatagaactacaattagaaaaaaaggaattaatcaaatagtagagggatatttgagagcctaaaggcttgcggttcgcatttttccctgtaagactaagtatttaaaattcattaatctcttgattttcataccaatcacgcaatcttagtatttaaggaaagcttatgatatgcatttaatagttacatttgcttggtaactgaaagttgacttgaaaaattgaaaaaggttggaatttactgttgttgcaattaacattcttcccgtagccttaaatattcaaaaattcataactctgtcaattttcatttaaatcatgcaatcttggtgtctgtaaaaagtttatgatatgtacattatagtaacatatatttggcagactgaaaattggccagaaaattggaaaacagccagaaacctactgttgcagtgattcatgtttttctagtcctaaattttcaaaactttataactttcttaattcttatctaaatcatgtaatattggtatttatagaaagcttatagtatttagattgtagttacacagatttggttcccgaaaagtggttgaaaaaagcgcataatcgctgaaaaggccactgccaaaatctttgcttttgttttcttcttccagctagttactatatataaatatgctacggacttaaatcccagattgggtttaagtttttacctttgttattgctgcttatgtcattcttcttctcttttcttttctctttgactcttaggttctccaggattttctttcagattaactcctaataaataactagacacacacacatgcatatatagaggatgactatctcccataagataaaaaaaatccttacaatttatggtaaattctaaaataacccctaaacttcataaataataatatgggtactctttggtccataattaattaataattaattgttcttctgaaatgggcattgtaatatgacaagcctttttcatcttttagaatctggggttctgtctaatcatccagactgtcaaatttggtcttttgagtcttgatattcatattcttgcaagtccttacttggatttcttcatgcacaatcctaccactgagattgatatccttaacaaatcgctgtgaaaggtatccatcctctataaggttaattttttgggttgggcaatggctcaaagtaggcctaatgcatgacgtgcttcaagctcgtagtcagaattttgccttgttaattggggtccatgtgatttgttatagagatgctgagaatcatgaaattttcttcttgaattgtgaagtggcctgtgaaatttggtcctatggtttctatatttttggtgctctctttggtgttctctgggttgggtttcttgcttcaaatttgaaggttctgaggaggaagagggagaattattttatttggagcaggatttctttgctggtttgtagggattttgtttagatcagagtgctagaatttttttggaattacaattcaacttttctggttctttgggataaagctcgtttatagcatctgttgaggtttcaatttttactatttgtgtttgctacaccttctggcatcacggaaggggttttccggggatgataaggtgcagtggaatttggaaaaaggtggtaacttttctgttaagtcttattttaagcacttaacaaaatggaacaatgttttgagaccaaatttcctaatgagacagatttggaaagcaaaggttactccaagagtcgcattttctgcttgggaagtttgcagggaatgcattttgacgatagacaaattaaaaacaagagggctggctattccaaacagatgctatatgtgtatgcaggatgaagaatcatgtaaccatatattgttgaggtgtcctgtcgcttttggtctttggagtctaatttacagccttgttggtattagttgggtgatgatggggtctattagggaggaattgtgggcatgggaggatatgtatttagagaatagattaattaacttattccattgaccagtttttgggttctttggaaagaaaggaattttataacttttgagagtaaagagactgatttgtatagatggagagatagatggatgcattattttgagtttattttactaggacatgacatgattagtgatatggattttaggaatgtcataaattcactaactacattgtaaagtttatgtaaatgggtggtacccccagtttcatggtaccatgttagtatattttcttacactttttatttaaggatacttcatcagttttgtccatagattgacatgctattctgtataatgattggctaccttttctctttttctttttcctctctctctccctctctctctctctctcttctaggagatacctaatcctttttgttctactttcttgtttttttatttttctgtaaaagaagaaattgttttaaggaagagagggaaaaaactataaaaatggagaataagacatcctccccaataacctataaaactaaaaagcccaagcttactgtgctgaaaacgattctctattccctatgtataattgcctctagttatgatagagctctagaagactaattttagggtaatgttcatgtgcttctgcccataagggattcattctcccagcactacccctgtttccactcttgtttctgccaccatcagtgccacgatcacacttgacattaccaccaccaccactaccattatcatctccaccactattagaactgccactaccacaaccaccattattataaatatgaattaaggaaagagtaatatgatattgcaatcatattaatctcattatccagtcatataatagaacaaaaatgttacacatagaagcttatgtttacctacccaattaccctaatctaccatatccaagatttattttccctttgttcatttggagttaaattaaaatgttgaggaaaatgctactttgaggaacatacatgaatgtaggagaactttatatttcaatgcattgaattgcataatataagcacctctttagaagtcatgtatccctttcataatctaattttttcacaggtctgtca

SEQ ID NO: 8498 - DNA, 1149 bp, Carica papaya
  Intron number 2 from transcript evm.model.supercontig_58.5 2 (locus evm.TU.supercontig_58.52) derived from phytozome v7.0 (chr-ID supercontig_58; pos 587594 to 588742 reverse strand)
ttttggcgcgcaggtaatcggtgacataatagtattctgtagtagtgctgctgttgctgacaatgtatttataattaggggaaattagatgtctaaaattgatactgcgtttaacttaaaaaaatgtgcctttttatttttaatgaaaacgttttcttcttctcattttctgaattcgtatatgcttatagttatcacttcctaattcatatatgcttatagttacgaataaaaaattgtatgatattttcaaatgaatgtaatatacttcaaaatatttttcttgctaacagaggagcctatgtgtaaattcaattgcacatgctaatgatccttaagttatataattttcaggtataaaacaatcatttttgttttgtttttgattttccttaaacttaaaactattgaagctaaagttcaaaagtagttcaaaattacctggagcaaatagttatatattctcttcaagaatgatgtctccattagcttttcaatttcatatttttattatattcttccattaactttttattttgattgacagatgtggtttaggtagtttagttactttaataatcatgtatgagctgatgcaccaaatcagaattttttagaaatccatgacttgatttataatcatacctaaaacttataccctcttaattgtctctctgttgttatgagaaaaagatgcaaaaatgccataactttgataggttggttggtcatctgattcttttcctgcagacctatagtagttttagtctagtgaaatgctaactgtctgtatgcgcagccttgttttatttatatttgtttaacatctctactttctagagctgttggtttgaagttcaatgactgaagtgctctgcttttcataacctaatgtggctgcatgatgccttgtgaatattttgaatatctggctctgagttggcccttgtatggagaagattcctcttgcatggttaaaagtgtttaaattcatgtccgagattgcttgatcatttcctcataaaagcatcgtatgattacagatattagatgagttggacttatacatagttatatttatccctttttacaggaacttgtgtgtataatctaattgttctctttacctgcagatacgtcaaaaacttg

SEQ ID NO: 8499 - DNA, 3487 bp, Carica papaya
  Intron number 3 from transcript evm.model.supercontig_57.3 1 (locus evm.TU.supercontig_57.31) derived from phytozome v7.0 (chr-ID supercontig_57; pos 483959 to 487445 reverse strand)
ttgaagaccgagtcattattgccccactattaaaagtttgtagtttgctcgaccatgaccaatttctttcctttttgtttggcaaagatttctgatattgaatttataattttatctcatggagtgaatgagctaactagttgcttctagaggctctttcttctaaatggagtgcatttagagcgaactagaatcgttttggttgctgtggatactggtcaaggcacataatttagaaggttcagagatttaaggaattttgtcttataaatagaacctcctgcattgaattttgcatgcaagagatatttatctttgatgccaagtgtggtaattaaatgcatggtgttgggttcaaactcctcatttgcttataatgcttttaatattaatcattatctacttttacttgcacattattcttctttttgcataagacaattaagagtttattaaactttagatatcacatctgtgaattggtataaaagcatagaaaaataaactagtcacagctagaatctcttaagcattacacctaaatgtgagggtctcttaagcatcatagtaaagttgatttgtattacaaacaatcctcgcgataagttgtttactaaaatgcataatctcaaaagtacaattagaaaggtatttacaatgctgatataaaaaccatagtctaaatataattaaacaatcgtaatagagaacttaataattaaaagaacaaaatcctaaagtctctaaattatatttatggactgctcaataatataatagttctagattttaaaagtatgatttgtaatctattctagttcacattcattctgcatcattctctctttgttaaagttttttttgtgaattttgaagtagtggatgatgtaaatctttgatcttggagctttgaataaaaaattagcaaactttgcaattagtctgtaaggggtgaggacccaagcccaacattccacacatcaaatataccacctgcagagcctatgaagcctctaaaggtgtacaagaggcgtcctcaatccctaaagctatccaaatgactggttaccaggttagcagtataaaattctcatcactacagttaattgccagtcttagctaattttaggattcggtactagtggtccttgcagatatactgcctctgccagatttgattttcttttttgcttttctgttttatttttctgatttgttttttgctgtcatttctcttatttgaggccgaatcattagtaagggatagaaaaggctagaatatagcaactcaaaactcttatgcatttacagatttcaattaccagaaaattctctgtctttctccttttcctctcttcttcctctcttcttcctctcttttctcactcgtttctctctcatttctctatttcttcttctttctactgctactcaactattcttcaccctaatccttggttgagtatatgtgtaaggaacttgacaactcatccttgtcaaaagcaaaaacaatgcaaaaaataattggttaggagtgtgaaacactgtagacaagatggaaacagcaaatggagaaattagtgtgttatgatccttgagttgaatatctatagacaattgttgacttgtgtttctctttgcgcaaaacatccatgctttaggtaaatgatcttgagcaatctctaactcgttgttttcatttggtaattcttcttcttgctccttcatttcatcatttgccttcatgataagatcacatagttcaaaagtagttacttctgcaatttggatattttgggcagtttgcccagcttgtcctatacacatacttcaaagttcttccagaagtgcattggttatgctttccactatctctaatctcatgctcaaggtatttaattgtgcttgaacagcttattttgcatgtaattcgcgtcagtcactattagaactcaagaaaagatcaaaagcaaaacagaattggtcataccagcatggatggattagaagagtgcataaccagtctgattaaggtacgaagcaatatgttcaaactcggttacacaaaaaaaaaaagagtttaaaacaaagcacatctaatgaagttcatccttgagttgactgcttcggacaacatgtggccctcctatcacagaaggatgttggtattggcggttaacttatttggataagggggttacagataagggtttagtaagagctcttcctaaacagtgatatgtaggtctagcaaaatttaacacaaccgtatggggcacagaattggatgagtttaagtttaatctaaataggtttgagtattaatgagttaaaacccatttagagtcgttaggaaattggttctaaacaggttaaatctacataaccccatttgggcatgtttgactggtcaatatgttaatctcattaatatatttgatccactaaatatatgtatatataaatatacatatatcatcatatatttgtgttaagagatacataatagaatatatatcatatatacgataggatatatataaatttaatacacatgttaaacaagttaattcaagtttctgattgcttaaaactcatttaacattttatagaaaacatatcaggtgatctaaataggttgctatcttgtaaacatattgtgtatggttttagagatcataaatagtttattatgcggtatctgtatggttagagatagtaatcttttgtagcaggtattattacagcctgtttagacacaattcacaaattttgccccctcaagtggcatgttattttaatttggtcttttatggcagagctttgtatgtaggccagtcaagagtccttagtgctgcaggtagaggctatgtcgaaagttgcactttggtttatggtgatctggcagctgattttttttggggcttaagaactttaacttcatactgattgatttaggacacatactgtttacctattcagtggtttgggttaaatttaaggattcttggatatcacacctagaattggggtagaaaacaaaagaataattagcagtaacacctagaatcccttaattgtcagacctaatctgagagttccttaagcatcaccctaagagttgattttatcacacaaccaagctattgagagaattgtcatgatatttttaattccataaaattgaagttcaaagttatgcttaaagtacaaaatactaatccaacaaataattaaaaggatataatagaaaacttaatagttaagaataaaatcctaaagctactaatattataataatacacttctaaagaatacaataattctatatttaaaaaaatataattcttaatctatttagaaagtctagctcatattcactcttcatcatttccaaccatagttgacatcttgtgactatgagtttatgttctgttgtcattgatatacaggagaaagcagctgaagttgttaaacttttatccga

SEQ ID NO: 8500 - DNA, 1680 bp, Carica papaya
  Intron number 7 from transcript evm.model.supercontig_96.2 8 (locus evm.TU.supercontig_96.28) derived from phytozome v7.0 (chr-ID supercontig_96; pos 437168 to 438847 reverse strand)
tcagacgcggtaaagtttctgtattactggaaatttttcatcctataattctagcttaactattgagacagattgtgtctgctgttctgatggtcctcttgctatagctggtttctattacatagtggaactgttgtgagtaaaactgatgatggaggttaactggtttacaatttgctttattggaatatttcattggaatattccaatttgcttattgacctaattgaacagattttaaactgggattccgtttccttttcatcctggcttactgtctgagtaggttcttaactgttcatttatttacataagccatttttcacagggtgggaatattaaaaaagaaaagaaaaaatgaaatgaaaagaggcattgaatgtaatccgttttatggcaccctttttagaaccattttatggtacttaaaaaagccgagggagtatattaatggttttttctttgcaaattacttgtggttcctcttccttaacttttctttgtagctttactgctatcatacttttaacctctctcgaatacatattatcaatttaaacaaactctttttgaccaagcttttgtccttattaattctgtttctattgtccgagtagccatattacttgtagcccacttcttttctagttgatgcttttatgttcttgcatctatccagcatctgagatgagctttaagaaggagattttttaactcttttcacctcagggttctgcgtttctacagtttaccttaacaaataactattctgttacactcgaagtgttgatgctgaattagtaagtgaagtatacacctgttgatttttcagtatgttcacaatatgtttgaattaaaagaattttacaaaaaaaaattgtgaagttcgttgtcatgtcccattttatatggaagtagcccaaatgataagattcgtcctgagacgaattttatctcgaagtgatctagtatagttacaatctatcaaatttgatgaattttggaacttgacttcaaactgtggagataagctaaaattacctttatatctctgaaatgaatttgatggtggtttcccttgtgggtttatgagttgaattaagcgttaaagtgaaaaaatcaaatttaattgaagttaaatatgttttaaatgcagaaagttaatggaatttcacaacatatattaaaatatcatgatttgatctaacataaaattttgttctctaaataaatttattattcgattcatttataaatgaatgaaactttatagttttgtttctccaaacaaaggcttggttggtctgcttttggaattcttttgatttactagaagatatgttttaaatgcagaaatttaattgaatttcacaacatatattaaaatttcatgatttgatctagcataaaaaaattttctctaaataaatttattattcaattcatttgtatttagaattaaacttcatagttttgttgctccaagcaaaggattggttggtctgcttttggaattcttttgatttactagaagactttgaagctgcctatatgctaatgtgcataggattcttatatttgtgataaaaggatgccactgttcctccaatgctgtaatattaatttttttaataatttcatttaggtaaacctgttgacacatacaactaaggtgaacat

SEQ ID NO: 8501 - DNA, 4183 bp, Carica papaya
  Intron number 3 from transcript evm.model.supercontig_73.9 3 (locus evm.TU.supercontig_73.93) derived from phytozome v7.0 (chr-ID supercontig_73; pos 1380602 to 1384784)
agcaggcactggttgaagtgtctattttgacaacggtaattaaattctgtattagcttcttatttcttgtttcaaaagatattgtcgctgtgatacaggaaggacaaagaaatatgtaaggttcttatgtgggcatcaaactactaggggaataggtagtttatggatcatgtagtgggcaatgtaagattttgtgccttcagttgaagaattttttttttttcaaaaaaaagttaaaaggcaaagctgtggaagatctgaaatttggagaagcaggattgcatgtgctgtcatgtggaaatcccaagatctttaactcttgtgaaataaatagagtgccagtgcaatactggagttgcctctcttgtaaaacctccaattattaagtgaagagaataagagagaaaagagcaatactttagaaaaaataaggataccgaaggattaccattgttagaattcttaggacacttataggacttgttgtgagggacgtggcgagctggtggttctttccaattcaagcaattccgtattagatgtcagggtttgacattgctagttttgagaatgttggtgaacatcagggtattcctaaatttaaagattattgataatgattagatgcatatattgttagctttctataaaggcaactagttccaaaccatgagtttcttgggttgattagaggccttgggacgagagccttttgcttgggaggtcaagttgattgggacttggtccccaagggatgagtggaatctctagggttggacgttgaggaaaattcgttatcaataggctgtattgggttgggagctgtctttaggtgtgcggaatcatttggggggcggccccacaaatattctgccacatgctactttaaagtgacataatttatggttaagtcttagtgcgagtgttatctcttagaacacgtagcatccatttagggagggggaaaaaatgtgcgccatactaaattactagtagccagactcaaagtggcttgatctaacaggtcaatactgatggttgtcccttaggacaccacgtgtccattggggataggcatagtagccatgttattagattagaaggaaataacaaggaagatctaagaagaaatagaacaaagaagatacagttgttaaccattgcagctaatgctcttatgcatccctagtgtatgataccccaatcctatatcgaaaagatatataattgttgagttcaatataagatttcaaatcactcactatctgtaatatgggtttagccttttgaggactagtagtttggatccgagaagttgttggactagtaatgcttgtgtttgggactttataaatggtatcagagcacatggtagtccgatgattccgcctggtacgatcttggactttataaatggtatcagagcttgtgatatgtgattgtgtgatgtgtgtgcttgatgaggacatcaaagatgtgagtgttgaaggttataatccaatcctacatcaaaaaaatatatgattgttgaactccatataaaagctcaagtctcacgctaccaataggttgcacttaaacttttgaaggccagtagtttggttcgagaagttgttgggctagtggtagttgtgccgagggtgttatacaatgaaggtggatacatcatatattcttgtgatagagatttgatattcttcattcttgtatcacatttaaatttaagagtggttagttatgtaggtgatgtagagtagaaagatcttaaagtggacatttttataataagatatatttatgtagttttaatgtttgtgtgttatttaggtacctagattatctaggactagtagctattttttttttgagataaaaagatgtatattatttatatgacaccaagggggtgtcttctctatacaaaagaatttacaaattggttagtgcatcaataactctcccaaaatcatcccacctatacacgtcatgacccagaattagaatctcaaaagcatgaagtcatctatctctaattctacaatatctctcatgcaccgaaagttttattgttcatttctttccatacaacccaaaaaatagacaatggaatcattttaacaaacttattactacttctaatcccaaccccatgcccacaattcatctttcaccatacccccagtcatccaatttataccaaatagactataaaccatagaccataaactattagtcattaggcaccaaataagaacatggttgcaagattctgcagcattcacacaaagatagcacctgttggctataatgtgcccccttctcatcaacttgttaatagtgagaatacattcctgacatgcttcccaagcaaaaaagtgatcgtgatggcacatttgctttccatatctattgaattgggaattgtttaccattatcctctttggatgtcaaaaggtcatagaagcatttcacagtgaaattgccatctttcttgaatttccaagtaggcttatcgttgtccgaacccacttgaacatccgtgagaacttgtagaagccttgtaaattcatcaatctcacaatcattcaaatttctaaccaggactagtagctacacacttataatgggaaaagtttactacctatttagttagaatccttttattctcttttataggttattcaaattaattagtctatttttctattttctagaattactagataggtttaagaatttctattttgattgtatgttgatgcctataaataaggtactttagtgtagccatttggtagactatttcatgattattatttaaatatttagttatgatttgattactgagtttcaagatctccaattttggtttttaattacttcttttagtgttattgtcttttgaaataaagagtaaagtattcacaagaaccaaaggggttacatgtcaattaaaatgtaaatcaaaatgtaaaaaaatattttctcgtagtgtttatgttcaagctttatttgacttgcatcaattgatatcaacaaagaccatggccgtgtaaactcgccaaatgagatgtgtactacttgggtctgcaaaactgatctccataattgactgcacctattaatccgaaattaagatagctggcagtagcaatatgggtttttagaagaaaaaaggaatatatatgtataaaaaaggcatctagcaccacccagccacaaaaactttacatataagttagaatatctattagatccctagatcccctctagaagaaagaggatgatccttaaaccaaaaatccattgtttggaactgtaaatttctagctcttctgaaggaaaaaagtaagcccttaaaatccctgctatttatttgcttccaaatgatccacatagtggttgggggatgggaaagatgagttttcccttgtggtcattaccttggatgtcctactttgcctagatctctttggccacataatttgccatcaaacttttatttcaaaaagaaaagaaaaaattgccattaattaactcataccgaggaatggcagcataagacggtctggtgtcttagctgccctctggtacaagacactctttttagcccccttttgaagattgtaaacagtaaattctctctcactgtttccaaagcaaaaaaaaaaaaatcaattctagaaggacactttaatgttctggatacttatttcaaaaaaacaaaggaaaaagaaaactttaagcttctggatgcacttccataggggtcactctgagacgagccaaattgagcaagatgcaaatagaagatttcaaccaggaaggaaccattagttccaacttcaaattggttcatcatttccatcaaggagaattgagtgggtaagatgctgaaggagaccaacatatttatcaacctctgaatgtttcaggtttggcagcagcaagtacgtcaagaatgctttttccagaaaattctaacaaacttgacagaaaaagtctctgtcaatattcctaagaagctgagaccctcaaatctatacctagattgtttagtgcccgtgtaaaatattccaaaaacaaatcaccgtaatcttttatcggctttttgatatgtttttaatgaagttgatttaatgttctgctcaaaagtttatttttttgcagttaaacaagaagt

SEQ ID NO: 8502 - DNA, 1519 bp, Carica papaya
  Intron number 5 from transcript evm.model.supercontig_113. 41 (locus evm.TU.supercontig_113.41) derived from phytozom e v7.0 (chr-ID supercontig_113; pos 539958 to 541476 rever se strand)
aaatcaaagccctattagcccccattaacaaacaggtttgtttatattagtctcccctgcatctcttcttctttgtcatttaaattgtgtcatcatcataaactacaaacacacagaacacagtgggtgagtttttgtttaagcgttcttttcatgccattagcttttcagtttctatgctgaaaacccatcacgttttctatcagctttatatcatttacttgccatttcttgcctgctcagtagcagtccaaactgaaagcacagagagggaaagagagagagagagagagagagagagagagagagaaggttagcaagtaaaagtggcctatttatgtatatatgtaaatctatgttaagacttttgatatgtttagatttcactgtctttggtttttgcagtttttgtttagtaatgattgttgaaaactttctgatttttgttcactcctgtcagtgccagcaatgtagatgattagagttttcctgtacgctcactcaccccattctgtacagtttagaatgttcttttctgctgccatttttccttaacccaccactaactgatgttactcttaaaaaagattcttttccttttcttttcccatttaatgtttttcagtgtttccattaataatcagtccttatctggttgtatgctcaggtaacatcataattttgaagatgtagttcttacctgtttctgattatgatcagcaaataaattgatttttggctgttgaagccaagttttagtggtgtggatgaattgaagttgacatgatttgatgagtgtcctcgttgtttttgacacttttcgggactttcttgttttttattgtacttcaaagaatctctctattacttcattttttgcagttccatgaatttaagcttttgctatctaatcttgttccttcttcagcttaccattatatatattgtcaaatatagttatcatctaggaaatcaagagggcattaccaagtagagagaagttgcaagtgtatatcttgtaggaaaatcttacgaaatgctgattgattgtgcttgaagaagagcctaatgttattatgccaattcaatgaaattaacagattccacgtaaaattttagttaaatgaagttggaagaaagcaaaaaaagcggatccaactgaaatttcaatcgacattctctgtaagggaataatatttcctcagcatttctactcaatcatgactagtaattttgtttgttttcgagtcatgttgatgtttatctaaattcagccttagtttgttggaattatcatatgcaatgaactatgaattagcaagttgtcaagtgtctgtcctccttaaccaaaaacaagtgtcaaaacaaccctaattcaattgtcatttcatttcatgattcgaaagacttacattctattgattttatctgccaagccctttcattgaatctaattctgttatccatctttcttctgtaaaatattaattatcattcttattaaatcttttcaggaact

SEQ ID NO: 8503 - DNA, 6917 bp, Carica papaya
  Intron number 9 from transcript evm.model.supercontig_7.15 3 (locus evm.TU.supercontig_7.153) derived from phytozome v7.0 (chr-ID supercontig_7; pos 1485955 to 1492871)
ctttcaggttggttcttcttttgttacttttatgtgtttgtttttccctcttccatctccatttaagttgtttgtttgtaataaattcagaaggttgaggctttggcactagtaagcttatgaaaagtcttgcaaagatagaaaatataagagacaattaggcatgttttgttatagaaaagtgtttttcatagtagttgttaagatttaaaaacaatatttagaaatagattttttttttttttaaatttggaataaaaattgttttagatctcttatttcaaaagaaaaaatttagatctcaaggtgtggaacaagcagagctgtaatgtctgggttttgtgcaaaaagtgaagcagtgaagagatgtgatgtggaaggctgggagggcttcacatgaaaaagcttcaatacctgaaatctttttgcaaatgattttggctttctcctttggaaccttattctttgtagcatagggtggttgggaaagtttataccgtgaggagtggttcaaattagaaagctaggagtaccacaagtcacacaagcctctgaaaggcaatctcccagcttcctgatctcgtcattctctagctcgagggctggtggtaattcctgcatttttttgatagaattttttatcgtgatctttcccttgctagcctttttctacaccatgataatcttttgtcgtaccataatccttctatctatcccttcattcatcaacttgacagacacctcgtagaatgtcctcttctttaggaacattttttttttttccttctaaaataaaagtggtgtatgtattgatgtaaaggtgccaaggcggcaccatctattacaaaattatttacaagtcaattaaactgtcgatgacaaaaccaaagtcatctaaacagtcaatattattccccaaaacagtggagccaaaaaaaagaaaccaactgttagtgataatactaaagtcagcttctttgtcttcaaatgcttgattgtttctctttttcgataatacccagaagatagtgataggaattagtctgagggttttccttccttagtgacagaaccacttgtaacccaagaaagacccatgagacccaaaacagtgggaccaaagcatgtgagagaccgaacaactaaagaggagatggtagcatgattcaaggttgtttttacagagatagcaactattaacagagatgatccccctcgtcattaagttatccatagttaggattcgttcctttgctgcttcccatgcaaagaaagacatccttggggtaacgcccgattgccatgtaagagcggatgggaacacattcttggattgattagcgtaacctgccaggaaattgtaaaaggttttgacagaaaaaaattcccttatttaggagattgtaatttgtcatcctgatttataatcgtaattttagccaataactgcagtagggatttataatcaccaatttcccaatcatgtagattcctaagaactgtaacctgccagagcccctgagaattctggtcaatggcatctctgaccagtaagtgtttttccttagcaatattgtaaatgcgagggaatctagcttgaagagccatctttccaatccaaatatcagaccagaaatggattttgtagcccctcccgagaatccagctagaattatgcaggatagtgttgttgagattcaatatacttttccatagataagtgccaaagcagctgttgttaattttggatgaatcatggtagttgcccttaaaccatttgcacatgatgactgatttccacaagcagttatcctcattctagaatctccatatctatttaccgaggagggcattgttgagtttattagttgatcttaaacccaaacctccttccttaataggtttttttgatctacttccaattaaccaaatgtatgttcttgttgttgttgtcccttttgctccatagaaaattaaattggatcgtttccaatttgttagcaacactaatgggtattttaagcgttgacatgtaataaataaggataatggatagagtgcttttgatgagaatgagcctacctcatttggagaagaattttctctaccaattggcaagacgactttggaacatatcgatgactaggtcccaacattttctgtctttatgtttagctccaagaggaaccctgagataggtgatgggaagatttgaaagtctgcagtccaaaacttgcgcaagagaagtcccatatgagtttcttgaaaccaccaatttagatttgtgaagattgattttgagtatggagatagcctgaaaacagagtggaatgcatctcaaaaaaattagggagtggacaactgtttggctgaagattaatgtgtcgtctgcaaagaaaagatgtattatctccacatgttcttattgctaccaattgtgatcccttttaagagctgtgaatcctttgctttcttgagtaatttgtttagggctttcataagtataataaaaagcaagggagagaggaggtccccttgtcttaaacctacagtgaaaatttttgaaggatcaccattcacaatgactgcaaagctggcagaagaaatgcatgttctgattcaacgtccccatttgttgtcaaacccacaccttttgacgcatgtaatcaatgagatcccaattgatatgatcaaatatcttttccatatttaatttgcataaggctccaagcttattgttcctgataatctcgtcaacagtttcatttgcaatgagaataacatcagtgatctgtctaccaaaaacaaagacgttatgagaattgccgattattttgtgaagaacagaagttagtctcttggccaacacttcagatagaagtttgtagatgcagctaataagattgataggctggaaattagatatattggatggattgactttctcaagaatcataactagaaaagtagagttgagagatttacaaaggagccatactcatggaagtccttgaagaaatccaagatgtcactctaacaatatccccaaaactctgtaagaatttggcctcggggctttatccccatcacaatcctgcaaacactcaaggatctttgcctcagtgaagtctctttctaggtcgcatttatcatcagcattgattatgttaaaggataactcatctggttttggtcgggagtgaatgttttcagagtaaagcttatggaaataattactagctctcaatctcaatttttcattacttttaagagtgttgccgtcaatgttgagttttccaatgaaattaactcgtgtctggtgattggccaacatatgaaaatatttagagttcaaatccctgtctttgagccattttttctgggatttttgtttccaagaagtggcctttatttgaagtttttgtgctaaattgactttgagagagtttctcttgtctcggtcgctgggggagaagcagttgtccgcttccaatttatcaagtaaagcaatttcatcaataatgttattagttccctcttcttcctgtttgcctgtgacttgacccaatatttgattttcgatttcaatcttttgaacttgtggacaagttgataattggctatacccttaacatgagagctcttccatgtattggaaacaagggtcttgaaactatcaagcttgattcatttgttatcaagttggaagaggacaagactccattgtataccatcaaagaccaagataatttgaaaatggtcggagattgtcctagccacgattttttgtataatgtttggcatagtttctaaaaaataaggagagatgagaaatatgtcaatccttggaaatgaaggttgttctcgttggttgctccaagtccatttaccaccatgtagaggtagatccattaaatcaagatcggaaaaaagagattgaaattccataattttttaatccaagcaattgtgccccgatctttcgatcgtctcagtaccatactaaaatcaccatcaatgattcctttgttaccccatgtttgttggatttgttcaagctccattctcaacatattacattcattgttgttgcgtttgcaataaatatccgaaaaataccaagattctctgttagataaactagagaaaagacaagaaagagtgacatcaccagggatgttgtttaagcaattaacacggtcttttctccacataattaagatgccatccgcagaccctttggctggaagagctaaccagccaatattgttcatgctccaaaggtttttgaagatcttttcatttaaagaacttatctttgtctcttgcaagcaaacaatggaggggtttccatctatttatgcaacatttgatgatgcttcttctccaaatgtcgttgagactccttacgtaccaagagagtatcttatcaatcatcaagtagacaatgagcttcctccgcactctttattttttctgtttcttccttcatagttgatagaagattgaagcctctttagttctcttgaaacccattctttctgtttcttgttgccatcttcaatcagcagtgggtccattcttctttttttcttcattctccactaactcagccaaaattgagtgaatactattttcaaaaccaccaaaaggtgtgccaagtatcttgctgacatcgaaaatattattgagaatccatttggagtagatttgagagtcacaacttatatttccctgaagagcacgttcgagagagttgaatatttctgtcaagttgtttctatccactactgaaagaggtccaggagactgaatctgaatctcgatcaattccattccattgagagggagtagctgtttttcaataattatttccaggctgcttgggttatgggtttgagatcacatgtttgagttgaacacataagcagccatgtctctgttttcttgtttctataagtcaggacttgaggaagaaaatacagttgagctgacctttatttcttttctgttggcttgctcggctgggtttttttattctccattcccattttaccttcttcattttcttctttgggctggcagattttggagtgggtttacttgggccagcctggtcgacccatttacctttttcagcccagaaaaatttgggtttcacccggttgtcatgtgtaatccgtttctctctgttaaccctggtgggccggctcaccatggtaggaacttaaatgactctgagtaaagatttttgcattctttccttcatttccttgagccttttagtgtctcccctcatcccggttgcagaagttagaccacctttgatttgtcgatacacttggaagttgctttttccttatcttgctcataattctagttgccaaaatgaatctttttggaagactaaatttttctttaagataaggtttttgtttgaacagttgttcttaatagggtaaattacccttttgcacagagaaaattgttcatagatctaggcttgtggagaatgttgaaaggatggattttcccttcatgacaatgattgacttgctcctattaatgttaattgacaatcaacaaagaattgtggattgtctgaaattatcattgattttcaatgctggtctgatgattgcacaaggattagtgcttgacataggaggataggactttgtcagatgctacgtatgtcagcccatagagaatgtgcattcttccatagctatgcaattttatgggcgtgtgccatggctatgtaaccttctggatgcaaatatgtgagcgctgatagcaggcagcttgccaattttagacatttttctctgttttttgttttttgttttttttggtttttttggctttggttgttcctcaacttagcatgatgggattatcgtagtttcaaaagacaattctgttagatatcatagttgaaccttagtactgtgggtcccaagtcatttggtctctctctctctctctcttctctaactttagaaacctttgcttgcaccttctagtgaaagaaagaacgagcaaccttcttctcttcactggtacaccagtggtggaaaaatggatcaatataaattatgttggcttatagcttatattcagagaatttactattaaaaaatgcaccaactccacccaagtgatgatgaattgtcgttttatcttggtgcagttaattgcgggtttgctaggggtgtgagaaatgaagccccctgagttttcttctgtgtatgtagcaaaaatcttagttgtaagaagtggatcttgacatagtggaaaactttggaggttgctccatgaggcatattgcgaaactatgttaaaattctttgtgttgtttctatggctattgcttttactttaatctgtgtgcattgcatgggtaatgccacaagaaactaagaggtttggtgaaaaagtaaactcaaaatttcagcttgagactgatcaccacaagttgtattaatatagtgatctgctgcaccaataaaaaagtctataaattgggcctttctgcaatgcccataagtctatatctgccttgtttttgtttgggtttgtgtttgttttcacttgtcatttcacttgcatgtgtgaaggattggagatgtgctaaagcataaatatcaaagttgagcttcttcctgtcaacttaactttttagcataaggtcatccaactcaattatttgacagttgtgaaatctggtagtaatatcgatgaatgaaaggactaatttattgatgaatgaaactgtttgttactgattatattccctgcagttaggaacttctgaaacattctttattgactactggcacactaaagataaatttttgtttattgcatgggttatttccatggacagcggtcacttgcttcatatatcaaaagat

SEQ ID NO: 8504 - DNA, 7144 bp, Carica papaya
  Intron number 3 from transcript evm.model.supercontig_87.7 7 (locus evm.TU.supercontig_87.77) derived from phytozome v7.0 (chr-ID supercontig_87; pos 488471 to 495614)
tcttttctcagtttacgctcgttgttgctacacaggtttgaaaacaatgtatatatgctttcaggattattaataaatttttccatggtcattttttttatttgtctcaggttggaacttctccaaattgttttaaccgtaaccaagttgattgaagttcaaagttcctactctctaggtcaatgtgctatagtttttttgttaggtctgacatgctggtgcctgagagttatagtatagacacaatttttaggaccttttttttaaaataaaagtgtgaattgtattaattacatacaccaaggatgtgcaagagtccatgtacagagaatttacaaatcactaaacatatcaattagttcacctaagttctctaggaatacaaattttgtttcaaaatctacatgccaagagattggaaccatctatctctaatcttctagatgcttacctccatgccttcaaaaactctcctacttctttccttccaaatcaccacccagataattgtcattggaataagacccaaaaccttcttcattttcgctatactcttccatgcccatatttctccctttacagtgcctgccctgacctatttatagcccagaagcctaaaacctgtagacctcaagctatatgcaatggaacagcaagggagaactgtagaaaatataataattagaagaataaattaggattaaaaatagttatttacaattgttatgtgctgtaaatggatgaaccatttacaactgttatgtgctgtaaatggagggaatcaccaacaaatttcttacaacaaatttgtccttagaaacataattttgttaggtttctctccaaaatttgttaggttgttagggtagtagacttgtatatatatgtgtggaaatcattcatcaaaagaatgaaagaatattttctctcaattttcttcatggtatcagagccatacctgatccaaaaagaaattgatatcaaaccctgctgagccgtaataaaaatggcctcgggtgagcttccttcctctccaccagaagtttcctctggttcttatcatcacacagtaacaatcagatctgtgagtggactaccatcatcctgtatcacaggacataaactcgatggcagtaacttccttcaatggtcgtcgtctgttcgtctcttcatccacggaagggggcgttatgggcacctcactggcgagctcatgcctcctccagcgtccgctgcaaatgcacaaacctgagagattgaagacagtatggtcatgtcctggctcattacctcaatgactcctgaaatcggagagaatttccttctctacgaaactgctcatgatatttggaaggcagcataggaactctactccaacaagcaaaatacctctgcaatattcgaaatcgagtcaactcttcatgactttcgacaaggagaactcagtgtcacctagtattacagtatccttagtcgaaattggcagcagatggacaccttcgaagagcgtcactggaactgccccgaggatgcgaaaaacttcaaagtttttgtggaagaaaagcgagtcttcaaattcctgctagggctaaacaaaaatctcgacacgattcggggacgtgttctgagcactaaacccttaccgagtcttcgagaagttttttctgaggctcgacgcaaggagagccatcgaaagaacatgatgggagagaatgaccaacctcacaagactgaaaattcttcagctctcacaacccgagcgattgacaatcgaacgaagaagacaaggccctggtgcgaccactgtcgaaagttagggcacactcgggaacgttgctggaagcttcacggcaagccaagtgactggaaaccacctttgggtgagtgaaaaatgtcgaaagcagagacctccagcaaacttcgaggaaatcacgtgacggctgaggaagtaatttttgatgagatgggaaaagacccatttacccatgaacaattggaagccctccaataaatcttgtccaagaaatctcacccggtcagtgcctctgtgacacacaaaggtaatattcatggtttatatgctcttttagaaaaaggacaggtgcgggtggtagactatggagcatctgatcatatgagtagcgatttctcaatgttccaaaattacagaagatgtgaagaaaatatttcaatcagaattgcagatggttctctctcaaaagtggcaggaatgggctctgtaaatttgtctccaaatttgactctctgttcagttcttcatgttccgaatttggattgtaatttattgtctgtcagcaagctatgtgaagatttgaaatgtgctgcgaaatttgtttttaatatgtgtaattttcaggatttggactcggggaggacgattggcagtgctaagatgagctcgggattatatttgcttcaagtcaacacctctaaaagacaagctcacaatgcagtatgtgaaacatctgttcctatttcaaaaaataatgatcatgatattatgttgtggcactatagattaggacatccaaattttatgtacttaaaaaggatgtttccactactatttaaaagaaaagatccagtttcattacagtgtgaagtttgccaattttctaaacatgctaccatccaagtattaaaatccgacaatgcttgtgaatattttgaaaatactcttgaaaaatactttactaaacatgacattattcgtcaaatctcctacgttcatactccacagcaaaacggtatagccgaaagaaaaaacagacatattcttgaggttgctagatctctcatgttcaccacacatgtaccaaaatatctttggggagaggctgtccttacagctacctatttgattaatcggatgtcctcccgtactctacagtttcaatgatcatatactatcctctcaaaaatctttcatgattctcacatcttgaacactttgccacttaaagtatttgggtgtttagtatatgtccacattcataaacattttcgtagaaaattagacccaagagcaataaagtatatttttgttgggtactcagcaaataaaaaaggatacaaatatctagttccagaaacccgccgattttataataccatggacgtcaccttttttgagaatcaaccattttatcccaccactgatattcagggggagacattcactcaggaatatcagttgtgggatgtgtgtgtatcacctctctacctacaaaatccatcaccagacaaacctttcttggagattgaacccgaaacctcacaaaagaaatcagaatctaaacctgttatagaaagcacattacctgcaacgagtgagttacgtgtctatacaagaagaaacaaaggaaaagctcccgaatcatcctagcactgccatgaattccccactgatacaagtaacgtaatctctgtactaactcttgattctgttgattctaatattcctattgctttgaggaaggacattcgaacatgcaccaaacatcctatacaggactatgtttcattggacaaattatcctcggagcatcatgcttttgtgagcaggatagacagcagttcacctgaacccagaacaatacatgaggccttgaaaatttcaaaatggaagttagctgtcctacgtgagatcaggacacttaaaaagaatgagacatgagaactaactgatcttcctccaggaaagcgtcaagtgggatgcaaatgagtttttacaaccaaatataatccagatgggagtgtgacaggcttaaggcccgcttggtagccaaaggctatacacaatcatatggtatagattattaggagacgcttgcaccagttgcacaatactattcgagtactcctctcacttgcatctaaccttgactgaccactgtactaaacatgacattattcatcaaatctcctacgttcatactccacagcaaaacggtatagccgaaagaaaaaacagacatattcttgaggttactagatctctcatgttcaccacacatgtaccaaaatatctttggggagaggctgtccttacagctacttatttgattaatcggatgtcctcccgtactctacagtttcaatgatcatatactatcctctcaaaaatctttcatgattctcacatcttgaacactttgccacttaaagtatttgggtgtttagtatatgtccacattcataaacatttccgtagaaaattagatccaagagcaataaagtgtatttttgttgggtactcagcaaataaaaaaggatacaaatatctagtttcagaaacccgccgattttataataccatggacgtcaccttttttgagaatcaacaattttatcccaccactgatattcaaggggagacattcactcaggaatatcagttgtgggatgtgtgtgtatcacctctctacccacaaaatccatcaccagacaaacctttcttggagattgaacccgaaacctcacaaaagaaatcagaatctaaacctgttatagaaagcatattacctgcaacgagtgagttacgtgtctatacaagaagaaacaaaggaaaagcacccgaatcatcctagcactgccatgaattccccactgatccaggtaacgtaatctctgtactaactcttgattctgatattcctattgctttgaggaagggcactcgaacatgcaccaaacatcctatacaggactatgtttcattggacaaattatcctcggagcatcatgcttttgtgagcaggatagacagcagttcacctgaacccagaacaatacatgaggccttggaaattccagaatggaagttagctgtcctacatgagatcaggacacttaaaaagaatgagacatgagaactaactgatcttcctccaggaaagcgtcaagtgggatgcaaatgagtttttacaatcaaatataatccagatgggagtgtgaacaggcttaaggcccgcttggtagccaaaggctatacacaatcatatggtatagattatcaggagacgcttgcaccagttgcacaatactattcaagtactcctctcacttgcatctaaccttgactgaccactgtatcaattagatgtaaagaatgcattccttaatggcgatttggaagaagaagtgtatatgaatataccactaaggttcgaattaactgacaactctaaaaaagtgtataaattaaagaaatcactctatgacctaaaacaatctccaaaatcatggtttgacagattcacaagagctgtaaaacataaaagatatgaacaatgtcaatccgaccatacattgttcgtcaaacattgcatatcaggtaaaaaggctattttgattgtatatgttgatgatatcattcttacaggagatcaccttgatgagatttaaaaacttaaagaatttctgtccaaagaatttgaaataaaagatcttggagcattaaagtacttactcggtatggaagtagctagataaaaaaaaaagatctcagtttctcaacgaaagtacattttggatctcctaaaagagactgagatgctaggaagcaagcctactgacacccctatggactcagtcatcaaatttggatccagaatcagtaataaaatggttgacaaagggagatactaaagacttgttggaaaacttatttacttggctcacacaagactagacatcagttttgcaataagtacagtaagtcagttcatgcatcagccaacagaagatcacatgagtgctgtgtatcggattctgaggtatctcaagaaaactccaggataagtttattcttttcaaaaacagacagaagaggtgttgaaatttacacgaatgcggattgtgcaggttctacaaacgacaggagatctacatcaggatattgtacgtatgtttggggtaacctagttacctggagaagcaagaaacagtctgttgtgtctcgcagcagtacagaatctgaatttagagcgcttgctcatggtatttgtgaaggtgtatggttgaagagaatacttaaaaaattaaaagttctcaacaatatgcctatgaaagtatggtgcgacaaccaatcaacaattagtatggccaaaaatccagtacatcacgataaaactaaatatgtggagattgatcgtcatttcattagagaaaaattggaagatgggactataactctgatgaatatttcaaccaatcaacagatcgcagatattataattaaagctcttcctaagagaacctttgatgacataatatccaatctagatttactcaacatatacgtaaactagattgagggggagtgtagaaaatataataattaggagaataaattaggattaaaaatggttatttacagctgttatatgctgtaaatgggggaaccatttacagctgttatgtgctgtaaatggagggaatcaccaacaaatttgttacaacaaatttgtccttagaaacagaattttgttaggtttctttccagaatttattaggttgttagggtagtagacttgtatatatatgtgtggaaatcattcatcaaaagaatgaaagaatattttatctcaattttcttcaagaacttgatcacaagtttcctttgctctcttgcataaacaacaccaattcaccatgatcttctccttgctcataagttcatctatagtcaaaatgctcccatgtgctacttcccaagcaaaaaaagttacccttggcggtgcattgagtttcgagatttgtttgaatgggaaattttctgcatttgtttccttcttgatcaaaaagtcataagaagtcccaagaatgaactgtccagtggcattgagagtccaaacaggttgatccttttcttcattaagcgaaataagattcaaagtacttagtaataatccatattcgtttaccttccagtcattaagatggtggaaaacctccacatgccactctgtcctatcctcctctccagtaaacatgcccttaacagttcctcatgagaaatgtgatagtagatttgttattctcatttagaaagtttattaaataccatgtttctttaaccaagagactttttgatgggttcgttgtttttggcttgtagttg

SEQ ID NO: 8505 - DNA, 6685 bp, Carica papaya
  Intron number 2 from transcript evm.model.supercontig_47.4 4 (locus evm.TU.supercontig_47.44) derived from phytozome v7.0 (chr-ID supercontig_47; pos 623333 to 630017)
gtgtaaattttcatcttcataaggtaagcccatttcccacttgttagagtttgggtctcccgttcccttaactagtttagcagtcctagacttgttttaatgttgcatccgttgcttatcttcactttgggcagagtttgctcttaccagctgctaattattctgattactctctggctatggtccacttattatactatcaggattggcatggcaatggttttttttctgtcttactaaaatcttggaaccagttaaccaccaaaaggagggaagacaaaaaatcattgacacagtgttcttaatatgaaatatctcctaatttgagtaatgttacatgacatgattaatgatcgtctgtgactgagaatttataattgaacttgaagttgtatgtcttagctaagaggcatatggcccaaatgtatcatactcttttactcatggatcgattttctcagaatattaatctggggccatgggcacccagaaagaaatggcctcttctctttttacctgtctggattgaagggctttaattggtacgctgttcattcccctctcaaagactccccacttcttggtgtaaaaatagtttgatgtttatgatgtcagaaagaaactgtatgtatttgtagggattcttatgccaataaaggaagaaaatgaataggaaaattaacttcataagaaagacctacactggtacataactatataggaaatgtataatatattaatacccccccccagcttggagcatatatatcatatgcatcaagctcattaaataaactccacaggggttcctctaaggattttgtgaacatttcaactaattggtctactcagtttacataggtagtttgaatcacatataggaagcttttctcaaataaaatgataattaaccccaatatatttagttctctctgaaaaactgaatttgatgccacatggatcagtatttgcttatcacatagtaacttcatgggttgtgatggtgtaaaataaagttcataaactagatatttcaaccaaatcagctgatgtgtagcaatttatgacaaactatggttaatttgcctattaagaatttgggaatacaatctagatgttacacctaggtatcttaggtatcacatctaagaactggtaagcgacaaatttaaggatttgattgcattgcataactataaaattgagaaagttgccaaagaacgttttgtattgaataaatgaactttatcaaaagcaagattatgaaggcatctatgacacttcctcgcaaacctttttcggatgaaaatagactcaaagggtgtctgagatttcttatttgatacttataagtagcttaagcattcttgttctaatattcgcatttgataacataaaaagcataatgcttattaggtgactgtgaaaggtagaaaaataagtaccgtaatgttcacaagttgcatggagggccacaagtcatagtatcatacaaggatcccttgttcacaagtctcttatgaaaagaatttatgaaagcagctggaaccaaccttcatttcagcattgcttaccatccttaaacagatggtcagaccaaacagcttaatcaatgcctggagatgtatttgaggtgtatggctcatgatcaatcaaaaacatgggcaaaatggttatccactgctgagtggtggtataacacgacctaccatacaaacctcaatgtaatccccttccaggctctctacggaaacgcacctcctcaatttttggatgctattgatttttcatcagcttcactatatgtggaagaattattggcagaaagagaagatatgaaaaagatgattagacagcgactcttgaagatataatctcgactgaaggaatatgctgataaaaatcgctgtgaaagaaattttaaagaacaatactggatgctattcaaactacaaccgtacaagtaagatactgtaaagcaagtgagaagatccaagttatcatcgcacttctatggatcattgcaaataatacagataattggatcaatagtttccaagaagtgtactaaaggaagagacagtatgatatagaatttaccagtcaataaaagagaggttgtactcagtgttcaggcccaacaagtactgtaacaccaggtcatcatgtaaggatcactaatctgtgaaacaagtgccaatgcaatgggaaaacactacaacagaagagtgtacttgggaagactatgcgtatctacaacaatagtttctatatctcaatcttgaggacaagattgataccgaagcgaagggtattgtcaagaagccgcctctggtggtctactacaaaaggaaaaggcagaaaggggaacacataggggtaaaattgtcttttcatgtgtacaaattagggttggagttgttgaccaaaattaacaagtaggacccttccctgctgctgtagcttctgggctgttcccgcctctctttgctgctctttttccctaccatttgtagcctataaataggcctttcctatatgaatgaagagcaccggaaaatcaaacacattacctcaggaaaatctctctgattcctctgttttttctctctctttctctcaagtttgaaaccatgagcaaggcttctgacgtatagccatcatgtcttcctttgcatcttctccttttgtttcatttcaaaatggaagttattcttctttgggcattgataaccaatgtgtgcactctacccacacctaaagcaaacaatttacttacacttggaagctagtcttggaaataacatccattcttcagctcacttttgattcaaaggtattcttaggattggattccataatcgaaaacttaatatttcttgggaaccagatatttaaaagattctttcatgtcaatggcagcttaataagtttatacaatggttgcaggaggttgttgaattaattctttttttttttttttttaattttcagcctcaatcttgccatgaattgaaataatgcttgtcttttaccaattatattctcatgatactgtggcaatatattttgcaactccaacaaatttcatgttggcaaatttgattttggtgtatttgagataagacaatctaggaagaaactagggtctcctattctattaaaatcaagagctttgaattttaccttcgtagtaatatctccagcattatattcaatgtgtctccaatcaatagcttaggcaacttgcaaatttgaactggtggagctatttgtgcagtgcgcaaatgtcttattttcttttcaaatgtattgattttaatttgtattgtttcaagggtattagtgtctaccttgtacgcttctgcgttgtactcaatttagcgttagtcaccatattttgaaactgaaatttttcttaaaccagagactaactagcctgtttgaggcgggaagcagtcaaaggaatcgatctggtcaaacttgaaggtcagagaaatcaaaataggtcaaattgagcaagccccactagcagttgagtgcatgtgtctttcagtctccagatagtggcaggcttctgttagtcaacctgatttaggttgtacatttgttcaaatggatgggattgcacaacggggctaaaatgcattaggtggccctgtgtttccaaatggagtttcatggccaggcttgaagtggaactccagatcagtgcactcacattggagcagtaggtggacattttcttgagtggtttgaaggaggacactcttatggaaatagaactccagaatatgcatgatttgacattaacaatgagtctcctgcgacattatgagcaatgaccctcagaattttccagcgtatcctcctcaaaacaatgttttcttttgccaaatgagagccagcaaggcaatcagccccctttgtctcgaatcccagaggtcaaatggttgttggcgtcagaaattgatgaatgacacgaacaggcactttgtttcaactataatgagaagtttgagcctgaccctgttgcaaactccttttctggccagaagttgaagattcattgccaatgggcaccatataaccataagctctagaaacataaggaagatgaagatgaacaataatcatctcaaatttcttctgactaattactcatcttttgtgcttgaggacaagagcaatttggaggaaagtgatgttaagaaccattaataattagttcctagatgtatttaagttaattagtatgataaaatattttgtagaagtattaaaatgttggtagttattaagataagaataactcaagaaaattctaaggaggcagttactatattctgcataacgtaatatatttccagaataactaccctttcttctcttgtgtcaaaatcaaagtttatgtccttggggtagattttgaatgaagaaaaatttattaagttttgaatacttttcttactcgagactaccattcctcatgtaacaaaatcaagatttctgtccttgagacagattatgaatggaaaaaaaatattaaagttttgagtacttttcttactcaagatattgttgagttttctatgagctcatacattgataagataggtaaaggatggaagacaggaaaggatccgaaaattcctactgattttcaggttcatcgtcccataacaagatccatcagtaggggtcgtaacagtaactgcaaaaaaattctcctgcactagtttcttactttttgaacttgagaacaagtgcgacttaaaggagggaagtgacattaagaactattagtaattagtttttatacgtatctaagtgtaattagtatgataaaatattttttaaattagttattcaatgttgtagttattaagagaataataagtctgaggagataacaaggatgtagttactatattctggataagggaattaatttccacaatatctaccctttcttctcttacaataaaatcaaaatttatgttcttgtgacagattatgaatgaagaaaaatttagtaagttttgagtttttcttaataaagggactgtttggttctctcttttttttttctctttttttttaaatgaactcatacttaggggaaggtaggtaaaggacagaggacaaaaaaatatcagaaaattcctactgattttcaggtatcccatgacgagatccattagtagggattataacaataaccgtcataaatttctccatccaccaatttctcactgtttgcgcttgacaaccagcacgacacaaaggagggaagtgatgttgagaaccattaataattagtttttatatgtatttttaagtacaatttgtatgataaaatatcctgtaaattaggtattaaatgttggtagttattaacataaaataagtaaaaaagatgacaagaagctagttattttattctggatgaggttgttaaaatttccaggataactatccttcctgctcttataataaaatcaaaaatctgtatttgggacagattatgaatgaagaaaagggaactgttgtaaaataaaaaacccatggattttggttttgttttcttattgaactttatttcaattaccatagcaacgagctttcatctagcttcagcttgatgctatggtctcgtcttggtttctacaacaattagtaattcattatagttatattggtggctgagatatggctcaagcaattctttctttgaaaaatatgtttgagaaaaaaggcttgaaattgaagcactgtatatgcaagaattagctgatgcataagtaccatctaccaagtcaaaagaagagaatgggaatatgatatatgaaaatgaatagcacacttgttaccttaacaggtttattatgttttggaaaatgaatatggctagtatttaagatcaataacactgtcgtttttggctttagattataggtatgcaaatgcttttccaagtttgtttgagattgaccttttaatatgtggggtacaaaggagtatatcaagcattttgctgtcaataatatattattttccagctgtattttatcatggtattgcgatctatattttcattcctcactaagacattttaattgttgaccaagttatggtcctaatgttgatatgacttctcctgtagtttccttgcatctggagctgcagttatttgtaagtgaccttcatggcctccataaagaaataaaatatgcaaactgtagcatccgatgtttttcctttgccaacagatagcgaaactttgcactattgcacaaggaaatgtgtgtttgatactctgagtaacatcttcattattaaatttttatttttgtaacacgttattgaaaggcaatgaatgattttagcagtacatattaatatgtccgtgattcactcatctagttacaagtacatgaattttctagtattaatgtatgatcttttaaatggaagcagcaatcacatgatgagataaaaaattaccctgttctacttttttgtgatgcgttccgaaatctggactgagtttctaagcgatcatgtgacatagttgtatgaatcaatcttcaatgtcatagtggaaatatttatacttgtattatttctaaagaaaggtcaggtaacagctatgcatgattgtacagtttccgctcatatcaag

SEQ ID NO: 8506 - DNA, 7927 bp, Carica papaya
  Intron number 1 from transcript evm.model.supercontig_78.7 8 (locus evm.TU.supercontig_78.78) derived from phytozome v7.0 (chr-ID supercontig_78; pos 917959 to 925885 reverse strand)
gagctcatcaaatacggtttccctgaagacatttggtaattttgaagaaaaccttcgacttcctctctctctctctctctctctctcttttttttgggtcgaattagtactgccttttcattatatcattctttagatgcccgataatttttcaattgctctattcgtgggaattagtatgattagggtttttcaggtgtaatccctggaattttcgtttttaagtaagattttttaatattatgcatgatttgtgcaaaatggaagaagaagaagatgtcctcttttttttagattagattggtggtatgatacgagtgaattgcatatatattggttaccaagaaactaagagttaataggagagagtaaactggagaaatcgagagagaagaaccaatttcagttcatatactagaggttgcaatctggaaattgaaaacaaaacaaaatgcagcagttgtctatgccaaattgaaatccttacagtgacctaactaggttttggtaatagcatctggtatttaggtaactagttttgacagaagagttctttaaatatcgacggaagatggtgcagtcttcagcctctttagttttagcacgggattatcattgtcataaggcaggcatacccaaggatttgcatcgtctttgaaatgtttagcatttggatagacacttttacgggacttggaatttctttgttatcaatttcattctggtttgtgattggatcgttctatgaataaattaccacaaccacttccatcaatcacctacttttaccttcattgcaactaatgcatctactttttgactgtcaaatcctatttcctcaaattcatatcactgtgaattaccacaaccacgtgcagcagcaattgcacgttggaatccagtgattccagcacttcttgcattgtatttaccccatgctattcttccataactatattatcatgacactttaatggtttctgacgcacaacgcaaagatttaatggtttctgacgcttttgacaattcgggactgtataatgtgttggttacccgaaacttgaatgattgggggttggatgaatatgggaagcttctaaatctgatggctggtattaatattctggacagacctgacagtttgatctgggagggacaaaaaaatggcaaattcactacccagtctttctacaattttctttccaaccccaatatccggtgcagcactgcaaataattctcagtttcctttcaaatctatttggaaaaccaatgctccttccagaattgctttttttgcttgggaagccagtaaagagaagattttgactttagacatcttggtgaaaagaggaaaaattatggttaacaagtgttttctcatagctgcaattacattcttctttgttgtccctttacttcaaaactttggtccatggtctttaatttgattgttattacttgggtaatggctggatccgttcacgatgaacttttggcttggaagggtttaaactcgagcatcatgtcatcaccttatccccaatactatattttggactatttggaaagaaagaaacaatagggcttttgatgataatgaagatacttttgtaaatattaaggaaagatggttacattgttttggctccatcattttggatagtaacttattatcttttgatgacattggagttgttgtcgatattctcttaaatatgtaatacttttgtacatggacggtactcctttggtgcccttttttaatgcatctactaacttctatctcaaaaaaaaaaaaaaaaaaaataccatgaacaaagtcaacatcgggagcttccttgaaatctccttccaatcttctgtacttgtagcagtttaaaattttccattaggaactcttgcgttgtttatgattctcattattaatctccaaggtttgatggtttaactgttccctttcttcccttcttgaggattccttcaacttgcaaccttgctagtcccaaggtaataggatagaagcttgggggatgatctcccatactatctcagatggggttgatttcaaggaagaacgatagtccgtgttgtaaaaatactcctcccacaataaccgttccattgaacaacttggcttatgatttatgaaacatcttagatacatttgaattgtgcagttaaccactttgctggccatgtgattaagtatgggaagctgatcgaaagccaattttgtgccggagagtcaaagaacttccttctaaaaggcacttgtgaaggttacatcatggtcgacgatctattactgctatatatggatgaaatgatggcaaaatatgagcatatttggaaaggctattgaccaccatgaacagaatgttattgtcacacgacagttgggagacattccaaacatcaagggggatgttgtcccaaattgtttggaatggtaagcggttggaggaggcgggttggttggagttattccaccatgtgttgttggcaagttgggcaagattaaacaaagttatggactttttgtttttctaccttccaataaagtcactggccatccctctggaagtaatttggtatagtttctgcccatggttatggagcgctgattgaatggttgggacttcaggagaaataggtagaaggaacaccctttccttgtaaaggagaagattctcttaaaagtccagagattgcctaatccttcttcttgtacttgatgggccaacttttgaggtctgggattccatgaattcttctctaatagcattttaaaaaaattagttggggcatggatatggcaacgaaggtacccatttcttcaaattgttgaaataaagtgtgtgctacaatgtttccctactcaaacttggagctgtgggtaggcttggccataccagattaggcttggccagtttggatttatgatttgtttttttttttggtgttttttttttagtccataccagggatcgaatgagactgaaactgttggtagagatgaacaatggttcaaaaccagactacactggcctggtatcacttttgtctagaccggactgtacctgaattttttggtctactccggattgaagtggatcgtacaaaatattttaattttctgaagtatattatatacaaaatatataaatatatatacattaaatatacgtgtgtgtgtgtgtgtgtgtgtgtaaataacataaacatacaaaatatatacatattcatatatatatgttattctatatatattaaattcattattttaagagaattcatttaattggtgctgtcctcaacaggattagaacagactgctctcttcagctcctaatctcttggactgagcaccagattgtatgtggaccaatcgagtctggaatgaacaccctggtccagtctggtttttcctgtctggataaggttttgctgacccctaaatattggtcctctaagcttaggaccaaggatagggctaaacacaatttggtcatgttcgattcagttttctagtccagcaatttaacacccctatttggaactccatgacaagatgggttaattcttgatcaaaggctcatcaataaatggtgtgtgctccctgaattttccgaaataattatgggccactctgttactcattttttatatttttatagtttgagaagtcaccttacctatgatagcatggatggaaatcttgggaccctctgccccttcaatcacctacaatagatgtctggaagcagatcctctgcaaattccaaccaaaagaatttttttacatcctagagtgaacagatcattgcagatagaacaaagtcctttcttatgcctttcccctatttaatctttgcttaatttattaatgaagactggtttgctacctccatagatgatcttctcactgctttgctatccatccaccttcctctgatggtgctcatagaggtgggcataacttattaccattgttagatccacaggatgttgtagctctaccgccacctctatatagtctagcaagtgatgagaatttcaatctcttgggcgggtataagtgtggaagcctgattggatagttattcaaacctctatcaggaacctggtgtctaacagcagcttggaagcaggtactgatgtagtttttaaggagttttagggctgaaggaggcagattaggagattggcagcagaggtgggagtaggaaggaagagagaaaagagagaaagagttaggaaggatagagtttatagtagattttcattcatttcttcataatttcagctcttaaaacctgggtacttatatagcagtatcaccctcctagaatgaaaataaagggaacaaaaaaccaattactaccaggtgtaaatgatagccagtatacgagtgtccttttgtaatggaatccttgactaattcctctgcgaacagttaatttttctaacaaaaaacaaaataacatgacgtttttgccctctacagcattttccaggtccttacatctcaccctttctgcagaagaaccttgtcctcaatgttcttgtgatgttaatgcaatggatttaactccatcaaattttcatctcctactcataacaactaatcataaacaggtgttatttctgcaaatccgatgaggagacttggtaccatttggtgctgggttgccctgttacaaatgccatatggtcttctgttttgaggcttattggggtggattgggtttatggtgggtagtgtaagtaatgaactttgggcttgggagggtttgtgtataaaaaaagggaggcatttatttcttgtaccacttactattttttgggtgatttggaaagaaagaaatgctagagcttttgagggggttgagactaactttggtaacattagagatagatggattcacacatttggatctattttgctgggtcatgatattaaagatctagatgatacgggtgtgattattgaccaattgatagtcttgtaactattttgaatatgggtagtacccatttgttaccttgtgcataataatacttcacttttattccaaaaaagaaagctcataaacgactattccttgcatttaatctatttgcagcctgttcatcatttctattcacaaaagcaaaaaattgcgagtgtcgtaaaatgtcttatgcattctttggactaatagggaagaaaatgaaagatggctaaacatttagctccactgttgattaaacatgttctctttgttgaaaaaaattttagaaactctcatcaaaatatcagccccattccatgtcaaatgactatcattgtatgtcatgtagtaccctctcaagcattctagtataaagggattatgtcctctgaatgtcattacatcaccattttaaaaaccccagcaagctgaccctccaaattctaacagaactgttgagtgacgataatgactccaggagtatgatatcataatcaagataaatgccatgatatctacttccgttttctgggacagtatcccatctttggaatttcttctttacaaatcaggcttgtatatgttattggattgatggttccacctcgaatttcttctttacaaatcaagataaatgccatgatatctacttctgttttctgggacagtatcccatctttggaatttcttctttacaaatcaggcttgtatatgttattgggattgatggttccacctcgaattaaagtcttcaaacctggtgagttttcctcttgagaagactctgcaaactcctggtaaaaacaaacagtttcagcctccactctctttccaggaaggttttaggaagaagcaggagaaatatgtgttttctgctgtgctgtcattgtagatcgcttaggttttgtgatcattatctatagttgagcgttgctttcagctagtttggcatctagctttgcactgatggtctgtaaatttccatcatgaattcttgaaggcactggtctagtctttggatagattcttttacatgggttagttgatgcaaattcgtcatgttttcctctaaatcgtgccgctctgatactattctcaggaacccgttgtcgacatcaggtgggaagtaggtattaatgtagttcttgaggagttataggacagctgaggcagattagggagattgacaacagaggtgggagtaggaagagggaacgaaaagagaaaagagacgaaaagttaagaatgacagagtttagaggattttcatttatttcttcataatttcagctattgcaacctcagtatttatagcagtaacagcctcctactgtgaaaataaaacaaaaggtaaccacttagtaccaggtacaaataacaactggtgtatcagtgtccttttgtattggaaatcttcggctaattcctctactgacagctaattatcctagttgaaaacaaagtagcaaatgacatctttaccctctacaagacttccaagtcatacaatgtcttccagtgctcaatcacaaatctctcttattacaacttgtttggctagttcccctggtttgttttactgtgtattgagggtccaaaatgcaaatcacaagtggttttcaaagtcgtgtcaagtcctcttggttcagtctcattctaattctaatttgaaaacccaaaattgagcataatcctctacgtgaaaagaggccggcctaccttgtcctcctcagcattgcaatgatggtgaaaaagaggcccacagcatttcagccacccgagtggatctaccacctgtcgtattgcagaaaatcgagcttcaagaatcgaggaaccattccctactgtctgcaccttctcaaatccacgtcggtctctttcttgacaccaacattgctagtggtttctgaggcttctctcctggtggtgaacaactcgcgtttaaaaggttctatctttaccagagttcttgttgtctctcttttatcctggtttggtcctcttatattgtttctgtgtgaattcaatttgttgttggaaggccttgaatttccccctcactgctggttctgataccaaattgatatggtcctgggtttatgatctggcttggggtccagaaacggtgaaattgtgaacctttaatcattttcaagtaaattctatattttagattgaatagctggtaagttttattgatcataataacatttataaggggagctatttggaatacatcattactcaggcaactcctattcctactcttaaattgataacattaaaaacacaaagttttagtaaagaatcccaagtcaaataatcctcctaaagtgaacttttgtagccatcttatccttcagccaatttggaagaagaatccaaattcggctggaccctggagctgctgagggtggtctacggatccccttgcagttctaaaccctctcaaaccttctgttgtttttggctatattagtggccggaacaagatgttaaaaaaaattatatatgtttctaccgacctaaagattcgacagtgggcacagtttctttgaagttatgcaatatcataactataagaatacttctgcaaagaagaaaatataccaaatacgaacacaactatagtgtctcgccaacaacatttttgtcatagcacttgcataactgcaagtttatcatcttctatgactgcagcaatcttaacatagctgttctaattcttgtaatacgattgtctttaacagctcaaagtgataccacgtgtaaaagaccgttttggatgagccttttcttttctcaatttgaagaagtttcaggaaggggacattttaatcggtcacttcatagggttatttctagttttatttcagatatacaaatatgtgtgtgtttgttctctgatcggggtcattcattgcaggttcc

SEQ ID NO: 8507 - DNA, 3050 bp, Carica papaya
  Intron number 2 from transcript evm.model.supercontig_5.35 6 (locus evm.TU.supercontig_5.356) derived from phytozome v7.0 (chr-ID supercontig_5; pos 3315534 to 3318583)
agcttcatactgtcgtcgaggtttgtgcacaggtaactttttcactttcaaatttttgcttcgtattaaatttatttgtggtcattttttgggggggttctcatttctcatgatttattatgagatatgctggtgttctagtttggcaaacagtcttaactagatattggaacatgaaatatatttcactgataatcaggtgctttgatctagaaagtgaaattaattacttaagagaaatcgtgattataaatgtgttgatgctgcttgttctgtatcggaaagaaacttttgttgaagtcagtttgcaaataagctggaacagaatcgtgtcacttctctttgtggtcaagaaacatcttataattagccgtgtcattggtttgtggtccagaggatttttatatgggtttatctggtggggtggaccattaaatttaggattggatatgtgtgtaaaatcttgagcatcaagtacttgagaaaatgtctgattgaagttttgattcacttatcaacaaagttctaccttatctagttttttggtaaaagagatttcagtaagtggaaagtataccaagttgttttagtattttcgagaaattattttttgttttatatctgatctactatacatatacatactattattaattataaatatatgtgaatgtaggaatggaagttaagaaaaaattatatgccaaacgaagtcttagtttcacactgaaagtatttccttttgcagcatattctttgcctttaatctttagtaaaatagctctcagccaaactgcagaatcagttgaacttttcttttagaaggctgtttgctgcgtgttacactattgaactattttcatcaaataggctcagactactgattctggtgtttgtattctaactgtacactggcttctttttttctagcggagcatcattgacattatacagaagcccctttctgtttagcataattttctgtgcatatgaagattcttgcagcacactgcttgcatcttagtgtgacaattaggaatttagacatcagatagggcattatcataaataatgttatttccttttctttatcatacatgtcaaatatgtctctatatttgacatgaaattattatcataattgtgtcgttaagaaatttgaggtggcagaactttattttcttcaagtttttgcctttatgtttgaattatattcaaattttattgtttagagcatgcaaattctccctctctatatctctcttctcttattctggaccaagaaggagtctgtagatttcatttgaagatatgggaaatgggagtttttagtcagaaatgatgaatattttctcgtggacatttcaactttcaaggaatgtagggttcagactcaacacttatccttatgcacagatagtcagtgtctttacactaaagtagaaactattgcatttacgttagcaacaataccattatgatctagctatgaccagcttaattgtgtttgaatgtgctcattgatatttagtatcaatacaatatgtggtcctaggcttgaatgtacattgtacttaattaatatttccattttgtctcatgtcagtatgggtgtttcgattttagtccaaccacttccaagtccaactgttaagctgataaatctagatacactatgtaactccaattaatgcatactatcagttggaatattctctcatataatttttttatacattttcattgaattgaatggaatacaaacaagccaaagacatttggctcaattggtaaaatctcttcctattatttgaaccaaaagaagaaggaaatctaaacatgtgaagagggtattcttggttttatatggtgacaatattatctatttctagtaaactggaaatcataaatgcttatagtattttttgttacgtatgcctcggttccaaaattagttagagcatatacaaaaacgtaccagcaataagaagagacatgcctaagcattataaacaaattgctgatgcagtctacataaaaattgagaacagtttgtttatacctttattactagctaaaacgactctacttccccttaaatgtgtaatatgcctatgttggacttcaaagaaaaattggttagctttagcttttctagttttagattctaaggaatgttgaagcctaaggtagggtgagcgatcctagcagtaaggaatatggttataaagcgattccaggaaggaaaatcaaaagaagattgtagagtggttctctggctatttactagcacttgctgtatgtagaagggactgctgtagaatttaaattcattagtcctgataaagtaggcataactgttcttgggagaagtaaaaaaaaaaaaaagaagaaaatcacttgttttaaaatggatggttgtcttgagttccggagatatagctgagcttaaaaaagtcttgattttttgcatcttcctcgtgtatatccaatttcagatctctaatttatcttaagtttaatgaaccaagcacatcatcatcactccagggagaaaagtccaacttgttttcccctccctctccccctctttccccctataacttatgggccatacaacaggttgagaatgggtctttgtcaacaagaaaaaaccttaattttagattttttttttttaaatggaggaatttgcacaattccacccttccagtgccagtggtccgcaacccaaacataaattctgtaggaagtatggttttcgtcaacttgtcaacttggaaaggattcaatgctagaacatgccctgcattgcccacaggatttccatgctccagaagaaagaaattaccaattttcggacagcttctatcatattagttttattttttgtgcattttttggcccagtgctgcgattgtccttgttatgctttttaagcacaaagcatgttcatttctaatagaaacgtagtaatctctcatgaaaaaaactaatctgttacgttggaaccagatattcagtgatttcctgcacaaggaatacggagg

SEQ ID NO: 8508 - DNA, 8938 bp, Carica papaya
  Intron number 6 from transcript evm.model.supercontig_1004 .1 (locus evm.TU.supercontig_1004.1) derived from phytozom e v7.0 (chr-ID supercontig_1004; pos 7608 to 16545)
acgaagaaggtacatacttaaatatcttaattgggaaagcatgcttttcaagagtaatagtctgacatttaataaaacattttttttttgaaataaaaagtgtgaaattctattaacatggtaccaaacaatcaggggtatcgcccctattcaaaagctttacaatgtagttagcgaatcaataatatgttcaaaatccacatcgctaatcatgtcatgccctaacaataaaaacccaaaataatgcaaccacttgtctctcaaactatataaatcattagctttaccctcaaaagctctagaatttctctccttccatagaatccaaaacaaagataaaggaattagatttttcaacttcttctctacatgcattccttcccaagcccacaattcctccttaatagatccagccatcatccagttaacaccaatcatactaaaaatagcattccacaacccagaagccacaggacattgcagcagaacatgtacacaactttcctcattagccatacacaaatagcactggtttggaatggccaaccccctagttttaagtttatcaattgtcaagatgcattctctatttgcttcccatgcaaaaaaagcaattttaggggggtactttagccttccagatatgcctagagggaaaatcaaaacttatcacattgtttttgtctattaagtgcttgtaataagatttgactgaaaaaaacaccactattatctaatttccacaacaccttgtcctccccagcagacatctattgagcagccaataaaagtagcaaattttcaaacttgctgagttcccaatcctgcaaatttctcgagacattgatcagccattcaacacaaccattgttaatcttgtaagcatcctgaatcagcatattttttgtctgagaaatggaaaaaattatgggaaatctcctgattaaacacgtattatctatccaaatatccttccaaaatctgattttattgcccctgctagtcttccacagcagattttccaagaaaataggccattgcatcaagattttcctccacaaactcattccatgggctcttctaagccttgtgaccccactcgttccaagacatttaatagaactttatggagcatgaatcagaattatagaaatttgcattttagatgagtgtgaaatatgtttttatgaagttaatatttccctatagttatgtgaagtaaactttagtagtttttatgatttgaatcttcccatagataaaaagttatggtttcacagttattattgtgggcctctgttaagaattgtaaaaaagaattttagccacctatgaaatacggttcacctatactattaaggttgtagtctgctatctttgcttcttttatcatgctttttcatgattgttgttgctttttccaaacacggaatgtatactatgtattagaagtagggtggaaatgagccaagctgaatattgggtgtttgcacttgatttaattgaatattgcttagcttgagcttgactttgtttgggctctttttttgatcaagagcccaactagtagattgggctcagttcgattcacacaagtaccgagtcaaatcaagcttgagcttgatttaaaatgtgttctagcttgactgtacaagcaccaaacaaatatatatttgtctatgttatgaaaagaacaaacatatccaattaaatatattaatgtgtttaggaaaaataatatagattttttgaaataaatatatatcatagcaacatataaaatgttgttatggtcctgagtttgtaatttgatttggggccagacagtgtgaagtccactacaagctggctgcttgctcctttagaattccggccttgacagccaatagggaggcttgttaaggagagcttccaatatccttggagtaaactctaaaatttagattgactagcttatcaacttaataggtaatcataacttatttatggtgaagtgatttagaattggatgcccattagatctactcctaattcaacttcttgttggaaaaatttaaatactgtataaaatagaacacttattataatagagactcctactctaaccatccctcctagccgactcaacctctatggattaacctttagcttatctaggaggataaggctaaactttagttgtcacatggaccccccgcatagtaagctgtttgaatatgtctggcctaattgctaactgctttagttaccttaacatttctccctctttgacaaggttttccctcaaacatcaaagtgaaattttgtctaaggatgttatctgctttctcccatggggcatctgctgggaaagcctcccttgatgtatcagcaattaatgcggagcccaactgcagttggctgtcccagtactacttataaggctggtcgaatttctcctttaactgctggcactagtgatgttcaggtgccttcattcccacgtaatattttaagatgcatgttgttctggcaatctaagcattaagcaacaaccccaaagcctttccgtttttcaaaggggccataaagtcttggacaaaacttctggttgtggtggcagcgtaaggatagttgctgacatgttataggctgaacaaaccttttctcctacttggaattgtacttctcactgatttgtatcataaacgccatcattgcttgggcatggacagtgcattcctggaggttcctttaaaactgtcccaagactgtagctccgagtccaccacctgcactcttgctagccaagacaataaaagagaggtttgggagacaataggtcgtaaagtactttaactggcttcaaagatgagtggtaccttgtcttataacaaaactcagaccaagatagccgttccatggaacacttcggtttgccgcttgcaaagcaccgaagatacatttcaattgtttggtcatcaacctctatttggccatccgattgggtggtaagctgaacttgaggccaacttaatgacagaaaaaaaatgaagttctttctaggaatgttcttgtaaaagtgacatcatggtcacttattgtcgattcaggcaacctatgcaacttaaatttttttgtcaaagaatgtgtgggcggtgcttatcacgacatattggtgggacaatagtaaagaagagcttgcttaaaaatgttgttaaacagtacatgggtgggacagtggtaacaaggagctcacttgacgaagtggtcaacaaccagtaataacacattcttgtcacatgatgaaaaccaaccttctacaaagatgttgtcaaagaatatgtgggcgacatcatataccatggtatatgggtgagacaacggtaaaaaaaacttacttggtgaaatggtcaacaaacaataatatagtattctttccacatgatgaaggaaggtcttctacaaagtcaatggagatatccacccaaaatttgtttaggaattgccgaagttggaggataactatggattgtagttgttccatgttatgatgttagcatgttggccaaagtgcccatgtctccaaattgatgggataaggcattgataacaatgttctccttcctataccggtactcaagttgaacgaatcctatcaatttgcttagccaatgtaatcaccacctgttggtctagtaagaacttgaggctataatttttttatgcagaccctaaagaattttcttcacgataaggtctacaatggcagacgatttgtgataactcaatcaattccttctcataagcaggcaagttgtagttcttaatagagtcttgatgatggagttggtatgcaatctcaatattaggagattgataaatatgttagcttaattcaattcgtatcatcttttgggagcctatccatagcgttggatgcacctgtttggaagattagcagcagaggggacttcatagtaaaatcatattataatgttttgaaaggaatgaagcagcgcttgaggggttctcatggaatttgatatggagggttaaggaatctcccaaagtggctttttttgcttgggaagcagtaaggggccgcgtttaaaggtggacaatcttatcagaaggggaaaggtaattgaatggatgctaattgtgcaaaaggggcagcagtgacggtcagtcatctcctttggtgtctggtatcctatcaactatggtgcttggcttatagtccattggaagtgaaatgggttgtggcatgtttggtcataaaagtgtgggtatggtgaggaatcctaggggataagtgctataacaagcaattaggcattatccctctggctaccttatgagtgattttgaaggagagaagtaggagaacttttgagggtattgaattgttttttaatagaattaaggatacttcactcaaaaccctagtttttttaaggttatcctctctaatctaatgaggatttaggggagctaattgatattttgatgcacttgcatgtagctttgtatataggttgcattcttggtgcttcttattactatactatttttttccttaagaaaaagcggccgagttatactgtcaagcaggcaaagtcttgctaaataatgccacaagtttctccccatgttggataattgcttggattctataatccagtgcatcacactctataatagaattttctgagaagtggaagagagccaacactagagttgtagtcacggcttcttgaggcaatcaaaaaccttggagaacttcaagagtccatgtgaatgtgtttttctagagcacagaaatgtgtggtgttgctatcaccctatagtctttcataaattttgatagtccctattagacctaaaaatccttgcaaccccttgattgtcacgggcttcaatcattgcaacattgctgaaatattttctgcttcagtagccactcaatcattggagattgtggttcctggaaagaaacccgagtttgtttaaagaggcatttttattaaaatgattttgcaaccatgaaaaaattgacctgagatctcccaaatgttctacccatgttttgctgtagatgaggatatcataaaaaatactaaaacaaacttacgcatatctacttaagaaactatgtttataagggtctcaaacattgaagatgcattagtgaggtcgaaaagcatggctaagaatttataatgctcatgatgggttctaaaagccgtctttgggatgtcatcataatgcattcaagtttgacgggggatagcttgagcaaagatccagctttgtaaagttcgtgctccatttttttttttttgaaataaaagtatgagatatattaatgtgttggcggcgctaatggggcgtgacccatgtacaaaaagtttacagatcaatttaaatatctacaatggagccaaaatcatctaacctatcaaggttgtgccccaatacgattgaaccaaaatagtaaaaccatctatcattgatagtagcaaaatctacttcttttcccttgaaagctttattgtttctttcgttccaaatagcctagaaaataattagtgggataagtttgaagtgtttgttcctgtcgacaagtccctcccaagcaaggagctcattcatcgcagaaccaaccatgacccatgagatactcagcagcccaaaaaccagagccaagagattgtaggtgaaggggcaccaaattaagagatggttgcaggtttccgaacaatttttgcaagataacgtctattagctgtaattacaccccttttcattgggttgtccatagtgaagatgtgttccttcacagcttcccaagcaaaaaatgatatcttaggaggagcatgagctttctagattagctttgtagggaagttcctctgtttggtagaactatggccattcaaaaatctgtagaggggctttacagaaaaatccccatttttcctaagtttccaacataatttgtcttctttgttgcttagttgaatattagctaaagtttgaaccagattttcatattcatccacctcccaatcctgtagatttctattaaccaccacattccaaccttgatgctgctatcatcataagctctctcaaccattatatttttgtctctaaggatagtgaaataaggggaaaacaggtctggagcttatcagagctgcaccaagtaactctccagaaccgcaccttgtttccttttccaacaacccatttagtgtagtcaaagacaggtttgttgcattgcatgatgcttttccagaggctcataccatatggactgctctctaggattgttagatcatgtttgtctttcccagatcatttacaatcaatgacaaatttccataaacaattgctatcgttccagaatctccatatctatttaccatgtagagctttgttaagagcacaaatagatcttagacccagactaatttcttcaaaaggttttttaacctcatcccaactaacaggatgaagtttcttctttgtctcgttgtccccacgaaggaaattgcgttgaattgattcaagtttcttagcaactttcactggaatagtaagcaccttggaagattagagagagtatttttgacaagtattaatctaccacctttggagaggaattatcttttccagcttgacaatatattttgaaacaactcaatgattggatcctagcacctgctatccttatgcttatcgcccaatgggataccctaatatttcataggaagctgcaatgctttgcaacccaaaacctgtgagacagattggccggagctattatcaccgcacactacaagtttcaactttttcagatttattttgagaccagagactgcctggagacagaggagaatgcacctcagattcaggaggtcagagttcatctggctggcagaagattaaagtgttgtcggcgaagaaaaagtgggtgatttcaatttgattgccattatttcccaccatgatgcactttatcagcttcaagtctttagccttttctatgaatttgtttaaagcttccatcacaatgataaacaataggggagaaaggggatcaacttgtcttaagtccctggaagctgtgaagaaggaagaggggcttccgttaaccataactgcaaaactcgtagaggtgatgcaattgttgatccatcttctccattttttggccataaccaagttttccaagcatgtagtcaacaaaattctagtagacatgatcgaaggcctttcccatgtccaatttacataaaacctcactgcccctgtttctatatatatcatccacaatttcctttgcaataagaatgatatctgtgatttgtctcctgaaaacgaaggcgtgctgacttttctcaataatctgacttagtactcttgataatcttttggccaaaactttagagaggagcttttatagccaactaaccaagttaacaatgtgaaagtcactgatatatcatcgacaatatcatttgtaaatttcctatttcaatgattgattaactcttggaagagttgcatggtaatccactcaaaaactccaagtaccatgtgatttcttcacaactagggatgagtaaggagagtgacttggttggattcttccttattgaattgtctcttccacttgcctctcaatatcatcctcttggaggcgagggtatcaagatggtttgaccaaaactagatggtggttggattccagaatgatcttgtgatcatgggagcgtttaggaggtaatgccaccagtgttacaaatattccctcaaaactttggaagtaattgaaggagattggcctagtgtagtcgtttctatggtggtgaggtgcgtcttgtttgatttctagcatgtctactaccgtaaaactaccttggtggttgaaggacattttcattgcagcaaaatcccattaaatatgccctaagatttggaggcaacttacacctagtattgcaccaaaaccaccgaggagtaatgtgaacagatccaataggaaaaaaagagtgtcattcaacattatttggatgctctgatattttgatttctcctgtatatcattggtaccattcatacgaatggttgcatatggattgaattgcattgtagttctcctctcttatggcatgatcaaccccaatgcctatagtgaaaactagataatcagatgtgtttaaaatgtaaacttagaaaagaatgtctgactgaagtttatgatcagatatgaaaggaaagcattggagagaaaggaggataaaccttttcatggtgatccaattgcttgcaccagacaaaaggaagaggacttaactgatctaaggaattaaggacatattatatgtcatatttaacctatctagatggaagtattattatccagtaatgattagctcttttaggcagcaaagagaagtggatttccttttctgtagaaggtttggtgctgtaaaatgctcatacatacatcagttccatatccaagttctattggatccgtacccaaactgtgattgtatagctttcctcaggcaacaaaacttaataaaaggtgactcaaatcttggaattgtatataagcaattgttactaaatatgtggtggctgtttttccaaaagcctttttggctctgtttttttgtaactctatgtttgtatttatattgagaagttatatatcctggcatatcgaaggtcattttaacattgctgcagttagttttatttaattgaaatctttgttgactttagaatacaactgaaatggaaattttaattttttttaacaatcttttagtgatcgacaaacttctaatgacaaagggaaggagggaagatataacatgggtgagaatttgaccagttacttgtgatttttacaggtgcggaagctccagagggc

SEQ ID NO: 8509 - DNA, 7730 bp, Carica papaya
  Intron number 4 from transcript evm.model.supercontig_68.3 9 (locus evm.TU.supercontig_68.39) derived from phytozome v7.0 (chr-ID supercontig_68; pos 1192479 to 1200208 revers e strand)
ccagtttcagtttctgctccgccagagcaagcgacgtaagttcattgaactcttcttttcagtagttgaactattaggacttacaaacttttggtctccaaggtgacatggcaccaaatgacaaattttagaggcaatttactaataaaatgcactggactatctttttgattgtttttctgggatctatattgatgtctcttccatatcctgtaacctttccttttgtagggtcccaaagagcaatgtatctacctcagatgcagcaggagctaggtgagaattctgttcctactatgatatatttccatttaaattattctctagagatcttaacatggagcttatggaaaagatgagcatgtacaggtagtaattctcctcgattcttatctttttcggacttgggaactattattgtaaattcctggtttgaattttcgtggtctaaagtcatcataattttaaaagataatttgaaaataattttatgttttaaaaataatattatactttaaaagcatcttaggatttaaatttgtcttattgttatgtagatttattttaaattatatattagttgctaatatttttaaaatatattaacatttactctttaattttttttattaaattaataattagcttaaaatacaaatctcagaaatgattttatattattattttcttaaaaataattttatactttaaatattttaatatattattgtattggtatacattaaaattttaaattaaactttagtatttgaaaaaatattaaggaaagggaattatggtcataatattacgtactcctccgtttgcctatgtatatagcaaaaatattaacactcagatttggtaaagcttttggagttgctttctccagagaacaaccgtcctttcagtgaagtcatgtttggtgatctatttttcgatttttttttcaaaaaattttcaattggaaaagcaaattttgctgctttgggaaatcaaccacatagttgctttctcaaagcagcaaaatatgctttcaacagaagcaaataaaaataatgaccaaattttaatttcttactgctgctaatcttacccaaaaattaatatagaatatataaatagattttaacttcaaaagagattttttccttaaataaaatataaacatgttaattgtacttgtataatacttttacatctattgttgccaaaaacacaaattttgcacagcatctcagttgtatcttataaaaataatttactagcactatgattacttttttatgacaaaaagcttttaaaacaacaacaagcaaacatttttaagaggaagctttttcacaccaaccttgctcatctgtactctgcactgtcatacaaagttatcctattcattgtcttacccaagtgtcagaagtattctgagacttgcattgaaactataagatctctagaatcaaatactggtttcgcagcctgatgtttgtactgcagttggaggaagatgaattggtggtcagtttctcaagtgggttggcttctagatttagaaaatgaaagaagagcgtggaagaaagaacaagctggaggataaacatacttgactaaaagaggtctttgcatttaatcctaaataaccgtaaaggattatcataacaaggtggaagcaagtggactcttgtgtaaatctagtttaaatctagttgatgcttttctttttggattgagttctgaagaatattaagatcataagtcgtctttcggctttaatacagattgttataaaccttatggagattctacgaattaaaaaggaaacaaggttctgaagaagtatcagcttgggtaaatattaggtcaagcaagcagtttctatctagattgactaggcttgaatctatgcaaaaggaaagaggaaaataccttgagaatagaactatttctcattgaagagtatcttatttccatttggctaaattgtcattctagtccttgttaacttgtacagttaattttagatttgtcttaccatgtggaactgttaacaccatgatgcagaatgtgctagcactagagtgcctaagatttgaaattatagttctgttaatataaaactactacaatatttatgagtttatagttatagttttagtaactttaggattttattcttattagtgtttagcttttcagtttatattgatacttttatttcctaatcctattaatattagcatttcttggtttaattttatttagcaaaggtttcttactaaacattatgaatatttttgtaaaatttacattttcggggagccttcagttactcaataaatttcttctagagtttcttattcttgttggttgtttaatgcaaactaagccttaaatatgatgtttaagacttcttgctcagaaacctaggtatttatggtcccatattcaaggatcaagttatgagttgaggtatgtggaatggtttggggtttgttagggagaagccaccgatctctagaagctgtttttagttaattattcgctggttgattttatttatgcaaactatttacatccttatacgtaaacaatatcatattctttctttttcaacagccgctaatgaacttctagtcctcacctaataaggatcaacacataaaagccgatcctaatgtcagggatctttggctgatttcttttcctatttgacaaaagataattcctaatctaccttattccaaactcctaacctaaataatctctcctgatctaacctaattaactaaaaatacataaggagttaactccagatttcttcattctcatgggcctgcacctattctatagtattatatttgtgccgtatcttttctttcttccagtttcctttttcactgcaggctattggggcataacattactccattcaccccaatggtgcttgtctgcaaacaccaaaggacggtgtgttatagtactcttgcattaacaaatgcaggttctctaaaactggtatctgatgaaaagggaactcctgcttgctgaattcccataaagccttccatagggttgaagctgagattcatgctgctgttgcttctcatcacttttactgttattaggaaaaaggtgaacatagtcattgctattgcacgcagaatcaagaacttcaagctctttttttcccgttgtctcctcctttttgtcaggctcctacttcgcaggcatgggttgcttgttgggtgtctgacctaaaagctccctggacagcagctcaatctgttgacttagctccttttgctttttctcgaacagagaacaatctttctcacattttgcgttgcatggttcctgttctcttggacatgtgcaagaacccgttgctaacattccttgatattttctatatactcccgccgtgatatcaatgtgttatggtcctatatttaattattaggctatgggttgagatatatggaaataagggttcagggcctgttcaagtgaacttccgatctgtagtattaaggtagtgtctgttttagttaattatgctaattgatttgcccgtggtaactgtctttacatgtttataggtaagctgtactgtaagttttgatattttacagatgctgatgaactcctagtccacttccaataatgatatttaccatgaaaaccaaattcctattttaaggatatttagctaattcttgtgtccaatttgacatacaatgcctactccgccttattccaaactccttacctcactaacctctttgtcctaatcaaagctaattaatcaaaatgcttgcgtagattagccaagatttccttcctctcttggggcctgctcacacaataatactgtattgtgtcaccacttttctttctacctcctatttctgcttatttctactttcttttttttttctttaccagcatactcttcttcatatctgggaatctccagcttttaataattttttccttttatttaaaaaaaaaaaagaattttggaacttatagattatttttcggttttgaggagccgaacctgtagaattttaggcgtttgattactaataattatgtttcaacttccaaccaagaatttaaagaaagtcctcgtgccaagtccctatacctgtttattgtaggtgatagatgcctacttaggtgaaatgttttggtggactctgctggtagttcttggtctgctagctattcaggaatctgaaatttgaagagttacttgttttctgcagacatttctcacctatatgagccgttgaataaagaatattcaacaaatttgttgacatttcttcacctatataagccattgaatgaagaatactaaacgaactttgtgtttttgattggatgtatatggttgatgtattacattgctcatgattttgctgtgccgagaatctatgctcaagaatgttacccagactttaccttttggttaattcccctgcttttgttttttattaatgcaatcaaggtttttttctttgataattatgttcatgatatttttctggtgtttattatgtgatagttagacatgttgctttatctggctggattggacctcttttaagagttgactgtgatttcgtgcttagttttctgttttctggtcgcttttcttttaatatttctcttctcttgagtaactttcttattagtcagaatctaaatgtcacaggaatgaactgcagaaatttaatttggagtctaaatcacaaacttagatgggtctgttattgtttactttttgaatatatttttgggaattactttttaaatatatcaacataagtctcatctatattttgctttccagatttatatctgatgtggcggtttggcattctgttagaggctcttacaagcagtcctccatgttatctttttaatgaaattaaattctatcttttcaactttatttttttagaagtaaaagtgaattaataaaacaccacagcgatgcaatccatatataaaatatttatcagtctaataaaatgtttataaggtccccaaaatccttgttagaatacagcggttagtcttttataaaaaagcttagagcttaggaactaagaatctttaaatctatcagaggaagagtcagttcctctgaacagccctctattcctctccttccgaatagttcaaagggtggccaagggaataaaccttatgtgttttttttttccatgttaaaacccttccatgcccacagctcatcccttgttgtgccaacaatgattcaattaactccccaaaggaccatacaccaaaaaccaaagtcagtgagcaatcaaacactatagcataatatgattgcaactctccttgccatttttgcatagatagcaaccgttcaccaataaatgtttttcctcttataattagcttgtctaatgtgagaatcctctcattgaccgcttcgcaggcaaaaaagccaccttggttgtggcctttgcattccagatcatgctagaaggaaattttttagtgtctctctcccacttggtaaaaataggttcaaggatttgagagaaaatcgtccattcttgttcggactctatgctagttcatcttttacccttccatggacacctgagtaggagagttgagaagattcatgtactcttctatctcccaatcgttcagatttctaaataaaatcatagaccaaatatgctccctatcgattcctacaagagtgtccttcagagatatgttcatgttctaagcaacggcaaaaatagatggaaaccttgtgaaaagaggtccttattccattcactcatccttctaaaacttcatttcctcctacaacccatctctccatttaatacatttttgaaagatctctttcctggaattaatcttcttccataagccaactccatgcagccctttgggctccttgaatcttaaaatctttaaacgaaactttgccaactaacacctttctccatagactctctctctctctctctcccacataaatgtctaaagccatttacttgcaatgcactcttaaattcgatcaaagatcttacatccaatacaccctcccagatggctgtttaaccatcattcaagctactaaatagtatttcctattttctcctctcttcaaaatagcctaaagaaacttgagttgcattgcctctaatcttttagctgtatttacaaggatcgttgagagagacatggaaatagatatgactattggtcaaatagtatttcctcctctcttcaaaatagcctcagagaaacctaacttgcattgcctctaatcttttaatcacacttgcaggaactattgaatgagacatgaaatagacaggaatatttgccatcatactcttaataagagttagtgtttgccaataagtgaagtaagaagggtaaatcgttttgtttttagctatccggtagataagaggatatttatcttttagtttttttgaatcgcacaaaaaatcttcccagaaacagaccttgaacccattaccaatattccattttgagcactgaaatatcgtattactaagtgtgatgatgttctttcataagctgtaaccatagttgttgcttttaatataagagagattttgtggattgccattataccattttgagtctatcaccattttctagaggctgttattttcattccaatatctccaaattcatctaccaagaagtgccttgcttagtttgactattgatatttagtctcaaggtcccttcttttaagggttttttgatctccaaccaattcactaagtggtatttcttgcagttttcactatccccaacgaaagttacattcgatctgctgtagtttttttgccactttatttggtatgttaagcatctataaaagtaaatcgggagattggagagtgtgcttttaatcagggtcaatctatctccttttgatagaaattttttcttccaggtagataatctgttattttaacaaatcgatcatagttcccaccaattattatcattgtgcttggtgccaagaagaatgccaaggtaagtgataggtaattgtgactagttgcatcccaaaatcacactgaaatcttcatttctagagttgtttcccaacaaaaccatctcagatttttggaaatttatatgtaaatcgaagacagcctgaaagcatagtagaatacattttaggaagatgagggagctgaaatctggttgataaaaaatcaatgaatcattagcaaagaaaagataagaaatttccgttttgtgatctctgttacctacagtaatccctttaatcaagttcagtgattttactttctcaataagtttattcaatgcctccatcacaataatgaataagagtggagataggggatctccttgccgtaggcctctagaggcattgaaaaaagtggagggcgccgttgacgatcacagcaaaattagtagcgaaaatacatgtttttatccagcttctccatttgggtccaaaaccaagtctcaaaagcatataatccaggaaatttcagttaacgtgatcaaatggctttagaaaaattctcttgatttaacaaccttaaaaaaattctcttctcaactttttaatgtatgttattttctagtgttcaacagagtttttgttattatctagtgatgcatattatatacttattgcagaccac

SEQ ID NO: 8510 - DNA, 13930 bp, Carica papaya
  Intron number 7 from transcript evm.model.supercontig_56.1 11 (locus evm.TU.supercontig_56.111) derived from phytozom e v7.0 (chr-ID supercontig_56; pos 1323831 to 1337760)
agtgagttcctcgacatttcctaaaatatcttgtttgttttgccaccattttaagatttaaaattaggttatgacaggtgcaattagtttttcgacatagctttgatgattgccgtggtatctcaagtagaaggtaatcagtgttttatactcaagctcttgatatactaagcaagtattattggctgatcatgcatgtgtatatgcatcaactggttttttttttgagataaaagtaagtagcaatataagagagacgccaagggggtgtaacccatatacaataaaaggatttacagatatgtgagaatatgtacaatagaaccaaaatcgtcaaaagaatcaagattgtggccaagaacaatggagccaaaaaagtgcagccacttatccttgatagaagcaagattagtttctttactttcaaaaatcttatagtttctttctttccaaataatctagagaattgtaaggggaataactctatgccatcttttgttcaatttgatgcctgcccaagcaagcagctcactataacagaaccagaaataactcaggaaatgtcaaacaacttgcaaatcatagtccaaaggagaagatggttacacgattcagcattctgtttgcacataattcaccagttagccagaacaattcctcttttcatgaggttatcaagtgtaagaatagcacccatagcagcttcccaagcaaaaacagaaatcctaggtggaacgacagaggtccaaataattttatgggggaaaatggatgtagaagcattgctgtctgtcaaattcctgtatagagatttaacagaaaaggagcctttgttgcataaattccaggttaatttatcagacccggtgccaatttttacagtaggcagtagacaaagtagattttcatattccaccacttcccaatctttcaagtttctgataacagccacatcccaagtccgagaagtagtaacctcataggcattttcaatgagcatagttttctctctagcaatgcaaaaatatggggaaattggttttgaaaacttgtttgaccacaccaagtgtcctgctagaagcggatcttatcccctttcccaatcactcatatgcatcgactgatgagaatgcgtatgcatgtattattctaaaagaactcttggacctttttttaaataaaaagagaactcttagttggattgctggagtagatggccccatgtcaactgaattctatgaccttttttttttggttatttacaattttggtcctaacttttgacatttctctaaaatgtttactgaactggtccttgatctttaaaacttcaaaattaagctctcaacttcttctcgcaatctgtttctcgtactgtccattttgttaaattctgagggaaatccagtgtggctgtcacttgggatccatgtcatttattgatgtgataccaatatccatgttcagacaaatgaatggattatttttaaatttggtcaatgaattttactcatttttctttaacatggtttatgacctttaaacttaaattttaggtcttgacttctttttttttttttccttgattcgctccttctattactgtacaaattaactcactgatggaaatctcacttgatagtgacataggtaaaactaattttgagtagcagaaatacatctaattattgtgtttgagctaacttgaaacgatcactatgaggccacaagtgaaaactgtctaggctgatccgccattagaaaatgatgaaataccatagagcgtaacagcctcttgtataatgcagtcaccacttcatcacactcttttccaagcctcaacactgactcttttctttcttccttttccttctcatcctctcctctctggcaccaccaaatccacatctatacctctcctagcttcacgtcctttcacttcttgtcacagtgttaccaagtttttgacttaccaagacatttttttttcagagaaaaaagtagttgcacacaatgacaggaaaaagtcctaaaaacccatgtgttttgaattattcaattaatccccagcatgaattttgtctttagttaggtcctgtagtttgaaatttgtttagattagtccttcagttggcaggaaatcagacagctgtttgattgggaagctactatgggctgtattcttactttagataacctcatgaaaagaggttctgttttggttaactggtgtacaatgtgcaggaagaacttagagtcttgcaaccaccttctcctatggtgctctgttgcctatgaactttggtcaatgatttacaagctgtttggcgtttcctgggtcatttccaggtctgttaaaggcgaattgcttgcttgggaaggactcaagacgaggaatagatggcatagagtaattcctctaactattttatggattgtttggaaagaaagaaattgtaggatttttgatggtaaagacacaaactttaccattatcaaggataggtggcttcatttttttggtactattgtacttggtcacaaccttgactcttttgaggatttaggttctattgtagatattctcacagagctgtaaatccttcattcttgtaaatgggctacatgccattggcttcttttttaataccactactctcttttatctcaaaaaagaaaaggaaatcggacggctgtttgacccttcccaacatccattatcttatgcctacatggcatctggtgtggccactttttttcagaatttgcctcccccatgcactcacatggatgttgtcttgacaaaaagtctaatattaaaaatattaaaaaataaaaagatatgcttacactgtctctaagaatcttaaactttaacttaaatttcaaacacttatttaatgccttctttacttttacttccccactaaccaaacaaaaagaatcaaaagaaaaagaagaaaaacaagttcgtcatctgaaaaaattctcctttcatcatactctctttctccaatcttcttcttctacttaagtccctctcttttcatcatatatcttatttagcacaatttttgttcattttccaataacaaatagaacaaacaaaaagaaaaagaaaacaaattgatcatcttcgcaattcttatttcaacacaatctctttatgtttttctcttgatcttctttgtacagtacttcatcccttttgtttcgccaaaatggcctaagcttctcgattgtcctttcttcctgtcactggtgattcctccataacacctattgattctctctcttccatgctgaaacccatattgctagattcagaacttcacaatggaagaaggggtgggtttgtccaagttggaggtgggattaatggatttgaagcaaatgaactgtgccatcacgtgtatcttagggtatcctcactgtctacctcttgggtgatcaacaacaatttagcaaggacaagattatgcaatttgttatgatggggaagcaaccacttaaccttaggggctcttggtttttccccaacaaactatgccttcaagtagaaatctgaaaatagacagtggagactcaacatacactctcactttatcctccttgttttttggtttttcatcgggttagtgattttgaatgacgggttttaataactttgaagacaaaagtccaagtttattttttttttttagtttttgtttggcggatttgaatgattagcacatagaatttttattaatataaaacatttttgtcaaaaattaaaaataattattacatgcaaatggaacatcaccgtcatgggtgcaaaagttgttacataatctagcatgttagcaaaaaaaagatggattgaacgattatttaaaaataattattacatgaacatggcatgccactgtcatgggtgcaaaaatgtcatgtaatctagcattttagagaaatacatgacaaattaaacactgaataaatgtgtgtttgtgtttctttcatggaaacgatttatttgaaccaaactcaaaatttcatgacttatttgaacacaaaaaacttttaggggcttaattgcataattctgaaaggtataggggctgatataggcttttggcctatatatatctatcttattaatgatgcatgaaagaggtatcacttaattaccaaaacctttactgatacgtctaaacattaattaggtcccccaagtccagagacagattcggttggtttggcaaggccgctaggttgtaggactatcaatttgtcaatcaaatatttggggtgatctttggatgctaattttaaagaagtgaagacgtaagatcctttgtggataggtttgaatagacgttggtagggtgaaagagagccctcctttggctcatgctcattgaaagcactcagggtaacttacctatttaatatatgtccctttttacaatctcggtgagtgtgattaagaaattgaaagttattcaaaacaggttcttatgagatgatgcggagggtggaaaaagtctcatttggtggcatggaacaagttaacaaagccactatcccttggtagtttgggattgcggttcttggtggagatgaatgaggctttacatggtaagtggttgtagaagtttatgaaacaagaaggtatgctttcgagaaaggtgataacaacaaaatttgataatgataagagagggtggttcaccagagtggagtcaagaccacatgagaaagacttgtggaaaaagttcggcctaggccgacataagttccaggcatgcattaggtggaaggttggcaaggggtatagagtcaaactatacgaggatcaatggctggaaggcggtaacctcagattttcgcagttgcccaacagaaaactattaagatttgtgactcttttgtggaagtgggtgggagcgagaaggaatgagaagtttttctattgagaaatcttaatgactgggaggttggcgaatatgagaaattgttaagcactccatcccttgtgactttggatgggagtgatgacaactctcagtggtgccttacaaagaacaagtctttcactgtcaagtctataaagcatgaaagcaatggttctggattcctggtcagacaaatttggaaggttagagttctaatgcataggaaaataacagagagttcattttgacaatggacaaactgaggagatggggcaagattttgatgaatgcttgtagaggacagaggggacttctaaccacttactgctttggtgtccgatggtgtataaactttgagttgtagtttgtgggttttaaggcatcaattatgtagtggcaggatcagtgagagacgacatttgggcgtggaagtgtattagaggatagaggaaacaagcaaacttaatactgctaaccatttcttggacagtctagaaggcgaggaatgaaaaagtttttgattgggttgacaacgtgaatgattttgatttacttaagaatagatggttttagaccattgaatttttgtattgagtcatcttgtttatttaatggagggtttaggggatcttatttgtacttagacatgtaaatttttttgtacatgggttgataccccattggtgccgatattaatattgcactttacatcttgtatttttttaaaaaaggtcctttaagtcttcaacaaaactaaaaagaaaatacttcaacaaaagaaaaaagaagtatggaaccataagtctcttccaggatgcatattcctatttcttagaaaagaaaaaaagaaaaaaagaaccatttagcataaattttcttctccttagagtctttgccttctcctctgttacaatcatgcacaacctcattcttacccttaaccatatattgcaccatattattcacccttcctccttttttcgcttattcttttcatcatgattaagtcatccatagtcgcacgaccatcttaagcttcatcgttctagaaagaaagaataatgagatcttaaaggttgagtgttatgaatgcaagtatggaagacgcaacaagaataggaaattgacgttcaattaagtatgcaatcataattagtattagatttctaaatagttgaattttaattagtattagattgctaaatagttgaaattttagttagtattaggttcctaaataatatatattttacagtagtttttgatttctaaatagtgtagaattttcaatattttagtagagtatttctaattaaatttagatttcaaattaaattaacatttataaataagaattgtaatctatatataaagggatatgcttgatattaataaaaataaatcataatattattttaaattataagattgaaactctttttaacgagattcaaggtagcagctccctttgatgaattataatttattttcacaaaacagattgctctcgcattaagaataagggtgttaatcctttactacaagatgactttattgttaaccgatcggtgactcgattcttaaatatggaatataacaatttggtatcaaagcaaggcaccatgagtgaccaaagtttacgcgaagagttgcggaatttagaatctcggatgatggcttctgaagttgcaacaaaaaagagtttgcgccaaatcacaatcaattagaacttcttctcaaccgaactgcccaaatccaagaaaaaaaggaaattgataacgtagaaactgataatggcggttcaaattagaaccagggaggggaaagccgacacactaaaccagggtgcaaaacatcagttcccataataacggatggatttctcgttatacaaagcttgatttttccacctatgatggattagatgacctgttggcttggctccattgttgcgaacaatttttaattaattaaagaacagctttgaacttgttaggcgatgctcaactttggtactacaagctgcaataggaggagatatggatgtcatggggccagtttgttgaactctgcacattgcggtttggttcacccctgcagaataatttattaggagaactaatcaacctaaaacaaatagtcacagtggaggactatatacggcaatttcggatactcttgtatcgtacccataaagtgcgggcaagactaacaagttgacatgtttattgtggatctagtggatgcaatcaggttggaagtcgagacacgacacccaccactcttatgcacgcaatgagaatggtcagaatttttgaaaaaaaataacagttgtgggatatgaccgaacacaattatagtgaccattttcagtctattatgaaggctaacaattcagttcagaaaacaccatagggcagcaacgccacgacacaatctggtaatgctaactctccatttataaagaaactaataaaggcagagatgacagaaagagactgaaggggttgtgttataattgcgatgagtcttttgtttcgagtcactaatgtaaatgactgttctggctcgagattgaacgtgacacttgtcctgagtaataaaaaaagaccaataaggcagttatattcacaattcaagtttgagaacaagcttgaaaaccaaaggtaggtaatgtcatggatgcaagtgtggaaggtgcaacaagaataggaaattgacgttcaattaaatgtgaaattctaattagtattatttctaaaaagttggaatcctaattagtattagatttctaaatagttgaagtcctaattaatattagatttctaaatagttggaattttaattagtattagatttctaaataatatatatattttctattagtacttgattcttaaatagtgtaggattttcaatattttagtggagtattttaaattagataacattcttaaataagaattgtaatctgtatataaaagagtatgcttgatattaataaaaataagttagaatattattttaaactataagattggagctttatttaatgaaatctaaggtaacagttccctttgaagaactgtaatttattttcacaaaataggtcgctcgcgcaataagaataaatgtgttaaccctttattagaatacgactttgttgttaatcgcctgatgactcaatctttaaacagggaacatagcattgagtgaggatttgtggggtgtatctgtaaattgcatgctaaagcattagccaagaaactaagaaaaatagcaaggtccatatttgtgaagactcaacaagatctttttgggcgtaggtaggtccttggtgcttctttgattatcaataatggtggcttcagccatgaggaaggatgaacaatgtattgtgtagacttgacattgagaaagccaatgataatgtcttttggtcttttcttctctacatccttaaaagaatgggatgtagtggcaaatggtataaatggatatctgtgttgcaaatgtgtagggctaattgtgctctctgaccagatatttatgttatatgtttcagtaaagggaatactcatggttacctctttcgtatttgtgatctcacttggaagttctcgatatgctacttgatatgggttgctccattttcactggagtgcttcatgaggtcaaatcatatgggggtggggtgcaaaaggatgctaaaatcctctagacagaagcattgtttgtgggtgctgtggttgaagaggaatcataggattttagatgactgattcttcctttttcagttgtggggaaggatgccttttctatcccccctttaggctgaggctcatggtttacatagtttcctgtttctgtgttacatagaagttgagggtggcaccctattgaatattttttcgtgttttggcctttggagttaggaggctttaggagttatgttatcctctgtctttgtatttctcccctctttctttaatgatatttttcttattaaagactagtttagtggatattccactgtattttcgcaccttctttccctgccactattaatggtgtgccacctgcttttttggttgaaaggccagcagggaatgttgcccgaatactggtcaatgcttgttatctttgtaagagggtggcagagacttgtaaccatatttttctttcatgtactgtggtttacaagctatagattatagtttatgggctgcttggaatcaattgggtgatggtaggttgggtgagggacggaatttggcttagaagagtataagtggttgaaggaaaccaatgaagattattctactaactatcttttgggtggtgtaggaggaatggaataaaatgtcctttgatggggttgaagatgttgatggttttgatatctttaagaatagaaggtttcagacccttgattttttgttacagggtcatcatctttgtcctatggaagagtcagtggaccttattgatactttgattggcttataaattttatatgtggacgacactctcttggtgcctatatcaatatacattttacagtttttatttttttaaaaatggtgtcgcttcttctttctagatcttatattgtcttcaggcaaaagtctttcttcttcctctttcttctagtgatagaacctttaaattgacttcctttaagctgaagagctgaactcttaagggattgtgcatgaggaatgaagaacaactcattttaggtttgcggatgacacattagttgtttttaatggcgagtagggaaatatgaggtgcttgctattgggttttcaggtagtgttgggcttaaaggttatgtatgggtctaaaggttagttgaggtgaagttgagattgttccagttggccatgggattggtggtgttgaaatgttttgtttggcttgcaaatctagtggatttcctattaatacttttggttccatttgggtgctacccgagatgtgtttgatatgggacctattttggcgaaatagaaaaggttggtcagatggaagagaaattattgtcaaagggggcaggcttatgctcatcaaaagttttttggcttgccttatttatttcctttatctattccccttatttgctactgttgctaaaaggattacagcaatttttcatgggctcttatgtgctgactcagatgagcagagaaaattccatttggccacttagtgttgtgtgaaacaaccacaacgatgtggcagtttggggattgagtgtttggttcatttaatagagctcttctcaccaattggcagtggggatttctttatggtagaggcactttttggtggaagtttttgaatgccaagttcaggatgtaggttgatagttggcatcgcaaggtggatagaggtgctttagattacagattgttgaggcagattggtagagttgggatttggtccttggtgcaatttagttaaaagttggaatggctctagtatcaaaatgtagcatgacatttggtgctttcaaaatctatagaaagatgcttgtcccttcatttttcagttgccagattcaaggaggctaagggaccgggattgtttaaggtgtacagggatggaacccaatagaatattcccgacttttcctatctaaatgattaggagattgatgaataggtgaatctattaggatattaggggtaaagagggaaaataatagaaagagggcaaattagtatttttggtgtatcatttagggttacagtttcacctcattaaaccctaaccagaagagaggccgagatcattgcctttccacggctgccgctgcacacataatggccgcggaattccaggcattaaggctgcttgaattatttgcttaaattctataaaaggttctatttttgtattctgtaatcatccgaaaaaagaaataaaatttatctcctattttcttcgacttcggtcttcttctcgtcttttccccctttcttcttctccttttcttcttcagatcaggttccatgtctaaagcatctgacataatctcctttctattttggaatctactttcacatttgagtagggtgagagctccatgtggagacttacaaatttttttcccagctaaattgtgttacaaaattatttgggtgctcaataggcaatttcttatagaagcacatatggaaaataaaggccactcttaggatttctcatgggaggttggttggggcgagattttaatcattgacaacattatggagaagagtaaatccgggtgaattggtgctttcttactgttagtgtgcgttaccacactaccttctttgatattcagaagttagaaagctttgggaataagctcttagcatccttaacttttcaaggaccgtcaatgcctcaatcaaggatggagtacaggcatggagtggtacccttctaccaagcatcagaaaaatttctctcactcatcccaatttttaccttttgagcacttggaaaaagaagaatcaaagaggttttttgcactcttatgacctcttttgcattcataagagataattggtttagaactcttagtggtttagaactcttagtcttttatataaagaagacatctcggtgaatattttagatattatcgaacttgtttatcttttctcgttgtaattttgtatacaggtggtactttcttgatactttttaatctcatttctttttctctcttcaaaattttgttataggaacttttttgttgtactaggcttccatttaacgtatctgcttaaattaatactcttaacttttaaattgttgtgggagaaagtcaagggctactttaaggagctacattcagatgatgcatcttggtgacccattttggacaggttttagtttagtatgttggaggatcaaaaacgaacatggttggagtctcctttaactgatgaataggtccacgaagccctcatgagttgtagaggggatgaggctccttggccaaatggtttcagcatgagtttcatccaacaaaattggactgtgctgaaaggtgactttgtgttgctaatcaaggaattccaggaaaatgattcctttttatctagcctcagttccaccttttccatttctcaatccaaaagttgtcaaggcctcaaacataagggaatttgaacctatcatctttgtgggctgcatttacaaacttattacaaaggtcctggcaagaagatttgatggagttgtggaagggctctaggagactgtcaacacagggcaggtaaattctagtcgctgtaatgattgcaaatccattggcagagggtttattgagaaataatgcagaagtgattatttgtaagatagacatggaggcgatgtatgatcacgtgtcacggaggttcttattctatatgttaaatagaattgagtttcgatagcaaataggggtgagcaaaaagcaatcaaaatggaaaagattgaaccaatcaaatcgatcaaggagaccggttcgattcatttggttttctggttaaaatagtaaagaaccaaaaaactaatgtcttagttggtttggttttggtttccaaaattgggagtcaaatcgattgaaaaaccaattaaagtttttcattcttttttaaaagattaattaaagtttttcctatagaaaatgatttaggagatcaatgcatcacccaaagtggcctttttttccttgggaagcagcaagagatcgtatcttaactatagacaacctaattcaacggggaaaagtcctcacacttttatttaaaaaaaaaaaaattcaacagggaaagctcattgtaaatagatattacttatgcaagagatctacagagtccagaaatcacttccttctgtggtatccttttttctatcagctttgggctatggcttattgtcttttgggaaatgggttgttcctgacttggtcaacgaggagatacaggcttggagaggcatccattggaataaacatgataataagaagttaggctttatccttttggctaccttataggtcattataaataagaaatagaagagctcttaagagcatagatttgtcttttaataggattaaagacatttggctctggactctttgttgtttattaaaagtcatcttctctacacttgtgaggattttgaggagctgattgatattttgacagatacataaaaatgtttttgtatacaggtttttcccccttaatggtttttaattctatattttttttcctttaaaaaagcttttgtaaacttaataataaaactttactaattttttctttaaccttattccgctaactattatttggattctctggaaagagaggaataggagggcttttgacagggtggagagtgattttgtaaagattaaggaccagtggttacattattttggtttagactttttggggtacaacatgtataaggaggaggatttgagacatgtcatagatagtattactaaagtgtaaataattttgtacatgagttgcaccctcttggtgtgctgcaatactaatgttaacactttttatttttaaaaaataaaacgttactaattctaccatgtcatgctacagtataaaaaagctatagctgtaaacaacaaaatgttttatgaatttaatcgaaacaaacgtacctcacccgctgcagaagcctggggtacctagtagcaggactttcaaaatggctgttgccaacctactggagatgccaaggttgaaggttcttggcccaagttgagtttcttttggatagaattgttggattgtgaagaattctaatatctgttgaatatacaatgacctctattttctatgtcattattgatctcaattagcttgtttctgatgcatataagagtacatgatatcaggttgagtttccctatacctatgcagatttaactgatgtgataataattaacaacaatctatttgacaggtatt

SEQ ID NO: 8511 - DNA, 3044 bp, Carica papaya
  Intron number 9 from transcript evm.model.supercontig_215. 12 (locus evm.TU.supercontig_215.12) derived from phytozom e v7.0 (chr-ID supercontig_215; pos 262029 to 265072 rever se strand)
ccagtgtgaggccttctattcaacaacaaaagaaggttagtgtgtttgtccagaaacctgcccgaaaccttaaataggtaaaagaggagaaagatatatttttatttgcaggcaaagaagcaaagaaaaaatggatgcaaaagtctactgattttccatttaaatgtggttttaagtacatagaaacctttagtgtctgtgcatgacagccattaagctaaaaagaggacaaatatacatagcttaaaggcataaacaactaatattccactgaccttgcctaatatggctcacaccatgcaagcatttgacaagtagttaacaaatgactaaccaagctatggataaaatgcacaatattgaatttgacagaaaactgtccaacttcaaatcttctctttgtcattttttctggaaacgccaagcatgcttcttggtctttcagatctcgttttctggcagtgacttggaagatgtctaccatttgttcttcagaatgttcaacgacctcttcttccttcccagcttctctcacaaaatgataatttatcttaatgttttctgtcttgtcatgaaaaactagattcttggcaattatacctgcagatttgattgttagaaaatggttgtttccattgtttgctcttgattcaaattagcaagcagtttttcctaagcagaatagtctgcttcatgacaaacgcaacaaaactgtgatatgcttttgttgattgaaaaacagttttcagcttccttgaattttagcttaacacacttgagacaatgtgaaaagtatatccagatcttcatgtcattcactgatccagtccaattactgtaaaaccaaacaacttcttagcatatcaccttatgaaccggatgccaaatcactttttccttttatgtacctcaatggtctcttgcctgctttgaagttcaatttgctggcagcctgcatgaatctggaaagcaagcttataacatacatagttttagatcttgtggctgacaataaagcctaccagactaatatgtactccagcttcaattttcttcctgtcatcttctttgcttatcttcgcgtttggagcaaggggtgtatagttgcaatttcgcttttgtaagttttttactacatcttcagcatacttctcttggttgataaaaaaatttatttattagagtgatgcacctccatcccaaagaaataggacattttcctcaagtttgtcatttcaaatacacttaatttcaacacctatgtcagaaaaaaaacatttgatttcagtcttgaacttctttgccatattcttcttgctttcagttacaagaagatcatccacatagagtaaacaagtaaaacatcactgtcctctggctgcacatagagtatcctcactagagcttctactaaaacccaattgcagcaaatggtcatcagttctcacatctaagctcttgtaacctgattcaatccatataatgccttttggagcaaaaacacatataactaacaggtttttggtgatgtatccttgcatttccacgaaactttccaaaccttgcatttgcgttttttatgccataattgaatatgatggtttgtatttcttcctgttaaagaaatggtaaattagattaaatggtataaaagtaaattacactatatgtaattaattgtaattaacaatatatttcatttaccatcctagaaaacatctgtatataaggttttaatattcaataaaatactttacaagccttattcgacttttattgccaaaataagataaagtttaaaaggttagccttcacagttggccatcatagtccagttgccagccaccccagactgaccatctctaccacaagccgacatcatagtcggtcatctctaccaagaccggccttcataaccggatccagctcctcaaccacagccagctgcagtcacccttagacgtgcagatgcacacaacctagctttggtcggtctcagtacacagtttgtctagatgcacaaccttagccgccaccatctgtgcagatttttgcctagatgcttcagctgattcagtaatatttggttacaaagaggctcccctcatgcaatttctcattcgctacaacttgagcattttgatcagctagtgctctcttggatcacttttgtaacatgtcctgcattgcttcctcaagtcttttcattacaaaagcacattcagtagtttatttagtttgtcggtcctttttggtttaattactttagagattgttccaccaactttgccaaggatagttgtaagaagtcttttgagtccttcagagtaaagatttttgcttcaaacctttctggaagactaacacaaactttttcttctatcttcttttcactatttcctctcctagcatcctaacttgtttcaccaccttgtgttactgtaccaatgaacgccacattttccaagttactcatcataagaaaatcaaactctcttgttagatcgaacacttacctttgctttgtttttcactcccttgaagttcctccttgatcctatctgacaccaacccttataaagattgtatcagaagtagccgagtaaatgaaggagagagctttgaacttcttagccatctcctcctagttctctttctcagccccctctaagagcaatagaagctctggtattatttgttggtttcgacaaagaaaagaagggaaaaagaatgcaatagtctaacgattcttccatgaagtaacataaaaagcttaagttcctgtgtatgatagttattacacccaaaatagggaaaatgtaccttgcttaaacacaaacaaactaagattacatttcaaaggataaataactaagctatggataaaacatataaacctagagtttgattgcaaaaatgaaacttcaacaggataaaggacacttttaaaatgatgcagataggttacttcaattacccaaaagattattttgttttaaagcattttggtgctctctgattgttgtttgacttaatgttttagg

SEQ ID NO: 8512 - DNA, 854 bp, Carica papaya
  Intron number 4 from transcript evm.model.supercontig_51.9 0 (locus evm.TU.supercontig_51.90) derived from phytozome v7.0 (chr-ID supercontig_51; pos 912368 to 913221 reverse strand)
ctgttgctccgcttgtcagggatagcttttctgtatcttcttcctctccgcccctccccagtttgttgtatttggtcctttttttccccattttttgagaagttaatttatttgggaacttgattcgaagtgagttcttcggatttggttgatctatagaaactggcttgtactgttagtgcctttttcaatagctgaaattttcatattatatcttggtgtttctatagcttaattttgaagtttgggcaatcttgaagatttttctaaggttttcttaaattagttcagattgcatagaataataacttaattagttctgtattatggtatcttttcacatttcattttttggtccttagcctacagcgttatgtgggccttagcctacagcgttatgtgggtgtgctgggtaatgtctggttgaggtagagaagagattggcatggagaggcattcattgggataaggttccaaaaagaatttagacctcgtcccttctggctaccttatgggttatctggaagaagagacacaggaggacttttttaaagaattacggatagttgattccagatcctagttttttttttattaacagtcatcgtttttattcttttcagaatttagggcatttgattgacgtattgatagatttgtaaagttttgtatgcagattgcactctcttgctgtgtagacacacacacacacacacacacactataactttcactttaaaaaaaaaagtgggttttttaatttttgctgcatatcttagtagttggtcctgaagttggtgttttttgttgtgcatttagattggttctgcagttggtggaacaacaagtgcatt

SEQ ID NO: 8513 - DNA, 2293 bp, Carica papaya
  Intron number 1 from transcript evm.model.supercontig_109. 43 (locus evm.TU.supercontig_109.43) derived from phytozom e v7.0 (chr-ID supercontig_109; pos 874938 to 877230)
tgaatcggacttcggagtcctcggtgttccctggtgtaagcctatattctcttaaatatgcttctctagatattgtgcatgttcagttatacatgtatgtatgtacgggtgcatcatttgatctgggaacttgttgatttgttttggtgtgtggtattaggactttcccacgtctgtctttctgcttttggtggcattttgtcataaccatatagttgtttgcgtggcgagatttgatccggtaaatatttgactgtattcggtctgcgatgcttcgattttgataaacgcttatacttatgctgctaaacattctgtatatatgaggatacgtgaattttttggtgcttttttctgagggtttgatctggggaatgtttgatttgagtatttgggttgtatgcctctctgatctagatgtatatatgctcaaagctatgcgtacactccagtgtactattaatgatttgatttggtacatgctgttggttgcattggagtttgctgatgctgtttgataaaaggcggtttgtttgctataaggtaaagaaagtgtcaaaaaacagaaatggagattgtctctagcttccaaactgggattttgaagggaaataagttgactacttgtattaagcttctcaagtgaatggttcttttttccccttgttacaaccagtaataggctttatatagtacatatatagtggatgacaagcactggtgacagcctagaggagcagataaacagaattttcaatcaatagatttaattgtgtagtggtttctatagtaacaatattttaattgaagtaggtggtctaaagttggaactgctgtttgacatagatttctgaatcaagggcattgagaaaatgtcagggagtatcaaaataaagttgacaagaaagtatatctgcttgctttcctgagtgatgcagtattcatggaaacttcaggactgattttctattctttctgtatatatcagtagttgaatcatctttgtaaaccttccaacactcatgcatgataactgattaatatttctattagttagaaaaaagccaataaatagtatgttctcattgcatgtcattagaagaatttgttatctgcattttgcatattgagattctcatttcttaacataatattctaatttgatcaataaggtctatgagaaccatgaggagcattaatttttttcctttaggaaaaaaaagaagtaaacgaaagaaaaaataagggaaagtttctaatggagaaaagttctccaattaaaaagggtgattttagtgaaggattccagtaaagcgatattttgtggatattagttgatgtcttgatgatttctggagagccacctttaaataacttattttaaagtcgagatctctgggttgtctagttctaaagggatctgtcatccaaatctgtccacttgtaacctttttcaagcaataggtttggtttttctgatttgtgtggtcttcaccctttagtagctagttgcaccactggtatttaaatcttttaaagttgacttacttttctgcagcttaaagaaatgttaccattgttaaatgcaattatgaattaacttttctgcgtcttatatttttcccctgttacctgtacgtgaggaatctttccttttttaggtttaccttctccatttattctgcttgcggggtgtttagcattgattgtttgatgcttaaaattagctttaaaacattttacttttttttttctacaatataaaaggcatattgcatattagttcttaaacgtgagtttaagaaggtaggaaataagtatcttataccaaactcttaattcttatttgtttatcttatctaagaaatttagttaattaccccattgatatcctctatgataaacaatgtatataacaatgtaagtctaacatattcataatgaatatatacatttttttattaattttttttttacaaaaaaagctgcttacttttgcaattaaggctttattcaaatatatgatggcttatttttcaaataaaaaacttatctatattagctaagtcagagcatcttattgttttgtaagtacatttccttcagcaatctcagacaccctcttgttctattatatcgcttcttaagattttggaaatttctggtattatttaggattccatgggtgagtgttgtgatttagctattaaacctgattttcagtctgaaagcatcaagttcttacagtctacaacctttaaatttttatccttggcaaaaggcagatcgaaac

SEQ ID NO: 8514 - DNA, 4120 bp, Carica papaya
  Intron number 1 from transcript evm.model.supercontig_16.1 81 (locus evm.TU.supercontig_16.181) derived from phytozom e v7.0 (chr-ID supercontig_16; pos 2738323 to 2742442)
gcattcgaaaagcagctatctctgctctctcagaggttagttctgatttctccctggtgtttcagctgagctttcctttagctaactgtactaatatacttttgaaataagctaactgtactaatatagaaatgcatttctactgctagcttccttaattgggaagaggtgaagtattcatttgctgaaaatttccaacactcgaattttggcatttgtgtgtagcaatacatgatttacaatattttttttaattgtggttgctctgtggtgcatttcgcaatgcgattgctgactggtagagtattttaaagccattaagcacttgggtgtagcagcacatgatttgcaatgttgttgtaattgtggtctatggtgcctttctttggctgaattaattatgattctgattgggttcatttactaaactgtttctgatgctcgggtaacagttagtcaatcaacagatttgtcagtcaacaactgaactaattgaaccctgacttagtcaaatactagtagatttagttaggtcaggtaggaatcagttaaggaaaaccaatttaagagaatggagcagatttgagatgctacggatcagttagttacagacagtgttaggtatcatatagttacatataaataccattttaaggatacacaaagaagatttaataattaataagaaatcttcttctcgttgagtttattatttttctctcctctttttcctattactctagtttttgtgaggagcgttttgaactggagaacacaattgaagttgtattgaagataatcagagatgtcgatccaagttccatacaggtaggggctgtgtttcgtaaaattctaaagatgaagatgaagagtaggcacgagaaattcggaaaagagaagatgacatttatgaagggctgaagagatgattagctgaagtcaaataatgctcttgtgaattggcgcacatcagtggcgaccccaccaagaccaagtaaagaaaatcctctcttagtcccacatcacagaatttcccacccttacgagaagctaatttcaatagcaacaatcatccactatttctcaaccactgactgcaactactcagcccataaccacaccaatctactttgtaatcatttttctgaggaaccttaccacattcctggccgatttacaagagtggaatttcctataaaggatgctatatgaatgtgaaagattctttggaattgatggtcctcctccagaggctaaagttaagctgtttttgttcacctcgaaggcatgacactccaaagtccaatcaccaaatgttcaagttaaatcaccaaacagtaaaggaactgagttgggaggaatatatggcggcaatgtatgcaaattcaatgatgatcctatgtttgaaactgtaagacctagttggcaaggcattgctaatgattgttggatgagtttaaatgaaaaaaaaagggtcttagtatctcccccagaaggctgtcaaaccattactttcataatagttttgagagatgaaatcaaggctatggttcggatgtgagaaccaagggctttgtctcaagcttatgatttagttagacaccaagaagatctagttacaatccttagtcattctcccaaagctcataaactcagccaccatgattgcctactcctaaaaaaccacctctattaccattaccctcaaccaaatcttcctacaacccatgccataaacctatcagcaaagtcaactcctatgtgggttagacactataaaaagcagaaatgcatgataaaaaggcaagaaatggatgtttcgattggaatgatagatatgctccagggcatcagtgttgcagttgacaaaagaaatcacaggctgtcatcagcaggaaaggcatgtacagtgatactatgcagttattactataacacagttgttaccgcaacacaaaagaaattacaagctattcttagctggaaagctgtgtactgtggtatcagaaattttatttgacaatgccatgtctatcagcagtataaaccagaaaatgttgccaaatcctggattactataaccattttctattcctaaaatatgttttctgtagtgtcaatatattttttatgaaagaatgataagctttgcacaggaaaaataatattttctggttgttgacagaatgagcagatatgcttcctttagcactttatagcatctgtttacagcctagttagtggcatgggcttacctggacagtgtctccaagctacatgccttccccacttgtattgttagtgatcgtgaatccatctccctcactaactttgggttcaagtattcaagttaattagcattgagcttctgcactctatggcttacaatcaacaaatgtatggacaaactgagtttgtcaaaaggtgttcgggaaccttcttgcgttgcatggctcatgaggatgctaaacaatggttttgtttgattgtccattaagtggtggtgtaacaccaaattccacttagctaccagtcattttaaagtcttctatgtcacaacggggttggcaatgacaatcatcctgctctcaatcttcttatcttcctggcaattcaaatattgcaacccttgaccatttgctactaaccgaaaattatcatcaacttactgaaacaacatttagctactaccaaaactgaatgaagcaacaagcaaactgtaaggaccttggctgatagtacaaaaaagatgggtaaacctggaggtgagagaagagtgaaactaatgtgttaggatgttacatgtatgctgaaattgcataactaatgtgttagaaatattctttatttctaattttcctgcattttcttatttcatgaagtttctgtgttttttcctttctgtttttctgttaacaacattcttagcaagttattgctgaaccttcagtggaattgtgtaaaaaagggtgtgaatctgatggagagaataagaattatattagtgaaaatccacaaattcaatgaaatcaggaatcctcttttctttctccgactctctctttatcaattcattcttctgcttttaaaatgctggaaatctcttctactgttttagcttcctgctcaaatcagttttcatgtctaagagataagacacaaacaagcaccatgcagattgcaccttgagtcccagtgactttgtctatgttaaacttcaaccatacaaacaacactctatccaacattggccgaaccataagctttcccctatatatgatggacccctactatgtcatcgctaaggttggccaagctgtatgtaacttgatttccctaaaacctcttctattcaccctcgctttcttgtttcccggcctaattgcggcctctatcctcaccattctacacacctatcaaactttgatgactttctcgccctgaaacctatggccatattggactgatggatagtgaaacaaggttgtattcctgtaactaaattcctgtttgtggactggcatgaatccagaggactatctctatgacatcaacaaggagatcctgatgtcattacccttgagacaagggtgtttctgccagtggaggggatctgatgcatgggaggttaacaattaatcaactaataatctgttagttggcagctgtagtagttgaatcttaactgacttggtttaataataacaaatttatggtcagagatttgttagggaaaggcaatataagaaaacgagctgtctatgacaagtataaatgcagttgtacaaggatttgctaagtacattttaggatttataagaaatcctcattagcttgagtttcttcttcttctctccctctcttctgttactctgttttctgttggcttacttgcaccagagaattcatgttaagtggtgtcagtttcgtaatcacagtgtcaactaggtatagttactcctcaatgctgtatatccataatcatcatttatcatatttcctctttagtattttatatcccgggtttgaattatcctgtctttcaattctgtttcactacaaggatagattgtattttctactaatatattttacttataggccttcaggacattttcaa

SEQ ID NO: 8515 - DNA, 3246 bp, Carica papaya
  Intron number 3 from transcript evm.model.supercontig_14.5 5 (locus evm.TU.supercontig_14.55) derived from phytozome v7.0 (chr-ID supercontig_14; pos 580597 to 583842)
gaggagtgtaccaacagctttcaaactattcacaggtgtgctagttttatatcatcgatcttttcctgttcatagttttgatgctgtgcaattttacttagataattagaatctctatctgtgaattttcagtttggctctgctttcttctgctaagatgactgacttttccttctaatcagtgatttatagtccatcacgttggatgtgtgtatttcttgttgtccaacatgcagcagtttcgagaagttgttttctgaatctgtatattctattaatttcttttctgagagtgtatatactattaataattataatacaaggtggtattggaacatactgtatggaatgctatgcgattgacgaagtaatatcatttctgatgatatgcgattgactaagattacattattgtcactaaatcagttggatctttagctgttgagtagattaggagtgaaatgaaaggagagttgaaatttttggttgtcattttaattttttgaaagaaattaaagtcaacttgataaaaggtctagttgggctttattatgtggatgtggaattctaggttggttttagtaaaatatggagttctaggattttagtcgcataaaacatgcaaaacatcatacataatatttgttctatttctttgactgtcttttctagtgaaagtttattcacatgattaaaaatactgagtttgaagttggttttgtcgtttcataatgtcattactttttttttttaacattttaactttaatggatcttcatgtgcctcataattgctatatagcattggtgaaatgcttcaatctgggcaatattgaatgcaccatgctcattatcagtgttatttagcttgtttagatacttgaagtgggaaagaatatataggacctgttgaactccagctgtaagaagtttccacaactattgttgcatcacaggtagaaataaaaactgtgctttgtgcagctatggatattcgattgtatgtatttctgtgtatatggtaaggagactcagaactggagtatttttttttttttaccaatactttttcatttttttctgtcaagaattttacaagtatgaacgctaaattttgtcgttttttaatattctcttttatctgaggaagtgttcttgattggatgataagatcacttgtgagaatggttcacatattgatatcatcacattgcaatgtgcttatgcagttgagtgccatacatagggagcctgtctagctcaagccagtttctaaatgactggtatttttcatgtacaaggatgtcaacttgattttggaatcctctccttttgaagggaccttttggaatccacaccttagattcctcttgacaagcttatagtcgattagacgtcatttattagaagggaaattgttggggaattatcaaggttaagaattatctgaattaaaagatgagttttttgagaggaatcttttgtgactttgagttttctcttcttatgaggtgaggcggatggagatggaaaggctggtatatccagtctatgtttaccttgtgatttttcagcaaaggatgcactctgattttattctgacttggtagaatggtgaatttgaagcccaattattaaatggacttctcaattagatttgtatgattctataacatgatgaacctgcggtatgagtgggattacattttcagtattggtttgttcacttactgttccttttgagtttacttgcttctttgatttttggagtctagaacatttcaattgctttagaatcatttgatgatttttcaaatgttctcttggactaagttcttattttccctgtctgagctgcattctttctggttcctgtgtaaattagcttgtctatccagtttggcttgtggtggttcttcaaccatgaaattttttgttgtgtattcattttcttttttttttttttgtagtcagctctcatgattgttatacatttttattagcatctaatttgcatatagcttccataacatgcattcgtttcagtacctgctgcatggagtatggagaaatgctctataagtgtttgcttcttttggttattctagccagtatactatctatgcatctagaacaaatatagtcaggtaataattattttctctcattgaagacatgtcagatatgattgatggaatagggcctactacctcacatggtactgggagcaaataacttcgtgttttatgatgagcgatctggaaacttaacgtagtttttgccgtttttggggcacctcttggcgatttgaacaactatttcaacattttgctaattagtttaatgtcaatttttgatattagtgctcggcaaggttaccaaataattgagaatacaaaaggagctatattatgggcccaaagagtgcaaatgagaattcaagcaccccattttccttttccttgtttaacaatgctttggcttaacctgattgggttattagtcctaaagactgcagcggttgcaaagtttccaatagtctggaaagcaggttttaggagttttactgttccaaattgagcgaaattgcaataggagcagtcatgggaaaattagaattgctttgttgtaaattgaaattcacctccttctgttattgtcatcaattcaagtttttctcttttctgttgagaatggcgaattatactcggttggcaatctttcctcaatagggaaaaaattggtaatagtattgagttttgtgatatttcttttctaagacaattaatttgcagctgaccaattgcaaccctatctttttattatggatgttgaaaaggatacttcttgttttgattctgagaatttcttccctatttgttgtggaaacagtgcgctatatcagattgcttgggatcaaaggaatcatgctagttagtgcttgtttttcatgtaaccaactgaggttgttggttatgctacctgttcaaagttcatttaacagttggattcttggaaactcattttgccgtttgctgctgtatgcaagtatttgtctgagtggcaattttaagataatgagaatcatgattcatgtgctcagctcttctatttgtcattaacgaatgagactagtagtaacaatatgtgaagctctgatgactgaacaattttcatattctcttaaatttattttataatcagagtttgtaactaaatattctttttgccaacaggttctgcttgg

SEQ ID NO: 8516 - DNA, 2608 bp, Carica papaya
  Intron number 1 from transcript evm.model.supercontig_1.39 7 (locus evm.TU.supercontig_1.397) derived from phytozome v7.0 (chr-ID supercontig_1; pos 4912274 to 4914881)
ggttttcaatccgttctttgttcgacgccatagaggtctatgtagctgatatttaatcccgctctgatactaattgataggtcccagtcagagcttcaaagaattacaagtttgtttctctttatgttgagaattactaataaaagtttttgaaaatattttatctgcccctttttattccaaaattgcggctcttaaatacagaaaaatgaaacaatatgcttcctacttctaaggataaaaaccaaaagaaaatgataaagggaaaatgcagctactgcagaagtggggagttgaggatggtggcttgacgagtcggcagtatgcatgttttcctttcttcccttgatctgtggcgtgtgggtttatcatatttattcatttattttttatgtaatgttggggtaaggaaaaaattatcttacattgtcatgagaaagtgaacaaatcattttagacacttgagccatttgcaaacatgaactcaactttcctggattttctttggggagtatgggtttatggtaatattatgtttgtattaaataacaattttcatgtgcttctcactagctctgcttttattcatcagaagttgtttggaacaatgttagagatctcatgttcttggttcctacttgctatcataaaatatttcctgatgatagagaagctgtttttacttaataagttttagttatttgaacaaagttgttttcatctttctctcttcaaattaagaggggattctgatctcggaggaaatgaggtagttgagttcgtaacaaagttaggggattactagtatagaaggaaaggaacatggttatccctctgtctttcttctctctctgctctcattgctgttcgtactctttctgtttcatttttatctctcagtctcttctcgctgccctctctattttttctcctatatatgtctctcactatcttcatggcatcaaaaggtatcaaaccttacgattcccatttttttttaactaaaaagcctgaagacttttaactatttttttctccgaaaaggttgattctttgtctaaatcttgaattgattcttttgagaataaagatctagaaaaaccactttaggattggacttttttattgggagaatagtagtttctacgaaggagatgcctgttctcaccctgctaccagatggttaagatggcagagactgtatacaaggtcaagactatataatagttttgtatcagctccaacttactttcggtgaaagaaagagtggctaccaaaaaggattgaagccgtgtgttgggctctaacaagggctctcaagtgggtttggagatgaatcttttgagaagtctgggttttatggaagatacaaaggagtgtttgaatcgattctctgaagaaagtttccacatgtagaagtggttggcctttcttcactatgcttggttgtataacaaaatccatataagacattggttgagctacacattacggaggctaagattgaagcacaacccatatagaagatgttaagagtatgcaagattatgggattagtcattttctatcagttgacctttctggaataatttgccaaaatcaattgttttacatattgttaatattagagattaaacacttgatactcgttattctatttgtagtaattaatttcagtattgagtctatgcttgatctatgcatttaacatcatggctggacttgtacccaagggggtgtggtagatgagagaataaactgggttattttttaccagatcaagtttctggataattggtcacaatcaattattttactgaagaaaaaataaagagagtacatgtcatcacttattgaactgaaaaaaaaataataacgttgtagctgaagacttgggtagagcactgtaaagaagagaaatggtggattggattattttttcctctctgcaattacataaagcataaagctcgtgggctggattaatctccgaactcttatcttttatgttgtaatccttaggaagtattggatagtacagtgtaaatagcatgttatcaagttgcttagtttctatgtctcctctcttttctgtctcagtctcttctcttactgccctcttagtttgcactattttcctggcaccagattgccagagctgtggaggacaagcttcctgttttcttggaaacagtaatgttacctacctctaagagctgttctgatctattagatcttttcctccctgcaatgttaatctctaaaagaaatcagatacaacattctttcattatttagacaataattgcaggaatgttattctttttgtttcattcttctgttttccaatgactggtagtgccatattttaaaaataccagtagctcccttctcattaactagttcattatggaatggccttattcaagtatgactgattctagcagttaaagtgaggtctcccttccaccccaagcctttgaaccattgtgagctctcaagttgctttagtaagattctcataaaagagaaacagttgctttaataggaaattgtctgtgcctgatatgttcaattttttcttttttcatgtagaacactgtcattg

SEQ ID NO: 8517 - DNA, 817 bp, Carica papaya
  Intron number 2 from transcript evm.model.supercontig_44.4 (locus evm.TU.supercontig_44.4) derived from phytozome v7 .0 (chr-ID supercontig_44; pos 56302 to 57118 reverse stra nd)
tctacgagagacgcttaatcgagaggcacataacggttcgctgcttctccttctcggttcattctagggtttctctttacttttacctattgctcttttttgttgctgagaagatattcacataaacaaaatccaggttccttatcagttgtgcttatcttactggttagttaccgtgtattgctttaaggacattttctcttatcctttcctcttcgtttactcccggtttcagtactatgccaattattggttttagtgttcaacatttcctgctaatgtgtgacattttggagtttaatcaaccggggacttgatgaaactatacatgctttttacttagctaagcccaatctcacttctagtttttttgtcagccgatcgataagttcctcctttctttctttcttttctttgtttttttttgtctttgattttattttggtagaaatgtaagtttcacagttctttgaagctgatggaagtatcaaaatttacgggaaacttcttagttcccatgggtcttagaggactggagcctttaataagctgatgaataagttgaatgttgacaatttaattttaagaacttccttacaagtggattctgtgtttttttggacaccttccccatctattgtcggtggtgcgtggctgaagctttgctgttcaagtgtcaaactctagggagcttatggtttacattctgcagttgcatcttttgacttgtgttgattgcttgttatcatgaaaatggtcagtaaatttagacgaaagattgaagattcacatttttatctgcttcttaatcaggatt

SEQ ID NO: 8518 - DNA, 3771 bp, Carica papaya
  Intron number 2 from transcript evm.model.supercontig_184. 27 (locus evm.TU.supercontig_184.27) derived from phytozom e v7.0 (chr-ID supercontig_184; pos 236375 to 240145 rever se strand)
acaagtttctagaagctcttcaactgtaagtgtggttatatcattttcttttccttttttttctcactgttaagtgctgaattctccattttagttcgtcaattcggtaattttttcgttgcttgggaaattgaggaagaattcacgggaacaattttttttttttttatttttgttttcgtgtgtcaagtatcgagaacattctagattgaggtggtgttttctctaaggagttatttttctaagttctccgttttattcatttaatagcactagaaaggagaatcccaattttgtgattggcagtggtattagaaatttatagcagtaatatataattgcaacagcaaaagaatagattcctctgcccaatattatttaaacatgttgtttgaaggtaggatccagatctatgtaaagcaagattatgagtttataaaaacttaaaagctactaatagaatgtttgtttataagctaagctacagatcttacacattattgaactttaatagtttcttaatgaagcaaactaattctacccacaaagaattatagatttatcttttaactcgatatgggataattacgagagaaaaactttaattagataactgaattacagcccacatataattatctttaattaaagagagaattctaatattctttcatttggctaacaaaattattcaatatttactttataaccagttattccttactaccacaattaaacatattgtactacaatataaatcctcaatagaagagtcactgtgcttatagccattaaaattgagaattttcttccatgcatcacagtgaaagatagttcatacttagtagagaataaattgtagtggtattcaatttccaacttttttttatcaaaatagatcacaactccatagatgacaaaaatttgatgttcacaattaaaagttatgtttaaattactgaaaaacaatacaaatagtcagaataaagtttgaatgaaacctaagagtcacatatgaattacataattctggagtacttcagcaagaaaaccttttgctgtggtattagaaatcattgtctcagaatttaccggctcaattacgataattctttgcttatcattctcttacaccaaataatttatgtccatacgcttactttggctcccacttttgttattatccgaaaagaaaacagcagccttattattatcacaaaagatctctagtggcctatcaatagaatcaaccacttttggggccagatataaaactttttgaccatatttctcgtgatgtggatgatgcaataactgtttgctttatgcttctccaaaatacgcatccccaactgagagaaaaatctatcctaaagtagactttttgggtccatgcattgagcaaaatctttatgtgtgtacataaatctgtagtttttggtctcttgtaaacatctcagaacccttttggtagctttccagtgttatgcttggagtactttgatatctactcaatatcaagtctagtacaaacctgtgggaacataaggcttcttattgcaaaagcatatggtatacttttcatctgcccctagtctgatgcactatggggacattactgaatttttctcttttacagtgggtgcaactattggtgcgattttgcattttgaatttttccaaaactttttaagtgcagatgtttctagatagtcctaatgtctctatgaatctctatgccaacaacataagaagcttcatcactatccttcattttagagttttatgccaaaaattgcttagtcccccaaaaactgcttagtcctgtgcaacaaacccaaatcattacatgcaagctgtcatgttgaaactgattgtgaaactagaggataagatgttttcttaatatggatatggttctttaggtacatatatatactagttaagtatacgtggaactagctatatatgttagcaagaataaaggcaaataatcaagggatttacatcttaatgaaaaaggtatagaaaaaggaaagtaaatatctgcttatattttgagtttaatggtagatagtaaaaaatcatatgcatacaggattagaaatgtatttgctcgcacttggcttaaatatgcattgatcaatgcttttctcctcaaaaaccatgtgaggatggaacattatgtaacattatataccatcggcaggatgctggttttaatccataaacagatttctcttaacttgcaaactaaatgattatcctttcttttaaatcttgaggctaatgcatgtataccacttcctcaaaatcctcattcaggaatgtagttttcacatccatttgatgtagttgttagtcaaaatgagccactggtgccatgattattctaaatgaattttcctttgaagctggagaaattttttttatggtaactaattcagtcctttttagttcaacatgagccacaagtttacctttatttcactcgacattaccagatgaatctcttttgattttgtagacacatttacatcgaattacggaggctgctttggtaattaaacaagagcctagattttactttttagccaattattccatctcttctatcatgacatcagatgataacatggaattttcaccactcatggcttttgagaacatgtttggatcatcttttaccccggcataatagttagagtcttgaaaatgtacaacataatcattagaaatgactggccttctaactctagaagcttttctagcttctactgtttcttaagcatcttgagcagtaggttctagatcagtaagaccttcatgagtttgttcctcatgagatagttttttgttgaatttcagtgagatctagatgaccactttgaaccgcaatcaactcagctccatttaggtttaacagaggtggttccctaatttcttgaaataacacattttaataaaattcaatttcataatcctcaaggaatctcgcatttttagcttcaaccattttcaaaggttgtgatggaaaatgaaacttaaattccttagggaactgcgttgccaatgaaataacaatttattgtttctgtatctagtctcattactactcgacaccacaaagatatgcatgtctttaacttggttttcctctatttcataattgaaaaaggtgtcttacaggaagctttagatggaatcctatttaagatatgcacgcagtttttaaggttcactccataaggagataggaaaacttaggctaataatcatgcctctaaccatgtctatagatgtgtgaggatcattttgatgaattggtctaattccttttagcagaacaaatttgaacaaataccaaataatatgattagagtgataaatgttagaagtacatagaaataatacgtagtacaaagaattagggatatagagcatagaagagaaacatatgatccccgttaagaggccagactcttggttcagttaagtcaaatagttgtcttaggtcaagcaatagaaaaggaagagaaagaaatttgtggatgaggaacagaggagtcgatacatcaaagataaatgtagcatgtattccatattagaagtaacataaagttatctaagttgtttattaggttacaatttgctttgaggaacttctatcaggttacatttaaatgatttgtcttatttagcttttctctttttttggttgcttgactcctttcaggtttgatcgtgattggaaaaagatcgaagcatttg

SEQ ID NO: 8519 - DNA, 1272 bp, Carica papaya
  Intron number 4 from transcript evm.model.supercontig_414. 2 (locus evm.TU.supercontig_414.2) derived from phytozome v7.0 (chr-ID supercontig_414; pos 4592 to 5863 reverse str and)
cattatcctctctttaattgtaagttgatctctttccccccactatcaaatcatctgatgctataaatagatttaggctgggattttgagtttactaccctttttaatcaaatttaacaaatctaaaaacattagataaccaaaaggttgctttttttttctccatttttaaagggtaaactatatttttgtttcatctaatattttttgttgcaattcaaaaagtttaattttctgacaattggttcttgtcaattaacatcaaattattagttttagtaagccactaacaatacatatactttttaaaaactctttctacaattttagtttagttttcgtgtttatatttaagaatccgaatgcatgaagtccttaaaaaatcaatagttttctgtaaatttttgcaagaataatcaatagaagctgagtttcccagaataagatagattgtctgaattgcaataagattgaactacaaagggtaaactatactttgtccattgttatttcgcttttactgaattttcttctttaaactttattagtcttaacatataaaataaaaggatagttatatatttcatatcgatctatatccactttgaattttttggaaaaatgagaattcgattcttctaaagtaataaaaaaattatatttcttaaccccaataataaaaaagaggcgtgagattaaaaataaaaaacattttcattttatattttaagatcggttcattttttcttctagttcgacccaactcctacgtctaatcttcatattagttttaacatagaacttagcttttatatttcgctcgtacctgaatcctttgggatacgatttgggagggatggaatatacaacaagttttaactttatatgctaaaactaatatgagaattttatatgtaaagagtaatatgagactattacatatataaactgagaatggcatagagattggatataacatagcataaaagtaacaaaaagattaaatgtgagaattaagtaaattaaattgaaaattaaactatatgcaacacaacaatataaacaagaggattgcacagctcaaaaaattcaacaatgaggaaaatagaagaagacaaaggaaataatgaaggatgagattaccaaaatatatatacatgatatatacatatatatatatgtataagtctgttgacaaaggaaggtacttaagttgtttcctgcttatggatgggctggtgcagcaagagattgtgtgttacttgaaggaca

SEQ ID NO: 8520 - DNA, 874 bp, Carica papaya
  Intron number 2 from transcript evm.model.supercontig_11.5 0 (locus evm.TU.supercontig_11.50) derived from phytozome v7.0 (chr-ID supercontig_11; pos 568435 to 569308 reverse strand)
ttttctgatcctgggaagcgccagctgcttaaccggtatagctagctaccattctgttagatggttctcggaaaataagtgccttctctttgcattgtgagtgtgacatgaattttgcatggaaattcaaagtttgatgtggatttaatagttacatcaatcaaaatacacttagtcagcatagtttatgctgccttttaatattttcatttctttttctggtgtcaattgtgctgcaggagtttgagaaaaacaattaaagttgaatcatgtttttttggctgtgatatgtagatttgatcactctaagctgttttttctagtttgaactagttttttagtttattttttggttgaaatggaaccaattacaatctcattgttgataaagtagatttttcagatgctcaaaactgtttaaaaggacagcacgtatggtgtaggataaagacttttgttccttcaaaaaaaatcaaacttggtcaaggtgcaacttctaatcaattctttgaactagatgcttcatcactcatgggtagttgttttcacactctttgtagcttgcatatgaagatttagggctcctcggctcttttgctcttttctctgttttccacttctagtattttcctagtctggaatccatgctaggtcttactagtctattttgctttctccaagttatatttccggaaggtggttttactagtgtccatttttttctggatggcttgcctaaatctcttgccatatgtttggtaatatatcatcaagaatttgcaatgaaatcacacctgcaatgcacgagttttgagatttcttttcatgtcatcttctaggctattggctcctcatatatcttctggcatctttc

SEQ ID NO: 8521 - DNA, 1630 bp, Carica papaya
  Intron number 1 from transcript evm.model.supercontig_7.18 9 (locus evm.TU.supercontig_7.189) derived from phytozome v7.0 (chr-ID supercontig_7; pos 1906560 to 1908189 reverse strand)
agaagagagcgaagttcattcaacggaatcttaatgtaagtaagcctttctttctccgcctcaagtttatgagtaattgaatttcaaattgaaaatttacagaagttgaaaatcacagtccacatgtgagtcgaagcgtgaatacctacctaattgcttcttagaaattttgataataattttatatatatatatatataaaactgctattataagctgttttcaaatttcaattgtagatttgctgcttcttttcttttcgtgttttgaatgagagtagtactacattctgcgtttatatatatatatatatatatattccttaactaattacttttggggcaggagcagacaagggtatattcccaaggaaaatttaaaatcagagcaatacaaattagtgaatgataaattagcagaactcgtgaacgtaatttacatattttaaattttattttatgaattttcatgaatattttcaattgatcttcgtatttttaaagtatattttagttaaattcaacttcgattgcagtaggattgagactagttcggtaacgccagattgaatcacttcatgatttttatatatatataaaaaaaaaaagaaagaattctggtttggttaatgcccagattgaagtggacggtacatgaggttacaggtgtagcgtaaatcctccttcctcaagacacgtcactacgcttatcgtggaagattattattccttttacaatctgcttttctctcgttctttattaaatacctttttgtaggtctctctgttattaaatgtcgcctaagtactcgtttgatcttattattgtgaactcataaacaatgttttaaaaataatttctattaaaaattatttgtttttttaattcaatttttttttttaataggaacagaatgaggtgtaaaagtggacattgagtttttaactatgttcggaatattatattttcaaagttagataattttagctaatttttatgtctcagaagttttatgcttgtcttttaaaattattgttacttattaaaatgttaacatttaagttcaaagaactaaatacttataaccattttcggaaaataaaactattattatttgtttctttattttatatgttatgtaacttaattgtcttatttttaatatttttattaaaaagttatttttagttatttattaatttttcaaatacatgtttttactaaatatttattgtttatgcagaatttataaaactgactatacatacttttaattttttttaaaaaaaagaatttcatatatatatatatatatatatatatatatatatttcacgagattatcctctttacatatgtttataggctaaagtcaaccagactgacctgatgtattctatgcgacagacatctttacttattttttgatgtgacttccaagaacaaaaagcatatactaaaaatttatagaaaatatatatatatatggtaacatttcaaatccttttctttttagttaatcttcgtagtgttacttgaagatggtgtctaactcatgcatgtaatttgtcttttgtttgtgtattaattcacttgcaccgaacattaaacagcttgttagccctggagc

SEQ ID NO: 8522 - DNA, 8192 bp, Carica papaya
  Intron number 1 from transcript evm.model.supercontig_17.9 1 (locus evm.TU.supercontig_17.91) derived from phytozome v7.0 (chr-ID supercontig_17; pos 1161823 to 1170014)
gacctccaactcgagttttactactcagaaacgtatcataacttcacaaattattttgcttctaatgcaaaatcttggtttatttcgtgataggcatgaatggagctaaagtcgagttcatgttaatttatttgccgttgagatttttcagattgatttgaataactgttatcaagtaccattgatcttttaggcttcgacattgttaagactttcgttgtaacagtaggtccattacccaaatctgttgcaccggaaattcttttttcatagaatttgtttaacatgactttcgttccattcgtgcttgctgtgtgaatggcagaaactctaaacttacattgcaagcagaagcgcacaaaccttatccctagattgcaacctgactcttacattagagaagtgaatataccataccacatggacaaattaaacttaaaatgaaaaggagaaataattgaaggattttttctttacatagtgtgctgactagaaaacccaaaattatgataatttctcccataagaagtaagtgtctgtaccgaagaataccatatggtatgcattttatcccctgcacctgagtaaactgccaatacacaacagtacaaaacgaggagtgaaccttcttcaactttcccaagagatatttgtgaacaactgaccagttaacgaagatgaacatttttaagaaagctaatagagtagagaaaatgagtgcagggctggagcctggaggtctaccacctagaagaaagtgaaggattatatagaagagctttagtcaagtatgtgggacgtcacaaaaaaagggatctctatgtattattcaaatatatcctagtgccctaattatttttttttataaaaaaactaaaccagcttgtgtttgtatatatgtgtataacagtttaaaattaacagttagagtcaaaacatctatggttttctgagaaattatgtgtcatctctctctactttgactgaacaaaaagtctccttacaagctgacctgacttttagaaaacttaaacttcaagaaattaaagacatgatcaaccattagcagatcattcttcagaaatagatctcgtaatatgaaaaaaaaaaaaaaaaaaaaagaaaatggcttgtattagtagacagtgtaaatgtcttgtattcttgttcatagtgagagtaatatctagcagtttctttccatgtgggagatagaaatagagtcatgtttttggaggatacatgggtagggaaattagctaacaaacttcctagattatgcaatctttcagccaaacataatacttatgtatccatgtctacccacgaaactgaggggaggacagcctggaatttccattttacgcgcaacaacctgtctgatagggagtctttaaacatctcatccctattaaccactttggaatccgttctcatttcaccacagccagaaagtggatcatgaactcctgaaacatcaggaatgtatacttgaagtccttgtacaacaatcttgtagaaaaccccaatcactcttttttccacgtagccaaggttttttggaaagttttagtgtcttcaaagtttagaatttttgcttggacaaccagccattagaagctcaaaagaaaagtgatgcaccaactttgccgcccttaccgtgtcttgtcttcagacatctacataatgtgctttagaggtggtgagacccactcccacctgttcctatattgcagctcagcctggaggttggggacaaaactgttgagattgtttgacctggtttgcttaatgcctcctacagtgggaaggtttattttctcctatatatgttgagaagggttgagacatggagctagatccttgtggcaagtggcgattttgccagtcttcggtgcatttggctagcttgaaagcggtgaaccttccaagaccatattgctttccttgatgaactttgggataggactaccttcatggcaaccttgtgggttaaggcacatccccatagtgaaatcaacacgcgtcacgacaactagggacctattctctatagcctggacgatgttacaatcatgtgatcatttctattgcttatttgtgtttttattttacttaagaaggttactttaccctccgttcttgtatttgcttctttcttacccttgtccaaaaaaatttcaagtagtttttagctacaagtgttttagagttttatttatcagattatcttgcaatttcttaatcattatgagattacctagcaatttctaactagaagtgtttgagttttatttataagttgcttagtcattatgaaagtagtattagtagacactatgatataggatagattatggttaatttgcctacctatggatttggggacaaaaactttgacattacacctaagttcatagacatcaaatctaagatgccttaatttcgttgcatcacacatccaaaaaattaggactcttaaagtattttattgattaattgaagtctgtatacaacagatgtgtttagcatgggttttcttaaaaacttttggcatgtgattagagaggatattattgaactctgtaaggagtttcatgagtctgggtcccttgtcatatgtttaaactccacatcctagtatttatccctaaggtggaaggagcgacatatataaaggattttagacctatcagtctcatatggaatgcatacaaactcattgcaaaagtgttgataaggagaatggctaaggtgatgtggatggtggtggatgagtgtcaacatgcttttgtggatggtggatagattctagatacgactcttattgccaatgaagtagtagatgaattgcttcataaaattatggaaggtgttatgtgtaagcttgatatggagaaaacttattatcatataaaattggggctttcttgattgtacgtgaaacaattggattgtaaggagaaatgatgcaaatgcctcaattcatgcatctctcaacttcttttgcaattatggttaacggggacccgccatcgttcttcagagtctccagagattttaggcaaggtgacccttatcccatttgttattatcatgataattgacgctctcaacaaaatactgttaagggctctagtgagcttgagatgtttaagggatgaaagatgggcgatgataagcatgttaaggaggcaactcatttattctttactaatgatattttgatattttgtgaatgggagtagagttcatatgcatcttgctgttttcaagctgtttttggtatcaacgttgacctagcaaagtctaaattagtgagagtaggattttggggtataggaatgtagaactattaatcacatatatatggctcccattaggaccaaatataaagatgtggcacttaagactgtagttttaaagaggaacattttatctaaagaggggagacttacacttattaagagcatgatgacaacatccccatttattatatgcccctattgacagttcctgcagatatgaccaaatgactggaataattcaatatagattcttatggggagacacagagaacagaagaaagtatcatcttgtagcgtgggatgaggttaaaaaatctatgcatcaagatggtttgggtatgagatctttggtgaaggttgatctactacccatgacagatcttgcacagacaacatcaatgaatacttctacatctctttttgtggttttttcagagaacaatcctttcgctagtgtcatttttaagtatcatagaattcaatttgcagctcttaaatgttcttcagttgagtcattcatgaattgacttataacatttattgcaaatttaatgtctgaactagtgtgtgagagatgtatcaactttccaactaatctatcatgttatccctcgtttattcaaggactttctccatgtgctccaaacttgatatttggttccattagggtgtctgttagtttacacccactcattcctttttccttcagtaagtcgactacaactttctttgtgatgcagtgactcttttcctggatcgtgctacttccattttaaggaaatacttcaaattccctaggtctttggtcttgaattctaaggcaaagcattatcttgacttttaaattttttttcatcatttccgattaacactattttatccacataaacaataagttcaacaaattttcttgtctaggagtacttcacaaacaatgcatgatctatttgacatttcatgtatccacacaattccactactcgattgaatccatcaaactatgctctaagagattgcttcaatctataaagagctttcttcaatttatagatcctattcatattatcctgtctcaaaacctagagagatatccatgtagacttcctttataagttctctagttaagaaagtatttttcacgtcaagctggtgaagtagccatcagcatttttgttgtcaataataacaatactcagattgtgttatttcaaaaaaaaaaaaaaagcaatactcagattgtgtttaactttgcaacagggacaaatgtttcttggtagtcatatgattgtgtgaaccattttataacttgccgaattttttacttgtcaactcttccatcggctttatacgtatagtgaagacccacttgcaacctattgtctcttttcctcttggtaattttgtgagttcttatctaccatttttctttggggccttcatttcttccaactctatcttccagcttgtactcatgcttcttgaactatcttggaacatgtatattatctaatttgtatcaaatgtctgaaatcctagtgataatcttggatatgatacaaaattgcataaacaatgatttctacaagatcttaccccttttcttagtgcgattggccgatcatctctagttgtatcactttcagtgtggtcaggttgtgtattggaatattcgttaggggttgatatttgcctatgctcagttgctggaagttgctgctctatttcatgtcccagtttctttcttttagactgaaccataatttctccatttttggcttattttgggttttcagtagacaagttctcttgggaatcctcctggatagattaagattttgaagtttgtgattaatgccctggaattggttcatgtagtgaatagagttgtcttgggtgggtagtaatccaatagtttggttagtttactaatctgtccttgttcgatcttaaatctgggaatcttcttggtttctctcccctgaatttcagatttgggataaaattgttgttgctcaaagaatgtcacttccatagaggtataacatcgttagattgttggtgaatagcatttgtattccttttggtttgaggtataccctaaaaatatgcacttaactgctcttgggtccaatttgccaaggtgttgtgagtgaatgtgaacaaatgcaatgcatccaaagatttttaatagaattggtgaaatggttctattatgtaggtatgatgtgagtgatttttggattgatgccataaattttagtacttgagaatacattgtattgatgaggtaaatggcagtgagtatggcttccctatagaagtcgtttggcacattggttgaaaaaataagtgatccggtttcctcaagaatgtgatgattctttctttcagctgtctcattttgttgaggtgtattaagactgatgtataatcccttggttttctaggtagcttccaatgcttagtttgaagtattctttggtattatcagttctaagaatttgaattttcgtgtgaaaccggatttaaatcatgttgttgaatttttgaattatttccccaacttcatacttttctctcatcagataaaccaaggtaactctggtgtgatcataaacagaacaaaccatctagtctcattaatattttttattcttaatggttcccatatattactatggattaagaagaatggcttggagtctttgtaaggctgaatttggtacgtgctccggatatgttttgcagattgacatacatcacactgaaaatccttagaacttttattgatgaataatgaaggaacaaacctttgcaagtaactaaagttcggctgctataatctatagtgccacaacatgattgcactatcattctaagaagtaaacaggaaaaatcagaggataggtgctcttgagtgtggttattggagaagatttagagtcctgagtgtactttagcattgccgatcgttttcctcaaaaatagttcctgaaattcaactacgtttgaatagaagttagcaacagctctcagttcttgagtcagtttactagctgacgaaatatgcaacttaattcaagaacatagaggacatcatcccaatttatgtttttagataaacatgcagtgcttattcctactacttttaatagaggcaagtctgcaattctgatatagatttgtttttgacatgggctatatgttttgaacaattttaaattacaagtcagtgatctgaagctccaaagttactgatccatgcattgatttaattttggagattagatgggatattagtaaattttcatggttgggaaatagatctggtgcctgttagtggattatttatttggtggttactcaataaatctctcaagtagtcaatctgctctttactataaatcaatttctcattctgttccccacctggtacttccgcttccactgttaggtttcttctcaactctatttccagatttctttttgtctttttcatccttgattccaattttgtttccaatgtggtggctttccatgaagcttctagcaaatctcctttgagtggtcaccctttctacaacgatccctctacaactttccctttttatgttttgtctcccattgaagtggctgagtattttgagcaggaagtgctgaactttctggaatatgaatgtgttggattctcgcgcatgattttctttcggctttcttccatgcgcacttctacaaatgcttcatgaagactgtgacttggtttttcttccaggatttttcctcaaacattatttagtttcttgttaaggtcgggaagaaaatttttacagcttcttctcagcgattctctaatattgaagattgtcttctgggcagtactgccattgctcttcatagatcaagttgttgctagttccttgtcaaggtgttgaagtattggtcactgtcaaatcactgtcgtacgcgatgaagtaagctttttacagcaaaaagttctgaggagttatctgtcttggagtatgtttcacaatctgtgtcccagatttccttagctgctttgtataggaaaattatctcctagttcatttgtcattgaattgtcaagtcaacatattatcatactatctttggctttccaagtttggtactttgggtcttctatggccgccaaatcagtggcccctgtaagatggtcacctttctttttcccacacatgaaaatcatgacagacaatgaccaaggtagacagttttggctatttgacttgtattatggatatcactggattatccatcccattgttccccatcagaatagtttctgttgaatgcacaacttccgactttggggcttgaagatggccagccatgccgtacttcagcattctgggtattttaggttagatggaatagaaaaccatactttaataccatgaagaaagctgtaagttctatttcatggttttcttctatattattatattatttatatggttggacaccaaatcagtatccccaaaaatagaacagaaagtatacttctaaaaagtttcagaaacttttctttatttatgattctaatatcaaatctacatcccaaattttctcctaatatttctgagtgtactaatatgaatcgttccaatattcatctgtattcatttttctgtgaaacatccatctgttgttattgatgatatagaatcaagctgtgatggcaacaataaatttcttccctatatattttctgtagatttgtttgctgtcttttcatcttttatgcttttaagatgtaaggttttaatggaaaattggatgggagaatggtgggaagggtggctgacttctgtacttcattcttacaggttgggcctggtgaggtag

SEQ ID NO: 8523 - DNA, 3478 bp, Carica papaya
  Intron number 12 from transcript evm.model.supercontig_17. 78 (locus evm.TU.supercontig_17.78) derived from phytozome v7.0 (chr-ID supercontig_17; pos 1005497 to 1008974)
ggtatgatctcttgtttatacgaatctttgaaacccccaacctctccttttttctgtcttcacattctcttttatggcacagaatttttttttgtaaaaaaaagacaagcattcacaagaaaggataaggtgttaccattgggttcttttagatttttcttttggagtgtcctgtttccagaattactataggccttgtttattggaatatctgggatctacaaaatttaaaatctgaggatttaaaacagcaaatttccggtgctagagttaatatttttcctctatatgatttagagattaggaatattaatgtttttaaaatatatatatatatatattaataagaaaagaggatgtagaaccagttggaggacaagctattctcccagaaggacaaaaaaggaacatacaagataacaaaaagcctaagaattttagtgcttatttgataattttttcttcgatgggaaaaagaagcttcaccaggataagagaaaaacaaatgtagggaataagaataaggcattacaactgatacaacaaaagaataaggcatggacgaaaacgtccttcgatgaagctcttagatggctatatcagaatatttcccatgaactttggcccataaggaagataaaaatgtaactatatcccacaactcaaaagaagaataacagtcgtcaaaattctgttatttgtttccagccaaattatccataattctgcaaaaattgccctctccataagggcttagctcccttcttaacctccttcccattaatatatgagttcattatgcccttaatagtgggaggaacaatccaacaaacaccaaataggccaacaagttcggtccacaaattcctttgcagttttacaatataagaatagatgtgaatgtgtctctcctttgtggcacataacatagatatcaggagacagtgcgttgaggccttcagacttgtaacatcttaatgggtaactgtccatgtaaacacatttatctttgaaggaactgatgctctctagaataccttgtgataggagaatgtctggagattgggtttttcatgagatgattgaaggacagacttgcaagagtacaagctcgggtattctgaggtccatattagtgtctagttgagttgtgatatgaattggctccaatagagtcacaattgtatttctgaagtctccctttttggtcggtttatggttaaaatggaggttctgtactaccgttccatctgggatggatgtgaaacatacaggtggattatgtctggatgataaatagaacaactaggaaactgtgtggccaacagctgcacccttacccaagtatatcatccaaacttgacttttaagccatcattcacttgtgacctggttaaaggaagaaatagaggatccacttgggagatggctttccaggagtgcagtgagaaatggatcttcctgctatggcatcccatctgtcccttctacccttatgaatattgctaatcacttgtgccacagtgttaattttataataacaacaacagtttcaaaatatgttgtgtaaattttctaagattatttcacacaattattctattgtattatgatgaagaacgatacagcaatatataggagaaggattacaccaggaaaccctaaccttttgtccttagttcggtaagataaagatagaatttgagaggaaatcttggaggatctggttattgaatgaccaagaatccccattgcataggagtcaaccaaatctaggattacatagaaccccacatcattatcactttcctaatctagaatcctactggttgcaaagaaagaactaagtgtattataatggctataacagtttgattttagtggtgtaatttgtagaataatagatataattaagtggtgttaaaacaagtttgtaaagagaggtaacttaaaactgtgttttcagtgtttatgataattttaagggtacccttcataataggagcagtaagtaacatcgacagtggtatatgactgtggttgcagtgacaagataaatgtcagtcaaagagggtactgatcttggtaggttggtggtggtggttatggtcgtggtcttgatactggttaccaatgcaagtttaaggatgggtttgtaaaattcaagacatggcaattagctggtatgtgctagttcttatctcctaaagattcttaattatttgagaaccataaatacataacaggactagaatcactattgataggttgcttcgaacaagattatcactgaattatgataactggtcatcagctcaggagagaaataaccttcagcttatgcttggtgatttcacttcccatccattttctaatggatgcttcctggaatctggtgcagatttcttgaagtagtgtggagattgaacaagcttaactggtaattggctccccctacctactgtagattgggaagtttctgtcaaattaaagaattgtttgccaaatataagcagactttttcattagaaattacaactttggaacttactattaggaacataggttaaattaaataaaaaacaggtcctgttagtttctattggtttgagcgaaaatgacttgaaaatattttcagttaaagatgtccaagatgtcctctttagaaactatagatagcattgcagcaattattttttacagaatggcatgcattagaaatcacattaactctgaggaagattacagaagtagtttataaagactcagatgtctcaaatctaacaatttgataaaattttagttattaacatgctaaatttttgtgtaaacaagaaagcttgtctcctttttttcaaaaaaaaaaatgcattgtgaatttctcctttgatgagccaagtatctacagttataaccaacttatgattacaacattgatagttaaccatattcgcaaacaagaattagagaaaaccaagaaaaagatagagcaaaagagtatgggtttacaagaataattgagcattgagagaaaatggaggatcagagataatggcaatgttacttcacagagaatgagaaaacagaacacataaaaaaggaatatgtttgatatgggaaggagagaggcaatagcaatggagattatgaagtcaagagaaggtagttccccatttctaaaactggacagtttttctgtttgacttatcctttccccacgatgaaactcaaaaatgtgaataaaagatgaaccatagaaaataattttctatcagccaaatgaagccttagtttaaataaagccaggtttctttatcaagcaagagatttggatatatggctagctatgatttttctgtacctttcatttctttccgaaaatggccctggtgtaacagttatgacatttttacatgtgctttcttggtacctgcaagtgtaaattacagtccttctattctgttttgctgcagttatc

SEQ ID NO: 8524 - DNA, 2569 bp, Carica papaya
  Intron number 7 from transcript evm.model.supercontig_801. 2 (locus evm.TU.supercontig_801.2) derived from phytozome v7.0 (chr-ID supercontig_801; pos 5279 to 7847 reverse str and)
ggaatcttattgatactaatcacttgagatacaaggttagggccacattttccacctacattgatatcctctgtgcatgatttcacttggtaggaattttttgttaaggagacgagctttaaacattaaggccttgtttacttgtgggaaggaattttgcatgcaacatgacatacttgcactaccatttcaaaaaatttagaaaatgattgtaaaattatggagtaagtgtagaaaaaatgataaacagtctctaaactcttgtcatattttcacaataacttgccaaggcttcttttcattttttatcaactatgcatgtgtttatgtatatatatgtaagttacaaaatgaaaactcaaaacaattttctataactaaagagggcctgattttcttccacataaatgtcctggactatctggttacacataggatattaaagtattgaaatggaatttaactgtcgggttctaacggctaaaaacaaaaagaaacagaacggaaactgaagagcagaatagttatctatattgtttagttatgacatgagatgatagtaaagcatctaaaaaatgggaaaagatgcagcctatctaaactgaatagagcacctaaaaaataaaagtttgtatttatttcctttttgtgtttaatttttttttttgaaataaagagtgtgaaaagtgtattaagtaaaggcatcgaaggggtgccattcatctacaaaagatttataagtgagtatatctacaatgattccaaaattaccaatactacaaagatcatgccccaaaaccatggaactaaaataatgtaactatctatctctaaagttgagaaaaagttctttctttccttcaaaagtcctagtgtgtctctctttccaagtaccccacaagatggccaagggaatgagatgataaatgcccttatccttacaaaatccctccaagtcaacaactcattcctcactgaccccaccatgatccagttgatacccataaggccatagactaagcgccaaaggctgtaagtaaatggacaccaaagcagaatgtgattgcttgtctcggtgtcacatttacacaagaagcatctgttgactataatcttcctcctttttatcaagctgtctatagtcagaatatgctccttgaccgcttcccaggcaaagaaagaaatacaaggtggtgctttagacttccataccattttagtcggaaaaatgaatgatccattcttgttgtgtcctgccaaatgcttatagaaagaattaacagagaactttccatttttctttaagtcccagatgagcttgtctgaattgttgttgaggcggacattggctagaagctgtaggagatcttcatattcatttacttcccaatcctgcaggtttcttgacacatccacagcccacaccctgctattatatgcctcgttaactaatatattcttttttagtgcaatagcaaagatcattggaaacctggacataaaactttctttatcaatcctcacatggtgctttgctggttgagttgtgtttaaattttgttgctgggacacttcaattttagtccccagactcacttttgaatgccacaacactggtatggtgtggtatctatatctgacacttgatgtacgtttcagattcttaacgagtcaaaaaagaggttatgatatatgataagacaaagatgataatgaaaactttaaaatttaaggtttatattagatgtgagaattgaatttccactttcaaagaatttaaaggtaggtatgaagatacttcaaacaaaacaaatcgtatcctaattaagctaatatgaagtttagaattaagaattgactacaaattgaatagaaaatatacaaatgagatctggaggttagaaggttacaaacaacgtagagatgagatgatcggttcttgaatgtctaattttttttaagaagtaatggtctatcaattatttatatacaaataattagtatccaacttttttttccattttcactacaaatatgaaactccaattttctttttgtggtaaaggttgttttttttttcatatatgataatttcttagcttcctttaggcttatattttattttattatttttttaaatgaatgttagtctcttcatattttttactataaaaattatttagtcaagcacttatgtccaatttgtttagcttcctgttcgcttcctaaattatttctggttctaatttttgtagtgttgattactttatgatttttttgtggttgatttacctcccctgtcaccttaaatttcttttgggtgggattcacttcccacttccaagaaattccaggtgaggttgggataagttaaacaaaattaagatataattatgcatataaccactcaaaattagattttggaattcattaggaattgaaatgaaaacgaaccaaatagcctattagatccattcccttattggacacttgtatccaagtttgagcagcaatttgttaatttatatttgatttttctctctgctttttgtacttgcccagttcttga

SEQ ID NO: 8525 - DNA, 1638 bp, Carica papaya
  Intron number 4 from transcript evm.model.supercontig_5.33 2 (locus evm.TU.supercontig_5.332) derived from phytozome v7.0 (chr-ID supercontig_5; pos 3065035 to 3066672)
ctcacttggtatgtaaacttattttctaattgttctgtattagaacaccctaattatgcattcccaaatatgcatttggattgaaattcgtgagttggaatcaaaatattcaaacactggcttgttttggttattggaacttgggactagacattgatgcatactaacataataacctgaaacatgatactcactggctgtggtatggatacagacgtgatagatgctaaatttatgtccaatgtgagtagactgggtatgttattttggcccaaagttcaattgaaccactattcagttagtttttttttcctgatcacaagcaataacattcttcctccatcagtcttattttcttgttttttcctatgtgaatagatctaggatttcagtcctttttaataggtagaacaagaatgtcaatatttgtgttacaaattactgagcgagttaataaataataagttaaaaagaaggtagtcgatatatttgaagttccaagaaaaaaactttggttaatagactcttgttccctattttgacccctatgatcttctctttgactctaaactagtctaaatttgaaagaatttttgttggaacataaactcttaacagtttcttttcctaccttatctctctcaatcttcagaatcttagtctatgtagccatcaaaaaagaatcttagtccactcaatttcttaacttgccccacttcttcctaaatcttgttccgtagttttagatgtctggttcaagaaccaaaatgaacccaatggaacctttaccatgaaccagttcgaaaaatttgtggtacattgatcacagacggtgttggtattggtaactagtaacttttggtgttggtattttttttattttgagctttgctaccaatgtttcttgtggaggggtgtgttgattgtgtgcgtgtgtaaattaacttgtgtttcataattcttatgcatgcatgcatgtgtgttgttttttcttggtgtgtatttattgtatatttgcatccatttgcatgcacatatagttatgtggctggtgagaaatgctaggatttttgaggattgctgttctctttctttgctttgctgggaaaagataacttttcggctttctttggttcaagatacgtgggctttttaaggatttgtttttgtctattttacatagaaattggcaggctgttttctctcaaatttttgctgttatcccagcttctttctccccccgcccccctcttttggtgaaatagtcctccatgatgtgccctttttctctatttaatatgatgtctttttcctgcaaaaaattcttgtatgtgcatgcttgtttcatcatgcataatttatgcacttatgtaggtttcttgtgttgcctgtgggtaatgtgaggtggaaaagacgtcttttgttgattcagaaaggtgttatatttttaatggttatgtatacatatgcacgcatccacatgtgtgtgtgtatatatatatatatatgattatgcatttcaagaaattggctacagatcatgtcatcattcagctttttgagtacagaatctaatttggggaatttcataaataagtttactcaaccagtgaagttgaactgcaggttatttctgtc

SEQ ID NO: 8526 - DNA, 416 bp, Carica papaya
  Intron number 8 from transcript evm.model.supercontig_64.9 7 (locus evm.TU.supercontig_64.97) derived from phytozome v7.0 (chr-ID supercontig_64; pos 675500 to 675915)
acagtacatccaataaaggtggttcttgttggcatctatgttgctaatttcatttttctctagtaagatagtggatgctgccattgctttccgttgccctgtctacttctattctctggaattggaatatactggtggctagaagtacaacttggattcttgtttttactgatagaaatgctgaatgaattaagcaaaatactaatctctctctctctatttctctagatatatatgtatgtatttccttggtgtttctaataaagaaatgttgaagtataactgattcagtaaccaccctggtcattgtgattatactatttgtagatggtgcagcattttggctcagtccttttcctagtttaagaatttgattctaattttgtaggaaattggagaacctgaaacagttaagc

SEQ ID NO: 8527 - DNA, 3455 bp, Carica papaya
  Intron number 4 from transcript evm.model.supercontig_44.3 8 (locus evm.TU.supercontig_44.38) derived from phytozome v7.0 (chr-ID supercontig_44; pos 344709 to 348163)
ggagcctgggcaggtgatagtctattcttttcatgcagtctcaattttctcctatcatatgttatcccatctaccatgcacataggttcagggttgaactttatgttatttcagttgtggttaataagcctgtcaggtcgcgtttggacggttaactgtcattttcttttcttaactaattaaaataagagtgactcatcaattgattcccgaaaattgcctcttaggaattggcatacttataaatcttaggtatttgaagtcatatttggtgtctccatgtgaaaccatctgtgttgactattatttatgtcagatatagtttcagaaaactttttgtagcagccattaattggtagcctccatgaagcctgatcttatgcttccttgatctctggaaggatgttactgtggacttaatgttgggtctatccagataaccttgatgtcctgattgcatcgctgcaacttagatgacactttttatccttgtattaaaactgtcaatgcatctattttttttttttttgaaataatcaatgcatctaatgtaaccaagttattccttaaagaggttgttaagttacatggttatcttctgttatagtgttagatagagatgtcgagtttaccaattatttcagatggtactttgaaagctcttttaacattgttttaaatttctcatatgcatttcactctcagcttaatgggtaatttgagtagttaataatagttaaggtgattagtgtaggtgcataatggtgtagaaggtaagttttgcctactgtaatccactgggaaaagcctcttcctctatcattcataatattcactacggacccctatttacttaatactccatcgtgatgcccatattttgagctagctgaattcctacctaattcatgatatgaaaatggagattaaacatattacaatgagtgaccgaatatgggtctgcttatggtgttcatgatatgatttttaatgctggtgatatgtcatgattgcactagactaagcattatccttcacatttgagaaagcaacacacagaactcatggccccttatttcatcatgagcaaacttggagctaattcttatttcttgatttgcctaatatgatcatcaacctgagttttcaatgtagagaattgttacccaatttagactttgagcctcctgttttgtctattggtgtttctataggtactcaaattcctagagctctaatatttcattcaccatttttagatgttattcgatcccccattctgcatatttctctgtttgtccccataattgggttttgccatgaaatttcgcttgcacctatcttgctcacacacaattccactttcatgtaagggggagtaacaaaatacaacattaataataaattgagtcatttcctagaaactaggtttatgagaacttattatttaatagagttcattctaaatcctcaattacttgatgactatcctcattctgcaaattcaacttcacttgaagcaggggaatgtttttctatcttagtacttttataggttcgttatttcttatttagttttaattcgctatttgatatcctaattatggtcataacagcactttcttagagaaacaaaaaatgatgttaccagcacagtatggggtgccacccaagaacaaaaagatgtttggtcttactgacagaagaggaaatatctacaaggctcctaattcctccattaaagagagcttgacctttaaacaaaatactcaatatttgaaactcaagcttttaaatatttgatagtctagcaaaagccctaataggatatttagaaaccacataaaaaatatgggagataccatgttgtcattcaaactattgatgaataaaattatagacatgttgatataaaagagaaagatactaaagtggcatatttcattaggagatacttatggaaatattatatattagtaaggtatttagttaatttagaaattattagctatgggcttatgtttcctatgagttcattgtttcttatttagttcacatgttatttgtatactttattattggttataatattaaatagttattttctttttagtagaattccgacataaacgtaattattggcagattattcttacaattagtgttcaaacattgaattattgatttgattattgagatttgatatctcttattttgtttcttgatatatattctccaagttttattttcaagttccctttgtcttacatcacatattttttcgtgattgagtgcttatcgaccttgtaattgtagatccttgatccctaattgaaatatacatatatattctctttgtctagtttggttccattgttctataccaccatcaagccatgttaaccaagtccagttgttcagaaacagtaattttaaacccccagcttactttactctccagataataattggttgagtcaattgggattcctttcccttgtaccaaggcgatgctacagtaagatgacatagcatggcagaaattgagaatagcatagcatggcaggacttgggcccagtttgtggctctgcaccaatctataggtagattttgaattgtgcgactttcttcatacgtgtgtctctgtaaagagccttaagaatttgagcacccacacatcagtgcggagaaaatgaaatttggcctgcaaacttggaacaaattgttagtattgaatctggtcaggaccacagtccaacaaaaatcttaaccttggagggagcaacaactttccaagttccaaaacatttaccaaaggcaattttctgaataacagggttgtggattaaaaactcaaaacaagatttgcacgtaaaggtaccagtggatccaaaggccaaactctatggttagaattcatagaaaaaatataacaaattcaagaagctaaattaaagaaagcatataaacagcctcgtaatcataagatttctatgaatgaatcagttccaagaaacaagatcatcagtttagacagtgcaaaaagaaagataggagtatagcgcaaagaaagaatgtaaggacaaggaaaatgggtggccagagcggtctgatgaatctaaagatcttttcgaaacaagatacacaagccatagcccattcaggactggattaatgggagaaaagagtcatatatttgaaaccctgttttatcattgtatcttaccttctatatgaaaataatttctcaatttttctcatgagaatagctatatatacttctctatttctatttatacttctttcagtacattgaacaaatatggggacaaaaattaatgtgagtggttgtaaatttgtcatgagttttatgtttcaattaagttgtgggtttaaccactgttttccactatttatagccattctggcaaccacataacagagcaattgcacg

SEQ ID NO: 8528 - DNA, 8769 bp, Carica papaya
  Intron number 1 from transcript evm.TU.contig_29422.1 (loc us evm.TU.contig_29422) derived from phytozome v7.0 (chr-I D contig_29422; pos 2762 to 11530)
ctctactccaagtggtctttctcttacgcattcgcgtaagtgcagtaagcaaattaagtttgtttccttcaattaaaaaatgggttgtccttttaattgtgaattacactctgtgttcttgtttttgaccgtctgttagtcctagttgtttgctggtttcttgtcggtttcatgtttggttactgagaaagtgatagaaaccataggagaagtgcaggttttctagctgagctgactcacctaccggtgttcagaggagattcttgccttcttatcttttctcaaactgggaggaaacaaaaaattgaagagggaacttgttttacttccttctatgtttgacaagactgcctttaatttgttgttttctttgaatagcaacaaaagtcgtgcactcttggcatttcaatgaacagaaacagacccgtgaacatctgtttcttattttaaatttattatgtttaatttattatttaattttctaaaagaattgggaatatacaattgctcttgttttcatcttgtgagggtatgaagcctctaggattagtggattaaaatttgctgggttatttttttgcctcgttttcctcttcttcaaatacttatcccaagttaatagagaattcaaacaagttaaacatagacaggatatgatatgaatattagatcatatttcatatccgtctccacaagatagtatgcccatcatgaacatccgtgttcaatttcatgtctagaaatctttcctttatctagtttttggtggctaaatctgccaattgattcttggagctgatttttaagatctcgtgatgatagttttggattttgtcttgaatgaaatggcatttgatgcccaaatgtttcattcaaattcgcaaaatagtattaacacagagatagtttgctctaatattctaacaatataaaaccactactaaggaattttcgtgaatagttctgtgagaagagattggagccatgtgaattcagtagttgtatgtgtagagaatgacttgaatgaatctataagaagtgaaaactaaataaaaattcagccaaaataaatatgatgaaatctgccgtaagatacttaaaaacaatcagacaaagataccaaaatttttaacgtgaaaaactccttcaataagaaagataaaaaccatgagaattttctgatccaagaaaaaaaagctctactataaaaattagtgtttacagcaacaataagcaaccattataatcctcaaataaatactcaataacaaatcaatcaaacaataagagataaacaaaggaatggagaaatatcaccaaagcagctattattcatgcaaaacgggtgcattctgattattcaaatccgatcttcaccgttcaaatcaaagaacaacttatcccgaacatgctcaccaaatttcagcctcatcaaaccacaaataactgttcgatcgttggagaaatcaaactagtcggtgtaaagaagaaaaacgtgaacagtaacttcgaattgaaagacccgaaatccaaccatccaaaatcaatctctactgtccagaatgaagaacaatgagttttctaaatacctaccaaatttcaccctgatccgaatgaagatcactgtctgatcgtgtaaagaagtaaaacacgttggatgtaattttttcaacaaaaaatttccttttttgttctctatcttttggtgagtaaaaacttgtttttatactgttttttaggattaaagtggtatactaaaaaaaaatcctaataatcctaatgagccaaaaataagtgggttaaaaaaggatttgagtttttccacttagaaagggaactcaaaacccaacaattctccctcttctaactacgtggaggaattcgccaaattggcaaccattcaacatacttcaaatttcattcttggtaaagcctctgtgcacatatcagactattatcattagtgtgtatcaagttcaagctcaagttcagctacttagatctaaaacatcacgaatccaatgatatctcatatcaatatgtttgaatctatcatgaagagtaggattcttatcaagatgaatagcactctgactgtcacaaaataaaacatatctttttggtgtaaagcccagctcattcacaaacttctttatctagagcaattctttacatgcttcagtcgctgcaatgaattcagcttctgtagttgaccatgtaatgcatttttgcaacatagattgccatgctacaactccccctgcaaaaataatcagatatccagaagtaaaattttttgcatctgtatccccttaccaaatcagagtctgtaaaatcactgagaataggtttctcaatcccaaaagacaacttcaaactagcagtactacgaaaatatctcaaaattcactttatgacattccaatgctcttttcctggattagatagaaatctactaacaataccaactgcataagttatatatggtctagtacaaaccatagcatatatcaagctaactactgcagatgcataagaaattttctgcatgtcttctttctcttactcactaaaaggagactgtttgacactcaatttgaaagacataataagaggtgtacttacaaacttagatctggtcatataaaatcgatgcagtaccttttcaatgtacttttcttgagatagctacaacttcttatattttttattgcgagtgattctcatgccaagaaatgtactttgctggccctaaatcttttattgcaaaagatttacataactctttcttcaagctatcaattctagaagaattagaacctacaatgagcatatcatcaacatatagtaacataatgataatattactataaaaaaatctctacataaaaacataatgatcaaaattagtcttcttgtagctttgttgaaccataactgactcaaacttcttatagcattgcctaggtgcttgtttcaacccatataaattctttctcaatttgcagacataattttcttttcttttcaccatcaaaacttcaggttgtttcatgtagattttctcttctaagtcaccatgaaggaaggctgttttaacattcatttgctaaatctctaaatcaagactagcagctaaccccaaaataacacgaaattgatgatatcttaaccaatggttagaaaatctcctcaaaatcaactccccttctctgatcgaaacctttaaaaactaatctgactttgaatcgtggagatttagaattctcttcttgcttcactctaaagacccacctatttttttatgatttttctatttttaggaagcttcaccaattcaaatgtgtgattatcagttaaagactgtattttatctttcataattgcagtccattctatattttgctcactctcaattgcctcttcataacatttaagttcttcttcatttatcaagagtatgtactcattaggtgaatatctagtagaatacgttcaatgtgcttcttgttgaacatcaactgcttcatattcaggagcaccaatctcatctgtattatgattatcattttgcacatcatgattctaaacctcaactgcatcaggcatttgagtagaatacgttcaatgtgcttcttgttgaacatcaactgcttcatattcaggagcaccaatctcatctgtattatgattatcattttgcacatcatgattctaaacctcaactgcatcaggcatatgagttgtaggagatgggtttaagtcaatcaaactaccaatttgagacttagatttctctaccttgttaatatcttcaatagtctgatcttctacaaagattacatcatgacttctgataactttcttttgaactgagtcatagcatctgtaactaaactcattttgcccatagccaatgaagatacactgcctagtcttggtatctaacttgtacctttcatctttgagaacatgcacaaaagatttgcaaccaaacactcgtaggtgttcataggaaacatctctatcataccaaaacctattaggaacattatttcccaatgcaacagtgggagttagattgatcacatgtgtgacagtatacaaaacttcatcccaaaaagagttagataatttagcctctgaaagcacgcatctaactctctctatcaatgttttgttcatcctttctgccaaaccattcaattgagaagttttaggaggtgtcttctgatgtctaataccatgttctttgcaatatacatcaaaaggcctacgatactcaccaccattattagtgtgaatacattttaacttctttccagtttctctctcagcagaagtttaaaattctttaaatgtaccaaacacctgatcttttgactttaaggtacgaatccaaagtctctttgaatgatcatcaataaagatcataaaataaagtgcaccaccaaatgacttatctttcaaaggaccacaaacatctgaatgcaccagctcaagcaaatcatattccctgaacgaaaaataatgtttgaaagaaatcctcttttgtttcccagccaagcaatgagtacacatgtctaaccttgcaccttttaatcttgaaagtaaattccttttagttaggcaattaagtctcttctcactaatatgactcaatctcttgtgccataattctgaagagctatcaccttcaactgcattaacgagatctgtaaagattaaagcttgcaaccaatataagcccaaagccttctttcctttacccataactaaggaacatttgctgagcttacattgcccataatcgaaagtgctacaatagccatcatcatcaagcttactagtggagatcaaatgcaacctaatgtttggagcatgtctaacattcttgagctctaattttgttcaattttggatctttaaacaaatagttccaatgcttattacctttgatactccatcattacccatctttaaaaccccaaaatactcggagtataagatgtgaagaattctttccttgatgtaacatgaaagcatgcactactgtcaagaacccaaacagtattatcgtaggccacattgatcatattctcttaataaactataactaaatcatcatctgaagtggtagtggtaacacgatcagtattgttgtcatttcccttcttttcttgcttccctttatttgctttattctctttcttccacttgtaacaatatttcttgatatgtcccgtcttaccataataatgacattcaaggttcttataccttgattttgatttactactgctattgcttctattctgatcttgacccttacttttacttttcttcctattttcagtaactaagatttctaactgtgaactagatgttccctgagttcttcttttcatctcttcattcaaaatgtcagaccttgcatactgcatggttacaacatcatcaggagcagaattagtcaaagatacacgaaaatttttccataagtcaagaagtgtagtcaacaaccaaagtccaataatatcttcatcaagtttgacacccattccagacagttgatcaaagataccttgaaattcattcacatgatcaagtataaaactacattctctatattgtaaccatatagcttgtttaagcaaaaataacttattgtttctaatctttgaagaatatatggtttcaaactttttttacaaaaattttggcatttgtttcatcagcagtatgattcaacacattatcttttaccaattgttgaataaaaaccacatacttgtaaattctcaaattcttaatttttattagatttagacttaggtttttaagaagcaaacacaggtaaatacaacattttcacaacaagaagatccctcatttttcctttccacttataataatttgtgtcatccaaacaaactattttactcatattcacctccatcattcaaacaagcaaaagaaatttcataatcaaccaataaattagtgaaccaaactctgatatcacttgtagggaagcacttgaatgaatctatgaaaagtgaaagctaagtaaaagttcagccaaaacaaatatgatgaaatatgccccaagatactaaaaaacaatcatataaagatactaaaattttaaatgtagaaaaccccttcaatgtgaagaataaaaaccatgggacctcttctggttcaagtaaaaaaagctcctctataaaaattagtgtttacagcaacaataagcaaccactataattttcaaataaatagtcaataacaaatcaatcaaacaataagagataaacaagagaatgaagaagtatcactacagtagctacttttcatgcgaaacggatgcattttgattattcaaatccgatctcctctgttcagatcaaagaacaacctatctcgaacattctcgccaactttcagcctcatcagactagaaatgaccgtttgatcgtcggagaaagtcaaattagtcggtatagggaagaaaaatgtgaacagtaacttccaattgaaatacacgaaattcaaccgttcaaaattaatttcaccgttcagaatgaagaataatgagttttataaatacttactaaatttcagcctgatccgaataaagattatcatctgatcgtggaaagaagcaaaacatgttggatgtaatttttccaacaaaaaattctctttttgttttctaccttttggtggctgaaaacttatttttaaactattctttggggttaaagtggtataaaaaaaaaactctaataatcctaatgggctaaaaataaatgggctaaaaaagaatttgggtttttccatgtaggagggaacccaaaacccaatagtatgtgctactgtcagacattctacttatattgaaggtctgacaactctgcactgccttctttagctcccagtaacaagtgtgtttcccaggtaaacaatgtaaatagaggtggagggcagattaattgtcaccttcctggtctgtgtcggagaaaatggcaagtattgcttggctgtttaccttttgatcattaggcctaaacagtaccttctttgtaggataagagtctttttcgtgctaaactgctgcttaataggcctgtgcatgaaagtatccaacaaaggaatgtgggatcaagtgatggttagatattgcaaggagccaatcagactgaaattttgaagactggtcaggtgcaaaaaactcaggtttttcgttagcaatttgcaaagccttgtgtattagtcatgttttagctgctaagaatgtcctgaatgacttttcgttggcttaggaaatagttattttttgggtatgacataattggccaagaaatattgacatgcacccaagtgtttgatggaaaacatgttgcagagagctagtacaacagagttcatgaatgtagaacagctgcggattagttgtagatcatcaacatagacaaggaaatacaccacaacattgcccaagtgatagatgaatattgctggatctacatgggaattgtggaaagatgagatatgaaaaagtcggctactctgtggtaccatattctaatgataaatttgattcatattccaattgctatgaaatgggaatagaaatgcagtacaaatagaacagaagtttgaatgaaaactaactctgtatggaggctggattttattataatatatgttagtttgattacattaaatatcagcaagtatagttctttccatgtaatgtagcattttatccttgcagacattatatatgcatctttattctcaagaacattatctcgcctgtgtgagatttaggttattggagctaggattttagtacgagagaaatacattatgatcattagatttcttctatagtgaatttaaatcaattatctgataaagtagattacatgtaaattttttgaactgtcgtttttagaagtagatgattagtttaaaccaaagtgaatgattgagtatgtgatgtacagatatgttgacttgaccaggaaatgtattttaatcaagggcaacgtatctatggacacatttggttagttccatatctcctctagtaccccacacaacatttggctgaagtacatagtaactcttactcatttttttaaataacacaaatgtattagccagaattcaagctctttaagatttggttttgataccaaatgaaacaggtaatttagcaattaaccacctcaaaaccttaagaaaaaatgatcaaatttgttatttatattttagtgtatgcattctgggtgattatagtttgtactatgacttttaaaagtgttgttgaaatgatttttttattaaaattacttttagtaaaaaattatttggtgtttggtataaataactgtgaaatgtgctgtcactttaaaaaaaacagaaattgtattgggtgaaaataacttttagaacttaaaatataaatttttaataaagttaaagtcatttttaaaaactatgcattgtaactttgtatttaaacatgtaaaagaaaatttagctctgaattttgtcaaagcactttaaattgtttctttagttgcaaaagtgcttttgaaacgcaaaagccgaagccaaaactcagtcaaaagcaacctgaagagagatatatggttttggtatgtgaattgaattattaaaaaagttttaacaaagtctgtattaattttctattgagcaggtatttggttggaatttcagctgctgctacaggtt

SEQ ID NO: 8529 - DNA, 1593 bp, Carica papaya
  Intron number 2 from transcript evm.model.supercontig_18.2 10 (locus evm.TU.supercontig_18.210) derived from phytozom e v7.0 (chr-ID supercontig_18; pos 2330647 to 2332239)
tcttatctctctgctgctcctacaaacgtgagtttttaacaatttcatttagttttctcttccctttggactttgcaaaagtggagaacataataattctatgaaacgtctggaatatatcaagatttattttttgtgtaattcatttggaaattcacacataatttgagagatctgcaatttaaaagaatagaaattgagctcccttgaaatgttaaaattgaactcagttaaaatactatgcggaattaaaacaaaacatttaaaatttcatcaaactgataatttttggaatatattattaaattctatttgaaattctctatccgcttaagttttatcattttttaataaaattgcaccagtttaataaaataaagtcaagtatagattttcaaatgagttccgtagaatttgttgatttgcttcggacatagtttaatatgaggatttaacaacataaagccgaattaaatttattgagggctgtgacttccccgctattttatttatagctattatctttttttcctctggtgcaaaaggaaaaaacatatgttgtgaagtgttcaacaagacgctgaacataatcaagcaaacaaaggcaccttaaaatggtgatcttgaaacacaagatagcaaatgcgtgcccctttgtattacaggaagtgtgggtttctcaggtgctgtctagatgtgaatctgttggttgtctagctggagactgtgtagcaaaaatgaattactagctgaattagcaaaactatatatagctgatcaaatatacattgttggagaagtcttagctatgatacaattctctgtggcagctggagtttgctatggaggatacctttttagacttatgctagacttttgagtgtgaatacttttaggcagccattgcagtttcttgctgtgccattcaatagtttccaaagctggatttgtcttcttcaactccttaagaagcttaatttagcagaaaaacagctgattcaaaagggtctctttgtagtacagggaagtgtgggtttcttgtgctgtctagatgtgaaatctgttggttgtctagttggagactgtgtagccaaaaatgaattataggctgaattagtaaactacatattgcctgatcaaatatacattgtaagaaaagtgcttagtgtggtagcaattctctgtggcagcctggggtttgttatagagaaggtgttttctgacttatattaggctttttgagcatgaatgcttttaggcagccattgcagtttcttgctgcgccatttgatagttttcaaagctgggtttctcttctccaactcttttgcactatcaaatggtgcagctgcttgaaagctatcgaatcgcacagctattccagtgcaaaagaaaacagctatttgatagttttcagacgtgatcatttgattttttccgctaatagatatttttcaacgaaaaaaagtaagaactaagcactcttaatataatatcacatgtttgataatcttttcttaattagagttaaaacttttgttgatttgataataattcaatagtttcaacaaatgcaggcaaagttggttgtgg

SEQ ID NO: 8530 - DNA, 1945 bp, Carica papaya
  Intron number 2 from transcript evm.model.supercontig_1855 .1 (locus evm.TU.supercontig_1855.1) derived from phytozom e v7.0 (chr-ID supercontig_1855; pos 481 to 2425 reverse s trand)
tcgttacaggtacagatttaattagcagatttagattataacgtactcgaaataggccgtttattcttcgttttggatttcgatattgccgttattattctttaaatagcgggtataagttactgatatgtgagtcggagagaatgccgccgacgaaacaccgacgtccagctcggagttgctttatgctttgaattggagttaaataaagtggctgaacatgaactactctgttttgtttttcctttcactttcccttttccttttccttttccttttcctttatatatcaaatcaaactgaaaacgagcaattcatggagaattagtggtagtctactagcgtttgattgcattggtgtaagttatcaaagaagtatttgttgggtgtgaactgagaaaactcggttaacttttttattaaataaaaagattgttgaaaacctagaaactttggaacttaaaaaactactagtaagattatgaagttgttgcgtgctacgaatataaatctcatgacccaaaagcatgcccccagacctgataataaatttagggagaaggaaagttttggaattctagagttggttggagaagtctccaaccatgatgttgcgtttacacccacaaaagtttctacatattttcgagattgaaaaactacctaaaacccaagaaatattttgaaatcttgatgaaacttgaatattattatatgtgaatcttgaaattcatgacaattctaataccctatagtaatattaaatccagaagttgttgttaaacttaaaaataatctagaactttagagaagcattaaaaatttagaataagtttagaatactaatactagttcaagatttaagtattgtctcaaagcattagagcaatcaccaaacttaaagatagattcaattaatataagatagttttgaaatcttgttaaattttcaaaactcccaagcaatttcaagactttatgctctgcttttagtcataatttttcagaaaaataactccctaaaacgtttttgaaagacacttaataaaatatttttttaataagattttatattgtttttatgttgtactataacaccagtcaatgctattcttattttatcttgttacagttcaaaataacataattcctatcctttattattaataggcaaatatttgtaatttaactttaaatgtaagtagaattcaaccaaaacattgtgctcatctacataaacttactgagaaatctaattgactaaattccatgacctcgagttgccttaaagaattataacatttatattttcgcactccttttcgggactcatatagttataaaattcccaatattaattgtctttagtgtctagagttttagcaaaataataaaaggtagcacacatttattctgttctttgtgtattaagcaaagaataatgctaaaattttcttaatgaagtattatgttgtaatatttatatgaaacgatgatgtactgttctcaaatgttatttactattgttttttttttttctttaattagtaaaagaatctataaaatttttgttttttttttatgaaaaaaaaaagtgatttctgagatatgttaagaaatgataaatataataaaagactaattacttgtttaaaattgtgttctaaatatataaataatattttcaatatatatataatattactataaaagttaatctctatcatgtaattaatcaatcaataatctcgaataaattaaatttagcgtactcataaacaaagctagtgtacatataagacaaatgctatgccataagtgtgtgataagaatggctcattgtattgtattcatatatgattgtagttataatgatttagattgtgataaacaatattgttgctcctgacttataggtccattcaaaaaattcataagggtaact

SEQ ID NO: 8531 - DNA, 4310 bp, Carica papaya
  Intron number 1 from transcript evm.model.supercontig_3.19 6 (locus evm.TU.supercontig_3.196) derived from phytozome v7.0 (chr-ID supercontig_3; pos 1422629 to 1426938)
agttttgtagcagctctaggtatgcatttcatccctctctctctctctctatatatatatatgtgtgtgtgtgtgtgtttgtctatatatattcacccatgtgtatgtatatgaggattagatcttattttgtttgtgccaatatttgtaatgggtttcattggttttgattagttttattatatatacacacgagagagcgagagagagaaaatctagggtctttcatggctgttcttcattaatatgaagatctttctttttttcttttttctttttcctgacttcagaaactgatgtgtggtaatggaatagtagtactctagaaagaacagacttaaaaaagattatatagaaattaagaactcgctacttacctaccacctttttaacctacggatctatactatctctgtgtggatatatgtaaagagagcaaagataaggaacttgtttctttctctctccttttactttaaaatagaaacagattctttgagtgacttacagtattattgacccagttattaggtcaatttcaatttatgaagatcaaaggagatgcttgtttaagccagataacccttttgtttgtcagactttagatcataattaaccgctaattaaacaaaaactggtttactgttaagattttgttcctgagatgtgatgctttgcagtgactacagtcttctgcactttgttgtgctgtaaaagaactggttcagagaggaattaagaaagaaagaaagagagaaagctgcttttccttcaaagctgaatagatctaaagaccacctatttttggctaagattgtttctttttgaagttcattattatttttctagaactccaccttgattttctttttcccgattgttaattttaatctcatttaactagttgtgtaattttttcgcgactaatctaagcttgaactaataagaatatattttaagatttcggtctctctagtagctcatccaggccagattggaattgaattaaagacgaaactcttactcattcgtaataaggaggaaaagctaataaatcaagactggttagtagtagtgatgcttgataaccttctaggtttaaccagtaatagaaataaacggtataatttggtttaggaagttatggtgagaggatctacttatttggtgctgagctatacagactgtgttgcatgtctccttggtgaaaatgtagcaatcgacatatgtttctcctgtaaagagcttatcttttcttgttcatgtagctagtgtgttgaaatggaagtttttagttttagtttgtaagtggtgagtcacctagcaatcttgatataaaaaattatatattttgtgtaataaatatacgttatatgtaatttcttcacgaatataacttacctattttcagttaatcttttataattaagatatataataacaatcaatattaaaactttaaaactctaacacttggatcttttaaggtaattcaatgtaataaaaaacttaagttggtaaagaaacttgtagtatattatatatacattatatatatatatataatagaaattatttttaattcgttaagcacgttaaaaacaattaatatagtaaaatagattgcatgattaattcagtggatccattgattttaaggaaactttttttctattttaaaaaattttcagaaaattctccaaccaactcaattaatttttgaatataaataatatctaaaatgtaaacttacattaaattttaaaccaaattttgctttagaacaacttgactactaggttatcacgatttgactttgatagttatggattagtaccaagattgattcctagacagacgtatcaaattttaatagctaacacaatagcaataaaaatgtttctttctttattgagattgtatgaataaatatccgaaccaaagtatgttattgttatgagggcgtgtacattaatgagttctttaccccagtaggggataaagtgacataaattttgagaatttaagagaagtttacagcgagacgagccatttatcattatgataagtgtaaagtgaaagtgcggtgaaatatacaactaagacattctaacagatcggtagacttgaactttgttcctacatgacctgatcaattcgatcagacactcaccttcttatttcattgttccactctttgacaacacgaaaaaattatagtttaattctttaacaatatgaaaaaaatcaaaagctccaccgtccttctctatctgtcaaagagttggaagggtagagacctttggtgtcccttccaatcaataattaaagcctcataatcactaattaatatgcttttctttatttatgattcgatattctggtgtcttaagtgtccaggaagaacaccaatctatcatgaacttggtggttaaactctactgcaatgatgatgatgtaggagaggtccagtgaaaatatagcttgatgctagaatgataaaaaacttagcacatctcattcttattacttttttaatataaaaagaaaacaaaaaataaaaataaaaaatcatctcattcaaaatcttaattatgaattcccttctctaccatttcatacattggaacgcaccgttcttatagagaggaaaacactttcatatcttcttaactcgaaatggatcgagagaggaaatatttctttttttttaggatacttataggactgtatccactagaaacagaatgaggcatgtagcttagaggattagagcacgtggctacgaaccacagtgtcaggggttcgaagccctcctcacccacaatcagtttaagtactttatataattcggttagatctctttgttcaattgtaaatcaccatgtaattgagtaatgacacataatgatgcgtggttgtagaataagattatattataaaggttagtttagttaactaatccttgaaattatgaaagagagttagatgatattgtaatgtatgaattactaaattaaatagaatgttatctttagttgactttactttcttttttttatctctcttcttttttttaatgtttttctttttatcaatagtatcaaaatagttgatagtcgagtttgattaaaattctaatatgataaaagattaaatggttcttcaaatcaaatcatttttcttattcgaactcatttttattgaaccatagtaagttctttcttttttatttttattaatcttaagttggattacaaacacatttgaaagaacatgttattgaaaaaagtgagaagcaatacgtgaaaccactagtacaacttatgaagtgaatcttgctatgtttagattgttgcttaataataattgtaatgttgaggttaaacatcattgatctaataattttttaaattaactcattagttttgaaaacttgcaaacttaatttgttgtggtacgagattgaatttctatatgaaattaataatcacatatgttttagtatacgactgatgtatcacaatttcgacgcttaaacaattagtatcttcatcaaaatcacgcatcacaatcataaattcaaaacctataaagttcaaaattgcaccagtaagaagaaagaaaattaatgaacttggaaaacttttatactatgaagattcacaaaccatatctaatacattacaataataataactcaaaaccccaacacttgtataatatgtaaatcatcacgtcaagtactcttcaatcgttagtattttttagaaaaaaatttaaaaaaagataatattttgtgaataaaattatttattataatatttttattattgtagaatagcttttgattggtaggattgaacttatataaaatttgttagtactatgattggtactttgtggttttagctctacatctaaaatagtttcaaaacaagggtaaagataatatatgtatatatatatatatatatatatgtatgtatgtataggaaaagggtagtgctgtactattcacactttcccaattctcattggcactccttttttgcaataattcatttttggaaataacaaaactaatatgagttactgtaagtagcacttccccaatacagtaccttacaaatctgttcttcacagtttgagccagccccagcgttgagtttcctgttcatatcaaaattgtaccaattaattttccctattaattatattaattacattattcaacatatcttatctaattccattatgtttcactactaaactcactttttgattttcacattcttccaattataagc

SEQ ID NO: 8532 - DNA, 1309 bp, Carica papaya
  Intron number 1 from transcript evm.model.supercontig_8.12 4 (locus evm.TU.supercontig_8.124) derived from phytozome v7.0 (chr-ID supercontig_8; pos 849427 to 850735 reverse s trand)
tcgcgttgccaaagcactacgggaaggaacaagaggtgcctactattgctttcacatttctcttgtaactctctgttcttcagcttttctgtgttgctacgctaggaattgtgatatttaagattcacaatttctctgacatccgttctttttgcttctttagttcatatactcaacatgttaaatcttatttctttggcctttcattagatacggatggtagtttttatttacttagttggttggttggcttgtatttaatatccacaggtagattgtcaacgtcttggtaatttgcatttgggtttgtattcccccttccgggttgtgccttggattctttgatctggcatctagatgctttttgaggctgttttttaacaggttagcaaaatgaattttacttgattgccttgtgagacaagccaagctacaaacgacaagagggaaaaaaatagatctgctgatgttttctttttctactacgatgggctgggatttagtttttgtttgtttgttttgactctatgcttaaataattaacgttgttgagttttttaaacgtctaaaatgaagttgcacttgcaagcatacattatatatagccgatttgagtcttagagttcaagatattgcttatgtaataccggtcctactcttaatgtctgtaccaaccaaaaaagttcagctgggagttctgtatggcacaaaatagcttgttaatgaggtcttaacttggaggaagcaattggttagaattttgtccatagctattctctgtacctgatttaagaaaaatcttttttgttttttcttttctttttgtgggaggttgtgttcctttgggtttgttttattgaagtgttgcccaaatatgttacttccatagacagattttctcttccttttaaatgtattttctgaagatctgatattcagaaaaccattttggtagaccacaagccttcaatataaacgagagcagacctccataacatgccagagtggaatatttaaaaatccttataatcaagttcaactttgttatcagtcaaatgaggtattccttttcgatggctataaattacttcaacttatagcttttcttcatgtcagatattgttagatgtataaaattgttattaaataaaatgatcatattctttaatttttcaataaaatgtatattataaaaatttctcttgttttttcttatttggaattgttggtacagagttctcaatggggattaaagccatttcttcttttgtcaggttacagacaaaaggtgaaggacattgttcaaggt

SEQ ID NO: 8533 - DNA, 2852 bp, Carica papaya
  Intron number 4 from transcript evm.model.supercontig_48.2 06 (locus evm.TU.supercontig_48.206) derived from phytozom e v7.0 (chr-ID supercontig_48; pos 1133396 to 1136247)
caactggcttcttccttattggaggtacttgcttctttatgttagtaaagtgtggtctttcccgtttgtattgttattggccatgtatgcgggggtcaatacaaacttgtttattggaaggcttaataaatggataagtggttgtgaatggaaaaatgtatttctggcacgtgcttgtttcaaatgtatttcctgggatgtttctcacaagtattctgccaccagctaaaatgttcttcaaatcttttatttcaatattcaaatccgggatgtaatttcattttattactgctgctttcccttctcagattatctcccttcatgattttcatacatcagttttgctcactcatgattatggccgctcaatattctttggttcaaaattggattacaagaataggactgcataattttggtcagtttgtttgcatatcaacatgacttcattatcgatattcccaaagctcaaatttccacatatgacaccatctcagatcatcttctagagtaaatttttcctcttaccatgctattctcttcgcgcactggcatttcatgaaaaaatggttcggtttacaactttggcttaaacttttgggttttgggttcaagtatgagctacaattctcatggaaaaaagaataaactggaaaatggctactttacaattctgtcgaagtttatactatggtagatacttttgtcggagtacttatgcttattggacagtttagatagttatattccacttcctggatagatatatctgtatccagtttcaagataagtaaatcaacaaacataaacatgtgttgtgttatcaaacttgaaaatctatccaccaagcagtaaaaactggtggaaagtttaggtgtttggaagattgtcccataaccattccaacaaaaagggtttgtcacagttggaccttggacaggaagcagctcaacatctgtcatcacaagatttgtgcatggaaatgaatcacgacaaagaaaatggattggtggactcctcatgatacatgtgcatgttcttataaaatatatcattgagtataactgcacttgtttggattgcgcacgttttctatgtaaatatcacgaaatataacattggaaacaaagcttgatcctccctgacaagttttgatttgaatagcattttttaagtatttgattatcgagttacttgttcttatgttaaaaacacaggcatggggagttgtggatgtcaagactaccaatgctacaacaattgacatagcattactttgaagtaatgctaatcgattcaatttagagaaaactaaacccaaataatcaaacttgttactatgattcaaattgaaccttgaagtctactcctttattgaactatagtaagaagtttgatatttgaagtaacagacatgtataagctaagttgttgaatactgactacttttttgttaatcgaatatagggctacttaagaattgaatcctaagagtatactcctttgcagtgtgtacaaagactttttttttaatcatacgtaactttatatattgccaaatacatagcagtatacacatatttgctgatccaaagatcaaaacttgttaccagagttaaataaagacttgtacaatcaatgtataaagtgttggtccagcaaaaaattgaagaagcaaatcctagaaactgaaatcaacgttgttctcattgtcaacttcgttaccagagttaaagcagcttcatcctcatttcacacagggtaggtgatggagttatatatttgaacaaaagatccatcttaggactcaacaataatattttggcaaacatcaaactctgaaatgaaattgtagttattcttgacttgaagtccttggacttttaaattggagctcatgaaaaatttcaatgcctaggttaataaatttcagagaatattttttatacttacaagagaaaaacaagttacagtgtcgatgtaaatgtacatacgtatacacatgtataattattcaatgaatatgtgtattttatcgaagatatatactttcttatatgaacttcaaaataaaattcagaataagtgcatattgagttacaaacattaacatatccggatcccatattactctggaagtatgattaaccatactaaagcacaaacatgaaaaaaccaaatgcatgaaaatgaagaagtggaagcttatccccagtctatgaagggaagtggtgggtatccgccctctggaggaggcctcaatgatagaggcagattgtcccatgaatcaaacaggacttatgctcagagaaaaagaaaataatgaatagggaataaaataaagtaaattttagagaaagaaaaaaataattattcacggacgttaagttcaaatttaatgttagtattaaactcctcatattgtgatgactaaactaagagtatgttttcaaataaaacctccaaaattgttaatttgttctaaacatttcctcatgaatgataatcatctgaccataacatacaatacacattgagaaacgctcttaaaagtatacttaaggaagaaagtaagcttcatggagcatagacatcaactatatggatcaagctgaataggttgaaaaactgtgatatgggtcatgtagttcttactttttagttgatgatctactgcagtttgatgctcggtgttcttgagttagaaaaacaacaagctcaggacacttgtatggcgtcttttttctttcgtgaatgatcgtgcaaaatgtgttataatttatcaccagtttactagctgtcttctttttgaattaggcaaagtgcctggagacaggtgaaactgttgctat

SEQ ID NO: 8534 - DNA, 6255 bp, Carica papaya
  Intron number 1 from transcript evm.model.supercontig_24.2 7 (locus evm.TU.supercontig_24.27) derived from phytozome v7.0 (chr-ID supercontig_24; pos 703667 to 709921 reverse strand)
cagaccgacctgaccaggtttgtaaacatcctgagcctagaatttatgctctggatgaataatttaattttaataacaacaataaaaatagttaattttaaattttttagaattgttttgagaaatatgggttttggatgagttgaaaaatatttgggaaaacaaggcaaaactatgaataaaaggagagtatatttgaaaggaaaggttgaaaacaggggccaaatcgcaaaaagagaaaatactaccaagtaggatggccatgtcagtagcacgataaatcagaatacgccgcgtggcgaacacactggcacgggctctacgcgggcaatctacatgcccgacgatccaacggcacgtgctcactcctgcgtgcacgaatagcccagatatgttttcccattaggcacaatcgagtagtccatacgtcttcgatcgaacagtgtagatctgttcccctattagtcaaaatcatacggctaaggaggccctatgcagacccaaatggatggcccagattgagagaatgagaatatttaaagtcctcttccactgaaaccctaaccctagccgcactgtgacatcccaaatgctaattaaggcatgtggatggcatatacagaaatagaatgatgagtgcatgataaaaattatatgcagcggagtaaattaatacaaatcccttacatatatatatgagttacaattatatacatatcagtgaggctagaagtggctgcaaaatacaaagtcaaaatacaaaagaggacaacttctttcactatgctattggactcatcagagtacgggaacaatcatgcactcaagttttgtggatccacgggattcttataaacttcaataggtaggtcagctagcggttcctcattttcttcctcatctaaggagaggcatggaaagagtgagttctatatgttcagtaaggaaaaaagtatttaaataacatcataaagttttaaaatgaattattcaacattaaatacttaccctttgtctatttcataaacctatcttacattataaaaacagtttatttattagaaaaatatcacgttaatataaacaaaacaaacacacatcataccagatgatagaaaaaattaaataaatcatgaaatacttagattttcgtatcatgcttaaagaagttgttacaacttccatctctgaaggtagaaacaaatttacaactaactatgtggaatgaccatattagatatagataacggtaatttacttaggcacatttctggcttgccaaaccatgatacgatctatgaccatggtcgtaccgatcataatggtcctatcatatattctatagtcacgacagtacttagctaaaagtgacccttaatagatatttgcgtcaccactctcgtcagagggtacgctatcatccacaaggagcagtcctcttacatctttccaaaccagatgagggagggagaaacatatactctggatggcgttaggtaaatagatatccctcagagataaaaagcctaatgggacacttaatgtattatgcatgttaatatagatatatattcggaccattcatgcttcattccacattactctttttttttcttttattttccaggtaactttaccggtttcatattattttaattacatgaaatcatcaaatgtttataaatcatatagcatgcctgaaatcaagaaccagtcaacttattaaaactacaaatacaaaaacatgcaaaacaagcaaaaccacaaattaacaattaatctctttttttttgtctaaaaataggtccaggtagttgaaagctcatgaaaagaattaccccacccatgacttggaacttatcgccattatccatgccttgaagacctggaaccattacttatatggaaaaatatttgaaatctatacagaccataagagcctaaagcatatgttcgctcagaaggaccttaacatgcataagaggtgttggataaaacttatcaaggagtatgactgtaaaatcttatactacttgggcaaggataatgttgtacctgatgccctcagcatgaagaatataggtatgttaacttacataatgatctatgagtacaggatgataaaagccacataatagatacagctccaagacttgaaaagggccacatgtctagtccacttagtagtccaacccgagttaattcaaaaaataaagggtgctcaactagctgatcccactctagtagctcttagaaaggacactacaaggttcgaatttagaattttgagtctctatagataggttgctcaggttttaagataggttatgtattcctagtgatagcgagttgaagaaagatatcatgatagagactcatagtttgaagttcaccatctatctgtgaaatacttggatgtaccaaagcatgtagccctgattctggtggagcgggatgaaaaggaaaattgctgatttcgtctccaaatgtcttttataccaataggttaaagcagagcatcaacacccaggcgagctacttcagctgttaccaatcctagagtggaaatggaaatatatcaccatggactttataacaggattgcctatggcatgtttgaaatacaatgcgatctggatgattattgtttaactcactaagccctcccatttcttggccatcaaaatgacagatcccttggacaagctagctaaaatctatatccgggagattgtcagactacatggagtttcagtgacagtggtaccggacagggaccctaggttcacctctcagttttggacaagtcttcaacaagcaatagggacaaaattgtctcttagcacaacattctacccccacacagatgggcaatcagagtggactattcgcacattggaagatatgctcagggcttgtgtcctagatttcagaggacactagcatgaccactgctcctgatagagtttgtctccaataacaattatcagacaagtattgatatgacttcatatgtgacattttgtggccgaccttataggtcatcgatttgttgggaagaggtggacaacagaaaattaattgactcagatcttatagatgagactacagtgaagattgtcaagatcaagaaaaacattcaaatgacccagagtagataaaaaagttatgcggacactcaaatgagagatttgaaatttgagaaaggcaatcgagtgttcctaaaggtcatcccctttaagggcatcactaggtttggaaagagggaaaagttaagtccttagttcattggaccatttaaacttttagacagaattggaatatcaacctacagactagcactgcctccagaactgtttagagtccataatgtcttccatgtatcaatgctacgtaagtataactttgacccttcacatgttttgtcctacaagccactttcacttcaagaggatctatcttatgaggagatactagttagtattttggatcgaaagagtagagtacttcgcaacagagaaatcccttttatcaaagtcctatgacaaaatcactcgtaggacgaggccacttaggagttggaatcagatttcagggcctcgtatcctccgttggttgactagagggcagcaatttgaggaactaaattttcttaagaggaggaaagttgtaacactccgaacccaaaatttaagttcgggatgacataatttaattttaataataataataataatagttaattttaaattttttaaaattgttttgagaaatatgggtttttgataagtttgaaaacaattttgaaaaatatggcaaaactgtgaataaaaggagagtgtatttgaaaggaaagtttgaaaataggggctaaatcgtaaaaaaaaaatgttgccacataggatggccacgttagcagcacggtgagtcaaaacgcgccacatggtggacacattggcacgggctccacgtgggcgatctgtatgcccaacgatccaatggctgtgctcactcccatgtacacaaacgacccagatttgttccctattagccacgattgaacagtccacacactttcgatcgaacgacccaaatctgttcccctattaggaaaaatcagacagttaaagaggcagtggacggaccagatcgagagaagggaagtatttaaactcctcttccaccaaaaccctaaccctagccgcacacctactcattgaagaagaagaataaggacaactggaagggaagcccaaccacaatcatcaccgcaccagagaccaaattgacattggtaagtgtgattttctcccgtttattccatttttccattttaagccatttaaaacacttttttatgcaagaaaacttgagaaaaagtcgtaaacaaagggcggagctcgactgagctgccgcacccgaaatcaaaaaatgctctggtgaacctaaaatcctttctcattctttcccgttctcgatcctaggccatctaacatgttttttagtgttagagtagtcgaaggaaagccgcaactatgaggaaaaaacagtggagctcaacgaaaccactgcaccaaaaagccaaaaccactggtaagcttcaatttttccctttttcccaatgatagacacaccctaatcataatttaaataggcttttatcagaaatcggctgaaaacggcctgaccaggaggaggagccgttgtagaaggaggaaccggcagtggagcatggcggcgcctcagcaccagaatcataaaccgacctctcagtgagattttttccctttttgacccttttttgcgtatttctatgtaattttgacatgagttttgttttagcaaaaaaactcaagaaattcaggaattgaaaaccgtctggaaacatagagaaaaaggtggtatttcagacaccaactcagggtaagaatccctcacccattttctttattcggtaaattaaagctaaactgataaataaacaaaaaatttagttaatctgttgttccctaattgattaaagtacaggttgccaatggagcaaataactagtcagtttgcatctgtttgagttcttaattgcagttaatatccctatagttgttattatactatttcattcactatattgtttattttgatatgtttattctgaattctacagtgaatgcggtaaggccccctaaacattttgtccgttatctcgttgtgtgtttaatatgtttctatcaatataatgtatttctatttcatgtacttatcttaaaaattcaactcatatggttgtgatataaatatataggcccttagagctaaatagtaaataaaagagagcacatgcatgaattaattatgtcaaataaaaaggacttatcgggtgacttggaaaagagtgtacaaacttggtatatagagtaaacccttccgttgacgttaccttagttgaatgtgattgagaagtcccatatagaaaggagttgggaattattttaattacactcatactggacagggtattgaggtagttatatgttttgggcgctcaatattggatgtggtatggggacggctatttgattaatggaatgaatgtttggttcacgtgtaatagggatccctatagacccccagcgacatcggtgggtaagttaacatgataaaggtgaataagatcggaacccaactttggagaataatgaaaggttaattattacatgtcttttagaatacgtagtgtagattactatcctaattcttgttttcacaaatgacatttaggaacttacaggtgagttaagaaaattaacatttttcagttaaacgatttttagtaaaaagatgagctctattggttgttttacgatttttacaaacctttaatttttcgtatcagtggtaaggcgttgatattcttattgagctagtgtaacccacccctttattattaaccatttcataccaagacgcccaagactggatccaaaacaacaaaaaaaatagctagaggattgcctctccatttttccaatttcaaccagaagttgatcacattagttttatttattattctttttcatttatgttctctaagggcattctcgtatccctactaggcgtcttaagtaaactgtgcaaggaatgtcatcctagactttaaactacttccgttaattcataaaattcagtattattttattcccttatttttggacttttacaggattacctaaaccaggttggcccgttttctacctt

SEQ ID NO: 8535 - DNA, 4400 bp, Carica papaya
  Intron number 1 from transcript evm.model.supercontig_443. 1 (locus evm.TU.supercontig_443.1) derived from phytozome v7.0 (chr-ID supercontig_443; pos 4442 to 8841 reverse str and)
aaagtcttcaaaagacgctcgagcctcgtattcaggtagcgtttgttttgtttcaatgtcaagattttctagatgtgcgtgtctctactggaattttggctcttttctttagctgattagcattataagggagaaaaacgaaaagttttgggaatttgactaaattaggttgcctatgtgatgtctgctgctcagaaatgggaggaatatgagacttcgaatcatatagtttaaggaattgggagtaaaatcaatctgaaccttatctttaactcgggaatgtggtcagtcaagtgcagaattcttctaacgtaagtaaaaagagtgaatatctttccaaaaaagagtttgattacaatttttaatttggtggagccaactttgccaggaactcaaatatcggaataatgaaatatagaatcagaattcttttttgctgattttatattcttgtagatgtgatcaaggctttacttaactgcaagtcagattctggagcattattattatttttttaaaaaaaagaagttaggttgttgagctctgaagtctaggtaattaatctaggatgggctatgggtagatggaattagtttctgtcaatcaagagttgaaaatgaaaatagaatgtaaactagctgccaaattttaagatggttaagagagtcccttgcgggatttcttcgggatagaattgaggaaggtgttatgaatagcataaaggcagattagctgtatgatgagacaaacatgatatggcaagacatggaatcctttgtaaggaaggagcaaaatccccgttgattgtgagattagttgtttggttgtttgtcaattttatgtctagaaataaattattagtttaaaatgtatctctatactgattgttcacttttcctaaaggacctaaagcatggatggatccttttctaaaatcctcctagaatttattctgataatgtaggtataaactaggtttaaaataatgcagaaagttatgaatagaaggctaagttctatatgtgaatagaatttactgaactttacagggctttttgttatacttaaaaatcacaaattcgaacttgaatgtagttttcgttactttgaaggagtattatggattaaaaatgatctatttataatgattgatctaatgagatcaaaaacttaactctttcagcaaggtcattacattttgtagtcgaaagaaatattctggggctgttaggttcttttagttggatgagtcacaatggattaaaacttgatctagtctttattatttcaaaaaaaaaagttgtaatcatgattatttttactctattttctgttatgctctattcataggctgagtaatgaattttaaaatgaaattttcgtggcttttgttgcttccatcaacaagaagttattttttcgatgtgggggctttgctaggtctgagattaataactttttttgaaaaaaattaaacattaacgttatagttctagacaaaatcttttttttcccaaatgggttttgtgctgtttgagtgatggatttcgatgtttgaggaatttttatctttgatactaactgatgtaggataaatgagggataatttgattgagggatttgagcataaacctagatcccacaattaaatttttagctgtaacacctaagaattcttaggactcgatggttgaattgtatcacacactagacggagtgagagaaattatcaaatgactttgttgagaattgaacttctctcaaatttgagattacataaatatttaaagtgcttcctaagtaatctttttcaaataagattattctcataataacaatactaatgaagtcaagacaactagtctgaagtctacaaaaatccctagttatccaaagagtttttgatataaagagaggtggagcaccggtactcggccgccggcaaatggtcaccgtcttggctcaaagattgccataccacccctttctcttctctattggttctctttagatgtgatacatatcatcatttaaaccttattatgtttttgtttcaagctctaactctattgaatcaaatattgtaatggaattattatatatctaatattgattgctaaccaaaggtcttagcaaaagaaacaaattctttaaactcatccccctcacggtattttgggtcatttggaaggaaagaaacaaacgtgcttttgatggaaaagaattaaacttcaacactttaaaaaacaattggtttcaccattttggctctaccatacttgagcatgatattagtagtaatgttcattttgattctattgtagatatactgatcgatatgtaaaattatacatgggcggtgcccccttgacacttatcatcaatacatttctatacttttcttttaaaaaacaaaatttgattgctaagcaaagatcataatttagttgcaattttaatgtaattatattcatatgtaattttaaattctagctctaattcatatattgacccaaaagtgctgtgatacttttgatctaaactgataaaaaaaaatcaggtactgaattcacacaaaaagaaatcacaaatagtgaaagtgagacagccaaaccacaaagtataaaattgcaaattgccgtaatttttgtgtatatataagtcacctcctctgccctcttgatccataaccatggttcaaattctcaagatcttgtagcacatatcaatgaagtcctattaattagtattaaatagaagaaataaattataagcactaatacaattagatatgctcttcataaaacaaattaggatttgcgatgctaggtgagaggaacatgagatccttttctatcaatagaaatgaagtggaattcatagtagttcgaatggtataatcgaccgtttctaacattggcaaacgaatcaaagcaaattgattatagttcaattactgatgattataagtggaaagtcatattcttcagtcattgataaacaatttgtaggataatactcaatgcaattagcataaaatatgcctacttggagtagtaggaattggaaatctctcctttaaggattactttgcaattattattttttaaataaaaaaaatatttgatattgaaatctgtcagataatcgagtgactaccccaagtcaggatcaaatataactgagaacaattctctacagcatctacggtttagcaaccgttcttaccattaatcatgttttggtcacacggctacgattcctccaccagacttggaattgtttctccttagaactcaaggatacagaagtatgaacctatagaatagatcttgttcaagtaagatcgtagagagtaggcaattactaaaactttgttgttattttcaaattaagaacaatttaaaaaaagggtaaaagttgactaggatgtaatagaattaaacaaaatgaaccattctacaagaagaattaaactagatgatcattaaggtcttgggattatgagatgcttcctttcctctggaagtactatccttcttctggaagtactatccttcttctggaagtactatccttcttctggaagtactatccttcttctgctctctcctctatccttgcccttctttttctttttctcttttattactattcgcaaggttctgcccatgcaaaagggtatatagacagtctagtcacagaagtatttttggggatagcagtcttctgcctttgtctgttgatcatggaaaaaacagattcctcaaccaaaatttttaattatttggaaggattatttagcttctttagacggcctcaaattccttttactccaaacagtccatgcattcttcttagtcttgcagaaaacagaggattagtatttatgttgcatattgtgctaactaactcattttttttaagtagttcactttattgcaattaaatcataataaactgtaatcgccgaaatcggctccactgatcacaggaactcagatccataggttcctatcagcaagcgaaacatgatatcgttcttggtccaatcatttgtgctaattaactcatataatctcataatttgaaggggtctactatctcaaagactttttgaaaatacaatatacttttgtcttccattatgtttttttagggaactgaaaagtttagtagatccacgtcgtgattgatggcataataaaccgttatttgtttcctttcatatgcagttttgtcatgggcaactgctaaacacagttagcgatttgattttctatatatgcaatatccttgtggcttcttctttggatttcttgagctttaactgattggcccgcggattagcgggcggcaacatgttgggcaggtcaaagctgagtcattgagtcggtcaa

SEQ ID NO: 8536 - DNA, 1129 bp, Carica papaya
  Intron number 2 from transcript evm.model.supercontig_26.1 00 (locus evm.TU.supercontig_26.100) derived from phytozom e v7.0 (chr-ID supercontig_26; pos 777841 to 778969 revers e strand)
tgataggcacttaaatttcttgagggttttctgtacgtatgacattctttttttgacgttggatcttttacagagatacaatgagctgaaatttttagtgatatggtgatgttcttcatggtttgatatttggtgtaacagtttaaattttattttattttttctagctgaattatcatttatcagaaaaaaaggaatgaacttttatcactttaatatggattcttatgatacaagattcgaagaattctattctatttgtgctgagttttgcaatctttatgatacatacaaaaatagtcacttttaagaatgagttgagagttaggagcaatgatgaaaagttttgtgaaatatctgaagaacaaaatagtgatgcgttttttccatgggaagctggtagatgttgcattttaaatatggacaagctgatgagaaggggcaaaattttggtgaatggttgtttttttatacaaaagggggccagagttgtgtattcatgtccttctgtgatgttcttttgtgtataaaatttggactcttgcttatggcctcttgggtattaattggatgatgattggttcagtgatggaaaaatttggctgcgtaaaggaatcagcagtgtgaagaagcatgtgagcctcaacctccttgatacattttgggtggtacggaaagggaggaatacgagagtttttgagggtacgaaagatgattttgataggattaaagatagatgattttagaccctagattttttggttatgaatcatcttctttactcacatgagaactttgagagtcttattgatgttttacttgatatgtaaataacattgtacataggtttacaacaccttggtgcttgtgaattgaatcataccctgatatttttatttaaaaaaaaaatgatgtgactttatacaacagtggatattaaggtaattagatgcatgatatgtgtattccatgaatttgtaccttttggggattttattattagaactattttttaaatatttttttgacctgaaggtaagaattattgtatgcttggcagcttatcctcctaaagatttgttttgtgtttgcagagggtgtcattgctggaggtgctgctggtgttgtg

SEQ ID NO: 8537 - DNA, 718 bp, Carica papaya
  Intron number 1 from transcript evm.model.supercontig_192. 12 (locus evm.TU.supercontig_192.12) derived from phytozom e v7.0 (chr-ID supercontig_192; pos 188944 to 189661)
aggtctaacagagcgggcgttcaggttagtgttaaacttgatttatttccatggctttggctgtctattattccatttgcttctttgcgtcatcttgattaatttccgatcgcattctttggaagcagaagttgttctgtcgttgatgtttcgtttttatttttggttattcaatcggatgatttctcttgttaatatatttgtttgcgatgtcccagttttgatagctgaagattctcaacctatactgctgttcaattatgtatacatcttcaaacttcaaaagcaatgtgaaaaatgggcaagtgatttctgtcttgttcagcaaatattgatttataataataaatactaaaaagtcaagatttagaatattgtttgtacatgggtggtggcccttggagcattggttagaaagttgtaattggaaaactaggccagtgattaatcttatgatataaactgcctgctttgtagtttggactcataggaattgcatctcttactatcgtaactttattgttaatagtaattatgttagcaaagagtgattttaatatgctttgattctttgattttttggttattggttcatttgtttcttctatgcaaattactgttcttggtagcttcattttcttcccaccctcactgttcttatttattctgtcttcttttcttatctttggtttgaaggaaccatatatccgaggtcgtt

SEQ ID NO: 8538 - DNA, 5219 bp, Carica papaya
  Intron number 1 from transcript evm.model.supercontig_660. 1 (locus evm.TU.supercontig_660.1) derived from phytozome v7.0 (chr-ID supercontig_660; pos 15423 to 20641 reverse s trand)
agttctgtagcagctctaggtacgtattcacttaccatttctttctttcgtttcttaattggttcatttttctgggttttgtttttctgttatttccattttcattttggtttcatttgtttatgtgtttggtttttctttgaaaattatttattttttgtgtgtttctttttgttgttgtttctgtgattatatatgttgccagacttttttgtgtttgatgatgatgttgatggtaaagtttgaagaattaaccatatggaaggtctccagcgacaaagtaaaaaaactcgtcctttcttggttcagggtatttatgatctcagatctagaatcaatcctctttgaacttgtctcttgtgaggggtcttcttcttcacttacctccagtgcagaaattgttatgtagatgaatttcctaggtatcatcaagccccatttatttgggtgctgtgctgatttctgcagtagatcctcctttacagaacaataataatattttattaataaataactttcaatgaaaaaacagaaacttgatttttagagaaattaaatctttttattattgaatttcttgattttgttcttgctccactgttatttctttgactccctcattaaaaagcaaacaaactttctccagctaactgagattcataaacaaaatagaaatttcaaataagaagtgagtggggttcccatcaattaagcatcaaaggcttcttgtttggttctaaatctataaacttcagctcaaatagaagtccttttcttctttatcaactgcaaaaatagtttattagataagaaggaaactataaatccttgcatatatagccaccagaaaataccactgcgagccacaaacaacaacctttgagccaactgctgtgtacaccaaaacttggtttctcttatacaaatcaacaaagcactaatagttttccatcagcactcgtatttggtattagccatccccttagtttctcataattaagaactttatgagcaaaatcatgttttttaccgggaacccaatcaggcaaagagcacactgagtccataaatataagttctgagtaaaaacaaacaatatgcaccgttttgatatgagcagttgctatgcaaaaaaagaaatccacggttcctacacctttttgagtgcatattccaggctagtacaaacattcccttagcatatatgctcacccacaacttgattatggaatggcaagttccacttattactaagactaacaagattaagaaatgaattgcttgttctgaacaatatcactcactattagttagaatgattattttaaacttgtgctagtctagagtcattgaattaactcttctaacttaaaagcttgtttagttcttgttattgtataattcctgcgttagttgactttggttcctctccatttattgatcccgttcacataccttttttttcgaactttaatgatatgataaaaattctgtggaatatattaagagattagctaaaggaaaagatcctaaaagaagataaattagattcatatatgataatatgcttctaatggtttaagcacctatgagtattattcttatccgacagattatctacgagctgtgtacaaaggtttaatctgcttccacgtatgtattttccatgcttatacatgtatggctcgcttggctttattctcaacataaatttcttttacaatttcttttgaaatgcaaaataaaaaaatagtattcgcatgaagaattttaacattctataacataatgacccaccatgttgtttcctcaacttacacatatttatgtatttgtatgtatcattgtaggttatacaacatctccgtttcttttggtttcagtattgtgtagtattcgatatcatatacggtctacagttattaagaccaatgtcctcaaaatggcaacatttccagttggacatgaagttactgaatagacatacatgcatacaaaccttatccattttactaatcctttaagcatttcactgtatatttaaaatggatcatatttaaaattttcaagctgatagaaattgatataaggtgatttccttgcctcccagaagtctgctttacttttcaatgtctaaaagattcaacaaatattccttctaaaaaaattcattttcatattacagttaatgaataagattttctcctaaaaaaatgacaaaactaacaaagaaacacttatgaattacatattcattaatatttttaatcaattaaaaatttatttgattgttagaaagattgtgtttgtatatctaggatattggacaagagttgtgtaaaacttttctccacaaggtaatatatttgcaaatcaatttctttgtttatgtgaatcttcttttcgtatcaaagaaaaaaacagtcttttactttgttataattactttttcttcatcttcaatttcttagcttcattctattttcgcattttaatctaaaacatcctctaaattcacgataatcatcttatttggagattttatttgaacagatgatatagagaatgagaaaaattgatttgattatgttaatatataaaaaaaataagtaacctcaaattaattagagttacttaatttatcttcgcttatataggagatcactatcaattcctagagaagtacaatttgtaggataaaatttttttgatagatacttcttttgaacttgaacaaactctataaccacatcattaacattatattaggaacttacttctcaatattggctaataaaggtacaattataagcacgcaatttttttttaatttgaatgttatatttatttatgatgtattttctatcctatgtcatttagaactaagtatttctatttcttatgagattttactctctataagaaaaattctctctacaaaaaatgtcttttaaaataaaactctaagaagagatcatcttaattaggctggactcgaactttggctatattctatttgtaaaggaatttaacagtaaattaattcgataaatatatttctgtaattactttgatacccaattcatcactcaaaagtaaatattgatgataatgaaccgaagttacaaatatgtaaaaaaatttaagtaaataaatatgttagtgaataaacattaaaaaaacattatcacacattccccctaacttagtttgtaaagtaataaaggtagtaaacatataataaacactgatcggccagtattggaaggttatggaaaaaaagtaattatagtttattgaatcctgacaaagttagtgtagactaagttgttaaaaaatgtgaaatataataaaaataaataaattgaataatttattgttaatttgaaatttgggagtatggatagcttaattatcatattatttcaattagtattagaagttcttcagttcaaacttggcagcctttgcctctctccattagcctctctattattcacctgtctgtgacctcacaactggaacttcttcgtttgtcatgtgcatagtttgtatagaacatttcgattgaaggtccatgtcaaacataagaaataatacgtgagctatttttttgttgaattaagttttgtttttttggacaattgacaagccaactctttttcatgaaggaaactacttgttgttatattattaatatatgagacctaaattgtcaatttctttccttttacaataatcactatatcatataagaacttgaagatgttaaacattcttactcaagaacatgagagcttacatctaaaagatttgtaatctataatctaaaaattcttttagttaaaatgctttctctatatataaaattacaatcagcataacaacatataagacatatccaattacatgaagatatttacccatattaagaacatgcaagctcatatgtaaaagatttggaacatataatataaagattttttcaattaaatttattttatctttagattgttcgaactttccttggttcttttgcttttcttaaaagtgataaaaaagaaaagatgctttatctagaaccagtttcttatttttgcttggaggaagcttcttgtggagagattctcagtattgagaattgcacaggacaaaaaagatctttgtggacgaaagtttttatagaataaaatagctaagacctaaaaccatcttttgttaaaatgtttgcttttttgtcttctatgatttgtggcttttagatttcctcaaaatgtagtggatgattgttagttcttcgaaagataagttgtaggctttgaaagttttctttcatgataagaaaggaaaaaattatttattttattcttaacctatttcatgagttatttagaatgagaaaaatcaagagaactttgaaatatttgttattccctaaatttttatttttatttttattttggaatgtttatctcaaaatgtttggtctttgttcaagggacatatgttaaattggcaaagcatgtaggggtatcataaaagaaaactttgcttattgttgtcatgtttatatcttttattaggtggtacgtttgagtgctctttgatggactctcatcttttcttttttcccctagaaaactcatcccatgtgagatcgatttttttttttattatcacccttgtatggtttttttatgttttcttcaagttcacatatacaaatgttctaatcaaaaatctaaatggtctagtattgaattaacttagtctaatattgaattagcttgactaatatatattatcgtgtcaaatgtagtactgtattcaatcaataaatattttaggtttcaactggtagttagttttcaaaaattttaaattaagttatagttataataatttgtttatctccctataagatattatcaaaaaaataaccaagtttgaaagtggtcatataactttttttgctttatttttttgtgtatttgttaatgtggtagtttggtgatgttcaaatttcaatcatttctaaaggttctacatattcagtaataaaatatttgtaagtactcttaacatgttaaaattctatatattaaataattaagatttgaattaaactatagttattgtgcaattgcaattatgacacagtgtatatatatatatatatatatatatatatatatgtatatatatatttatattccagc

SEQ ID NO: 8539 - DNA, 3149 bp, Carica papaya
  Intron number 1 from transcript evm.model.supercontig_165. 17 (locus evm.TU.supercontig_165.17) derived from phytozom e v7.0 (chr-ID supercontig_165; pos 107554 to 110702)
gatctggtaaacttatcaccttttcggttttccttctctgacctttttctgcttaatttttatcccggttactctttaaagactaacaaacccttgggcctgggtatggaacatcatttcttgcttttttttcctccttttggtgggttatcttcagttaagagttatcttttttaaagctgattttgcttcttgaattatcggtttcagcttgtgatttgtgctttgactttctgcaattacactttaatggaattggtttgttattcagttgttaactaatgaggtacttttaccagagtagatagtgatttctaataccatatcattctagcttggtctaataagttacatgtagaaaatattttagtacacatgatttggaatcatttacatgtgaaatgcataaagaagatacagaaactgttcagaaacgtgcttacaagaagcttttgtgaaaagttaaagatgcgagcatagcttttccatttccaacaagtttttgaatttaacttatcctactacataatctccattgctctgcatattattgcactttgcaatatcctgattgtgcttggcaataccaaaaagcaaaacaaactgatctgccataaataatggatgtatgccaacatttagatctcaatgttgatcctgataaaaccaagttgcatcatctggacatttgggagagattggcaaagaaggggaagagggggaaagacagaaggaagttagggaataagcatagaggagagaattgaatcattgttattcattcatctgtttgatctgtacatctacatatagcatttatacatggttctgtaactaattagagtcagttatacaggttttaagattacttcactacttaactagtttcctatttcccattccactaagtcccctctctgtatgatcaccttgtcctcaaggtgagatcacttcacacagaaatatactcaatggaactcttaaagctacaatctcagaagccttgcatctccaaaaatcttgactttagtaatgagattggaattgaaacaactgaagatgctttcccctattttttcttgcaaaaccactgcagatttggaacttggatagatcgaacatcagcatatcctgtcaataaatgagctatccaagagaggttggagtgacatttgaaagcaagaggttctttgctttgctacattaccatttagaatatcacctagttgctttgcactgacaaggacaaagtcctcaagatttctttccttgtaaatcttttaattattgcagggatccaagaaagcatgatccttagcggtagcaagctgaaacaatcctttagctgagtgagaactcctaatatcaattgttgttttcggatcttgatagttgattcaaggatattattgtcaatgtggagcacttctctaggatgatcttgaatcaaatcagccaaaatttcttgttcagttttgtcaaaggatactcttgtctttgaaatgcttcctataagtcttcattgttaagaaaatcaccccgaggacctaaagaatcaacattttctccaaaaatctccaaaactttcttatcatttttctccatctcatccaaattttgcaacatttcttcaaagatatgttgttagtgactacccagagtgccttggaggccttgtgataagagaaaaattcaccattcttgatcacgtcctgtatttcttaatcatgttctttatgattgtcactcactgtcttctgttaggaacaaaatagttcctttcccgcttgtttaccaaagagggaacaaactaataattctgtgtaattgcttatatttatgtgtagtagtgttaatatggtagtgtaataattatggaaaataagtgttaagtgtgtattagggtaagaataaatcttttttaagacaagggcagtttaggtaattcagaaaaactaattccagaattaactgctcctcctagtacatatcagctgctgcaggaaaaaaaaacagaatcatgtctgaaatttgatattaaggagagtagatttctcttcagagattgtaaaattctttataatcaacaagctctaattatttttgtttaattctaaagatagataaaggcagaaattgaaaaaacatgatatatatatactggattttgttttgaatcgtcccataaagcaatccgtcaatagggatcttccaggcttttgtgtctgggatcatattcttgatgaatggtgaagggagtttatagacttcaagatactggtggaaggaagaaccacgaaggtatagagatggagactagagaagagaagagaaagagagagagagagagagagagagagtcaaaagggagagatagagaagaacaaggacagaagagagataaattgagttataagaatctagaagagagatgtagagaagaataaagaagaattttgagagagaaagagagagagagatcagaaagaggagaaaaactcattattcttggaggcttggaatcagaaagaagatggagactagagaagaggagagaaagagagagagagagagagagagagagtcaaaagggagagatagagaagaacaaggacagaagagagataaattgagttataagaatctagaagagagatgtagagaagaataaagaagaattttgagagagaaagagagagagagatcagaaagaggagaaaaactcattgttcttggaggcttggaatcagaaagaagctcaattgtcacttgatacaactgatttgtttttgctggacatccatagagagattgatagagaagaaaggaaagggcaggagggaaggaaggttaggcagattaagtatagaagagagaatagaatcaacgttattcattcatctgtttgattagttcatctagatattgaatttatacattgatctctaaccaattagagcctcttatgactgattttgagactatttaactacttaagtagtttaccatatcctgttgtatcggatgcttagcttaaaatgtgccttttccttggacatatttgttgtgaaaacaatctgttgcttcttgcctcattttagtcatattctgcagggaagaccacattgttgaagattctggctggaaag

SEQ ID NO: 8540 - DNA, 3279 bp, Carica papaya
  Intron number 11 from transcript evm.model.supercontig_175 .24 (locus evm.TU.supercontig_175.24) derived from phytozo me v7.0 (chr-ID supercontig_175; pos 474651 to 477929 reve rse strand)
tttacagcagtgcgttgggtgttgtgcgatccgtcagtgcttgcttttattaacattcattttattgtattctaaaatgtctaatttctcttaaaattcattttgttacaaccctgttgtttctcttttttgcttaatttaattgatttttctgtattagttagactgtagttccttaaaattaaacaattgttctctttgatgaatctgaatataaatagttcgaaactgtaatctggcctgagaaactgttgtttcattattagtgttctgttaatgagtccccaagagtctacgttgggtttacgggtcaaggtgttaaaaatattttcacatgggaagtgtaggaaagttagtgaaaatgttaagtattttattttctaattatttatgtatctgaaagtagtttgtagttactacatctgtcagtttatgttcagttttatgtttgaaaactgccatcagttatcttatttttaaggaggtattaaatatccttgaggagaagcagttatcttatagtgttaaggctgttccgagggaaatattggcagagaattatcaataagattttttgagtacttaaaatctagaagatttttggtttctgtaattatgagcatatactattaatcagaatctcagaacaaggtcctaaagtagaggccataacatttggtaccaaagtcttaccattatgggtgatctacgatctctcaggcaaaaattttagaatttcctaaaattgtaccaggaggattgagcacaggaagaacttgagtgggagtgagactggaccactttgctacctgagtaagttgtctggaactattatttatagaattgtctggtcgttccgaagtcagaagagatgttggctacagaagcagtggtgcgaaaaggacttggcagaattagtgcaacttccccaagtgggttcagtggatgatgttccacaatctgaggaatttgcagttgggcaagtttgttaactgtgaattgaaagtgattgtttgaggcagaacttgaaggcaacagactcaagggtctttgcttcaactgccaaaagatgtttatcctgagtaactgctgtgacaaaatttgttcaatctgcggaggaagaagagcatatagatgcctacacaccagcaagcatcaccaatccaggggaatttcatgagaaatcaatcggcgtagatggatcaagaagtatcattcaccatgagaatttccttgagtctgttgaacctaatgtaaccatatgcattctcttagaatcagacaatccgaatgatgatcagactgtccagatatatgcccatgtgcttttcttagatcagtgtgccttttttgattcgttggcggtgttggattttggctagagattgtggctgagtttgatggtgaagaaagatacgaggaattggtcgaattgatgtttatcatgggtcactgctgtcccaaaatgtgtcatatccacggaggaagaagagcagatagatgcctatgaactagcaaacatcatcaacctttagcaattcaataggtgtagacagatcaagaagtaacatacactgggaaaattttctcgaggagtctgttgaacctaatataaccatatgcatactcttagaatcaggcataatcccattaatgagcagaccatccagatatgcccatgtgccacgcctttttcaattcctttagtggtgttggattttcaccctaaatctagttcatgtaagattttggctagagattgtggctgataggtttgatggtgaagaatgagaggaggaattggtcccagttgatgcaaaggaggctacaatccccattctataagaggagtttgatcttcataacaatgcacatggagggatgagtttgctttgcgaatttctagaagagcttcctaccttgaaggtttcagtaccctgggactgtttgccttcaccagattgaggatggcgaaagaaaaattaatgagacagttgtgtgtaaagaagttacagactagttccttgcctttctagtacttcaatctttttgattgttttattcatttttaaccttctaaggttgggtgcaaatctaggtgtcccttgttgacaactctagattgatagtttactgtcatgtgtacgatttttattaaaagttggcagcaattacactttcatggtctgagggaatctaggtggagttgaccaagaaacttatctaccgcatcacaaacagtggatagagatccatcattgctgcatctactacttttagcaagttgaatgaccctcaagatttgactcctagtgattcataggaccattggatttgccacctactttgactgctacatttttccattcctactcagcagctattttatattttcgtgtttgggctggataaagagaagtttggttcactgtttcaaagaacaaaaaaaaaagaagtttggtttactaggaagggttgcctcctaaagatgcttcttgggaggctactgatcatttagctcatcgctatctgcattttgtgcttgagggacaagcggttctggagggggagagtactgttatgagtcctgaaaagtctacatcagattcaagggttctagtttatgaaaggttttccacatgagaagtggaggaagacttggtcaaattgctaagtattttattttctagttattttacttttttgaaagtagttaatagttacaaaacttttcagtttatgttcagttttatgctcgaaaactatgtgatcgtttattcgattattaaggaggtagttactgtccttaaggcaattagcatgtattgtgtacacaaggctgtcctggagggaataatatagccataaaattactgataagtttattaagtcctttaaactctaagtgctctttggattctcttttttaatgagcttatactattaatcaatatctgttaacaggatcctaaagtagggtccataacatagtccttgataaaaagggaaaccaaccattgtattcatttgaacatttggctagcatatgaacatagttgatgaagatttcattctttgtctagcaggcaaaattacaatccatcagcacaactaactttgctgttgcaatgtcagtttagaattcaatcgttcagctcaataataacacattttttatgtatgttttgttgtaattggttggaaaagtccttattaacaaaattgggcggtgattttgtggcagttgccccttccccatcttaaacttggatatttgac

SEQ ID NO: 8541 - DNA, 4004 bp, Carica papaya
  Intron number 8 from transcript evm.model.supercontig_184. 32 (locus evm.TU.supercontig_184.32) derived from phytozom e v7.0 (chr-ID supercontig_184; pos 368611 to 372614)
agttgcagttgccaatcttcaagactactgcagtatagtagcttctcttataatgtttgtgcttgttattatgaggaggccataaatgcaggaaaactatctctaaacatgcatcttttatttgaaatataaagtgtgaagtatattaatatacggcaccgaaggggtgccaacatctatacaaaatatttacagatctaccaaaatatcaatgagatctcctagatccttcatagagtttagaggatgacccaataacaagaaagtaaggatctaaacatgcatatttaattgatcgatatgattcaagtaggcatttgttaaataagaaactgattatattttatcggggtaatattgaaaagcacctgaaagttttgtatttgtattagattgcacagttcatttttaattgtaataatgtgcatcttacattatactcttatatcaaataactcctgttaatagaaaactgttaaatataatttttttatatacatggcactttgagcaaataaaaaaaatacatgtctagggcattttgtccaataaagatatttataaattggaaaagaagtttaaaatatatacaacgcaaatatccacttttgcagtttcttcttctttgtcttccaactgctctctcctctttctccttcaatttatgagaaacatatctgaacaaaagatacatgatttgaagtactttcttcttcaatttatgagagacatgtagtggaacaaaaaacgtgttttgaagtacttccagaatgtagcctattaaaaaaagaattaaatatatcagtttattgatagaagattacaaccaaggacacatcgtctcaacaaaacctgaacccaatccacaaaccctcaacacctgagagcaaagcaaaggtaaaacaaaattctaacaaattacagagtccatgtaacgtaagccaagggctctatatatttctgaatcacagtttagaaaaacatgtacattagtcctggaaaaaaattataaagatctagactcaaaagcttcaaaatacaaaagcagcttcatccattgagttttagatttggcacaaagaacaagtctcatcgaaagttgtctggaccacaaggcaaccggaaatatagaagcaacaaccctctgaaatttctttggccagaatgcctagaataaaattcgcttgagcactaattagatttgggcaagtatggggagcaacaataggaatcatccatagaaaggtagaattttgtccaaatcaatccagatttgagcaagctagtcctctcatagctttcatgttttttctagcttgcaaagaatatctgtttctaacaatagaacatgacacaaaagtagttgaagtagatctctgctagaatgataagaagaagtaagtgatgatagctggaaaaagaagaagaaattgtgaaaatgaattgatggtttcttttttctgtgaaattattttttaatatataaacattttttggacaaagatattgctcagagtgtcacatgtacaaaaaggttaaagttaatggttttacttaacggaaaggatggtttaatacaatgttacggtgcaggatgcacattgttacattttaaagtgtaggtgtagaatttggagaaaaaaataatttttattctcaccctttaagttgtaacacctgggtatttataaagtctttaaactacaaattaagaaataactattttattagaattctaattacatgataccaactaataattaaaatacttaaataataaattatactactcaaacattcctcctcaagttggtgcagggatatctctcatgcccaacttgcagtttacgttttgatgagtcatcttgcaatttaccagtgtcaatcttcttttgttcaaagattctgattttactagatttgttgcctctgtagttgatgaatagttaaattgagacagaatacgcttcagggttcgaatctcttcattcaaaaaagctccaattgttggtatgtcaggtatttcacttttctcaactaacttttcttgaactctcgtaggtccgccattatttctctcactacctctagttggctttccatgcaacttccagcaagtctctcttgtgtgttttgccttgccacaatagtcacatctccgtaggtacttggattgttcagactgaacaactaatccaagtttttcgactggtgttatataaaatatgacattctttctatttttttcttactggacatagacataagtttattctaatgaaggaaaatgatttttaccaagcatctagatccgtatttgatcatatttggtgttcaaaccagtttagaaataataaattcgttctttttctatcaatttctgaaatttaattgcatatgtaagacaatctgcttgaaagccttgatagtaatctaatttctgtcataatccactcagttcagaaaaatatcgtgaaataatcatctttcattgatttggaccatgaattttattgcggagtttataaatttggacatcattatccacttgtgaatatgtaagagatgccgggttctatatttttgttgaatatcgagtaataaatatgttcgtgcaatatgtggttgcatggaattgcttagccaagacattgccaaagaattttcagagtcccatatgttatatttcaaatcatctacttctggtttcttcatatcacctgtaatgtacccctgcaatcctctaactttgatgaacaataaataagattttgatcaaataagataattagttctattaagttttacagaatttgtaatttgcaccaaaatagcaaaaaaagacagaaaatactgaaattagatatgtctgtctcggctcaaaaaacgacttggcttagctcagaaaacggctcggctcagctgaaactcggcttggcttagtgcaggtggctcggctcaggctgaaattagctcggctcaatgcagctggccagaaaaactccttgcgcaaggtctgcgtgcggtgaaggggaaaacttgtgcccagtagaaggccggtaggtcgcggctagaggctttgtacgattggagtgaggcagattctctgcacgcggaggatgaagaaaccagaggttgtcgcgcagctctgcgtgcggctgaagaagaaggaaatattggtgccctgtgcgactctgcgtgtggctgaagagggaattgggttgtgtgtctctgcgcacggctgaagaataaggaaaccttggtgccctgtgcagctctgtgcacagctggagaagggaactaggtcgcgcgtctctgcgcgcagctgaagaagaaggaaactgagagtgtcttcacatctctatgcatggtggaagaaggaactgggccacgcggctctgcgcgcagtggaggaagaaatcggctcgtcctttgtgcggcgttgcacgcggttgaggaaggatctggctgccttctcccttcctctgatctttcctctcttcccccttgtctggctctctttctcctcagcttccttttgttgttttagggttttaaaaaaatcctaaaaataaaacctcaaaatacccttattttgctctaataccatgtagaatttggagaaaaaatataatttttattctcatcctttaggttgtaacacctgaatatttatagaatctttaaactaataatctggaagatgatttgtccatttcagaactggacaggaatagagtccttttgaattacatgggtttgcaccccttggtgcctgtgaatgaatactgtttttatttcaaaaaaatgttaaatgagtgtagaacctttgaatccctttgaaaaatacgttagaacctgaaatactcatctacatgagtgggatagaatagattcatagagtagctttaatatccttatcattttatagcctttttcatcctttctgatggtgttctatgtccatcttgtagaactggagaacagattgttggctcgttttg

SEQ ID NO: 8542 - DNA, 917 bp, Carica papaya
  Intron number 1 from transcript evm.model.supercontig_546. 1 (locus evm.TU.supercontig_546.1) derived from phytozome v7.0 (chr-ID supercontig_546; pos 4878 to 5794 reverse str and)
gcagttccgacctctccgcagagctctccgttccggtgagtaatttttatctccgttcctttctcccctgatttgcaggcgttggattttgctgatgatgacttcacgcgatgttcgttattgattaaattaattaattaaaatcattaatggtgtttcgtagtgatttaagttggggtgattagtagctgatctgcggggggttaattaatcttagggggttgttttagtaattatgagatttggattttaatgtcggcgactgggtggaatccagtgcaccaaaaataaaaatgaattattaaaggatacataataattgtgatttcatttatggaagtcacgtgatgggccatgtgattagttgattgaaattggttgtcactttaaaaaaaaattaaaaaattaaaaaagaaaaagagaaattcttttggaatgttcttaatcgtaatgtacccccaagtgatttccacattggtttcttgaatttttcatcttttgatgaattcctctttaatgcattgaatgttttgtataacctaataaaagtagattccttcagttgtaattcagctttaatgtttgatgaaatgaaatgggttttgtatcaaaagaagaaacaaagaaattagtcccaagtgggtattgatgtgttgttagtcctgagtctaatgtgaattgtgggcgaccttatctgtatttgtatgattgagtcgggggaattggcgagcttgaagttaattttgagtgtctaatgtgaattgtgcagaatcttattgggatttgtatgattgaattaggagaattggcgagcttgacattagttttgaatatgttttgagtggatttggaaagctgtcgactgatttggtttggtttttgctgtgattgcagtacgaggatattcttcagttgga

SEQ ID NO: 8543 - DNA, 4224 bp, Carica papaya
  Intron number 6 from transcript evm.model.supercontig_213. 16 (locus evm.TU.supercontig_213.16) derived from phytozom e v7.0 (chr-ID supercontig_213; pos 415082 to 419305 rever se strand)
ctgctcagtctggtaaatctatctttagtatctcattaagtttttcagtgaattacttacttcatttaagcatctttaattttgacggaagaattgtttatgtttttaaatctagcagaattcttttagtttcaattgttattggtatctttctttcttttctaataccttaactttgctaactgttaatatttgactagtaggcttttttcttgatactggtgatatttttggagaaaatttgagagctttcttggtaatgtactagaatactacgaagacaacacaatgattcagtgcttccatagatggttcgctaggtaccaatagatttagatgcttaacttcattgagtgcagtatgaaatacgtgacttcaccatgattagagaacattcgttctttccattgtttgatgaatatgaacatatgactaccctctaccctttaagtatccactcccttgatgaatattaagttccatttattgtaggtacgtatgtagacctactatttggcagtaggaacatgatggttaatcctagattttcctccgtactgatgactattaataattaagaaatgattaatacatagctcttcttgaaaagcctggccaaaatttcctaaagtcattctttcgagaagttgcttgttggaagcacactcaatcttgagcatgaaaaaagagcctaagtttaagctcatcatacaaagcaagtgctctttacaggatgtatgaagtcagagcatctttgcccccaaattcttttcttcaataagattgggactgaagccaagacctcatatcggtttaggaataccatgtaattctccgaaaaagatcaatttacaccttatttggataaatcttagtgatgattaattaatgtctgacaataacagtgattggataataggatggtatagttgtattttcagtcaaattacgaatttatttatatctattatatgtagtagtaaatggtatataagaagtatgtaatgaaaaaaaataaattgtttaccaatataattacatttgtatttaaataaataattattatacataatcaaattaaatttttatatttagtaaaataaataataatttgtgagaacaaaaatgtaattaaatatattatattggggtataaggggaaaaaaagtaacctgtcgattacatactatcgattcgataattttaaaattcattccaaatttgtcagttaaatatcttttgctactattagaagttaaaataaatatgattttctcacacccgtagagtaccatacattaaaattctattattcactacgatccaaatagggtgttaaattctctaattgttttttctatactaatgtagttctctaaagaactggtaaatattattgctaaggaaaatcgttgtactaagaaagcttaatttttcatgctcttgctacggttaacctattctcttcgaataatttgtccaatccaagaaaagccataatgtccccaagttctttatacgtttttaactttgcctaactctttcgcgttttcataatgctcctcacctatgacttgaggatagagcatagttgatgttgagtctaaaggatctgttacctattgcatctaattctcttgataatactgtagtggcatttaaatgtgcaaatgcatctttatctgttcataggactatgataatttgatgtttttattgattaaatgtttgtttcccaagcaagtttatgtttagtgctaaactgagaagggtgaaaaacaatctctgagattttcagaaaatgtaatattttatttttggattaaagatttaaaacatagggttttcttatactatatagatgctgcatggctcttgattccaagaagtggatcatctccttaattttgttgtcttttctttgggttatttggaggaatataaataggagagcttttgaaactttatcctcactttttctgcaattgaatataactggttaaggattttcaatcatttgctcaaaggctaaccgattcaagattggatcaatagtagatatgttggattttttgttcttgagtgatttgtaaagtctttctacttctccttatttcttgagtctagtagctggacttcatggcaagtggtacctcactcgatcttataagtcatgaccctcttaattcttgatgaaggtggaagttcagaatactcttaatctaatgaggtagtgtttgatagcttgaaggggcaattattggttgggaagaagtgaatagatgatgaagaactggaagatcctagaatggacatgctttaatgttttgagtacttatattatataatcttttatattgatggtatttagcttgttcgggtacaaataatggtttttggacaattatcttaaaacttaggttaataggaaaaatatgattgtattatttaaaatttaacatcctattgtgtgcaagtctgccaagctgattgctgtcctaaaaacttaagcaaacacgaagaaggtttatctgttatctataataacagtctcttatgtgtaagtctgtcaggttgaaagcatggtcgaacacatgcttatcgtatattctgctcaaatttagttaacataaaaaagggggcagttggcagtctatcttaagatctctagttttgacatcatgtaataattaattaatttctcctaggttgacagaaaataactgaatctatagatatttaagcagaaactattaagaataggcttagtagggtagaattttcacttcttacttggctaaaaaaagtcttattttgttattattttcctgtttaagcattttaattgtattaggctatgtaaatatcctaaataggtaggtgattcaaaattatattagaagactacttattaagaacacaaggatattctctcattcattcagtgagtgcctaatggcttgtccttgagattgtgtttgaaatctatctgtgttattgtggattatattttttctttcctttttctattttttctttttttaaaaaaagcttcttttctttttctgttgttctgactcccatttcactatgtttcagcaataagagggcaggccaagataggtatatattgagtttgggttgcactgtgttggaacttataaattttttctaatttagatttggtaactcttggacaaaacaaaagaaactgtacagttactgagttactcttatgtcatcatgtgtttgatttttaatgcatgaacttagttaaaaaatgaacagtgttttttattaaaatgttaaattattcacacaaaattgttattctaaaattatgtagtcagtttacttaaaatgattttgatctaaaagaaaatgttagcttaatttttttaaaagtatgtagaagaaaacacacaaacatcaattatcattactatactgatattgaagatttcgaataactaataataaaaaaacctttatcaaaatatgaagtccatgattaaaatgggtaaggttaatttgggcatgccaacaaatagttgaggctaataggggcatgttaaaaattatggtttttcctccataaaaatatttactccaatggttttccatgggattcaattttctatggaggataactttttgtgctgttctctcttttttgccaccaacagactgcagtcctataatcctgctgacaccaaatgttacctaagtcaatcatcaaaggactttactaagctagtccacgccttcttagctattttcttgtgcaccttcttgttttatatccttctccatataacaccttccacggcgataagtcctctcattcatgctggttattagaattagttgactcatttgctctgtctgcaatctaattacttggatatctttgctagatttttgtttgctttctcatgtttactcaaaaatacaaattaaaattaacatggtctgttggccaaccactgggttctggaccagataattccttgaaatcgaagagcagtgaactttactctcttgacgttatttccttttctgagtggatatcattaccccagcacagaaattgttgggccaggcaattgacttgtgacataatacctgggagaagcctacttgttacagtgagtaaagtaattactgttgcttacattgtcaaatgagcttacatctgacatgactgtgatttggaaggtccaa

SEQ ID NO: 8544 - DNA, 1595 bp, Carica papaya
  Intron number 3 from transcript evm.model.supercontig_181. 10 (locus evm.TU.supercontig_181.10) derived from phytozom e v7.0 (chr-ID supercontig_181; pos 253816 to 255410)
cacaatcaccttctagttctagtggggatactcaggtatgtgtttgtagcaagtaatctacatgtgttttttcttttccacaatgtttgaaaattacagtattatattcagatatacaattgcagaatctacttgctatattcaaattagattagtgtgattttggatttcttgataaaattttgaacttcctccagatcgctcaatttacaattgtcactttggcctggaacagaaatcagaaagagctaaaaaaagtggaatgaaactatgcagtgacttttttttttcttttcatattttaccttcgcgagattaatgtgagatacaacaattggctctatagtcgattgtttaattgatttgtaaattttttgtaaatgggtggtgcccctttggcacctttacttcaattcaacttcatacttttatttcaaaaaaaaaatgtgagatacaacaattccagagtgtacttgatgatgctataacatgagattagtatgattccacagttcttgattaagttttaaaacttttttcatatctcccaacttccacaccttgccctccccaataaaggaaagaataaacggataaagaaaggggaatgaaactacaaagtgaactcaaattctttgggcatgagaactatttttttttaatagtaaaaatgaatatactcaagagcacctagggggtggaactcttgtataaagatttacaaatcaatcaaaatatcaataaattccctaagattctcgttgtaataaagcaaatgaccctcgaccaaaaagtttagagtctagaaccaagaatctatgaagtgaacaaaattagatttagaacccaaaaaagcccttttattcatctcgttttagataattcaaaaagtagtccgagggataagttcttttttttctttttttgaaataaagtcatagggataagtcttatcctcttatccccttccgtgcttctctaagcacaaagttcctccttaacaaatccaacaataacccaattcaaacccaacaaattataagcgaagctcgaaggtcgatatgcaaacggacaccacaagagaatatgcctgcaagatttggcatacttctggcatagaaaacattcattcacttaaatgtgtatgggtagggacatatgacaaaagttggtacgctagtacactatcaagacctcatgggaaagcaatgtagaaaaaaatatgcataggtaggaacatattccagaactgtatttaatggggggttggcaagggtgacggagtcagtttttgttaggactggtggctggaaagttccgctttcttagagaccaatatcctcagatttttgttatagcacaacaaaaagatattttgatcagtgactttttcagagaaatgggggccgtctaaaggagtggcatgtaaatttgccgagagatcttaatgattgagagattaatgagtatgagaatctcctaactactttgtcactcataactttggacggcagcaacgatcaaactctgtggaatcttactactcaagggtctttttcagtaagatcattctacgagcatcttactaagcagga

SEQ ID NO: 8545 - DNA, 9511 bp, Carica papaya
  Intron number 3 from transcript evm.model.supercontig_209. 23 (locus evm.TU.supercontig_209.23) derived from phytozom e v7.0 (chr-ID supercontig_209; pos 86697 to 96207 reverse strand)
ttgctgcacgtttggcagtcattccactagtccaggtaatgtctaaatctaagcgatgaaacaatcttgtgaaggtatatttccgtaggattaggaatttttcttctaagtaaattactattttagcagccttactaacatggatttttatattttagaaggatttcatctcttcttcaattggaagttttatcgtgttcatattagctaatcaaattggaatactcgatcattgatggaatattggctgattaaattagtagtttaggtaataaaaatataggaatattcgctaattgatgaatacattaagaggcctatgattgtggtcattattttatgatcaacgtggttgtggatagccaatttctacaattatagattggattttcttatccttttatatctttcttaaattatgagttaagctaaaaatttagttgaatgaatggataactagttgttcttttaattaaaaaattatcttaatggagtttatagtttggtaaggggtatattaattgaaaaatatggtcaaaatggttgatagctacctaccaaaacctcaagaatgcggggtacaaaaggatggtcctaggagcttcttttgttgggctaaaaattcttgaatttttacactttttctatattgatacccacttggtgccttcttttggaaccaaaaatgttgctttaagtatctttgatcatggaaaagccaattcaattttgtctttatctcaatctgaattttgagctgaaataagcaagccataaggaatcactatgtttattgaaccaaatcaaaaaagaacattatgtttatgcagtgaaattaatttaatagtttcttaatatgtacatgattattgatattccatattttgctatcgatcaattctatgattgacataacaatcaaacagttttgagttaaagaatatattgggattgacgtgtatctccattgatgtcttagctagcaacaggtaataaattcttagaaatcacaagcctaaagctttattttctctttgtcaattgcagcagcgaacatgtcttgtctccaataattacttacattaacatttacaattttttagcaacactagctaatgtaaaagagtttcagtccaaattaccctacacaatatagaaattgaagaaaatctgggatagaagactaggtaagacagaaactagggggattggtggtgaggaagtaacacggaggaaagaggaatagtaagcaggcaagaggagcaaagcaagagatggatgcaacaggtaaagaaaaaacacgaaattctatcactcaaaacatcaaatccgagccctgtttcctgcagattaaagaaacctttgatatgtctaacctcaactaaaatgtagaataaattagaagaaaaaaatctaaagcttccaaaatcctacacaagcaaatagacttgaatctcctaaatgtctattttcaaaataaccaaataaaataagatctcttaaagttcctaaaacaaatttatatatgtagattagatggtttttacattattctccttcacttacgaagaacttgacatcgatgaattagaatgtataacaatctaagaacttggagctcaaggtgccatgatggatcttcatcaatccaaatagtagcagacttgggatgaattttccttatactcgttgaaattgcctttggaggtggtaatgatctctattcaaattaagaggctccaagaaaccttgataagtgataaatccataactatttagaatatgatctatattcgaatggttacttatatgatctatatttgaatggttacttatatgatctatattcgaatggttacttatgtcaagaagatacgtattagatctatattttttgaaggaggggaaacaggccaagggaagaaggatatggcaagtttggtcagcatttgacaattacaaaatcatcaaattgaagaggatcatcaatagatgaaaaaaaaaattgtatgctcttgcccttttcagatatggcaggcgaaggattactcatgacttttggactttctcatgcccttagtactctcatgagggtgatgattcacatcttggaaccatttattggaaaattccttgtagtttattctgatggcaccctggtttctagaaatctaggaatgatcatccagatcaactgaggcaattttttgaaacacttatggaggttgagcttttcttagaggaaaaaaaggaattaatatatcgaaggcagcaagggaaggccaccaatatgtaggaagataatttattgctcagttgaaaacttaaaaagatctcctgaatccttatcaatatgaagatgaacatccttagactaaagcattggtccggagacaagaatctttccaaaagaaaaaaaaaattctcaaatcagtgactgaagccataatataactatatttatgaatctcaagaaatattacaaagagtctcaattttcatgctcctactactttcatgtgagattcatcaatttagttacattatggcttccgtcgtagtttctttgtgaaattaaaggaattttaatggtcctcttcaacagttaaagcattttggaatgaagaacacagtttctggagctcttgttttaaggcatcgtaattttgataaattattagacgttccttgtgatgactcaggagttgcagtagggggaatgttaagacaagaggggcatgattgcaattatttttttttgaaataagacagatagcaattattaaatagagattatgtgaggtgcaacaaaggtattgtatgtatgataaaggagttctgttttgtagtataattttccaattggagttattacctccttcccagagaatttattttgtatcttgaccatttaattttgaaataattcaacctcgcaaaagcattgagcataaacatgctacgtgggttgccttttgataatgaaaatacttttgttcttaagaattgtttggatatttagttttttatgcacttgataggcaattattttcttaaataaagtcagtgctcaggtcattggctttgataggatcaaggataaatattctacttgtctctactatggtttcatctatcaagaagttaagtatgattgttgtagaagattgtggtatacttttcatatatgaaaggtatttgtttaaagccaataggttatgcatcccaaatatttctcttaggagttatcttatttagaaatgcatgtagataggctagcgttgaggttgtggatttaggacccagtcatggatttattgagaatcaaataagtagaattagggtttagggctcattcaaagagcccttcgttcattcaaagaaccttctttctttacatatatagggaagatcactgctactggttttccaatatcctgagatttgactgatcctcattacatcccaatttcccattttattttattcctaaataatccaatttcctattttgttctgttcctaaataaccaatctctgttacaatcaaatttcctattttattttatttctaaataacttgctcttttgtttcacttgattcctaaataatttttcaaacgaaaacctaagccaaaatagcggatagctttcacattgccctactctttgcttttggttcatgggtccctgctttgttcttatgttcttttatgacattgactgtaagattataatccttcttaaggtgcttgtcctcaagcaccaaaaatgagaaatggagtcagcctggagtaaagagccatccaaaagcaacagtacaaaatctggaggttgtccaggcgaatatgatggtttgtttcaggctcttgacgtgcagcaggttttgaatagtgacgaccagattgtgtggaagctggaaaataatggaactttttctatttcgtcctattataagcatttgtgttataaggatgctgctggcagcagcgattttccgaccaaactcatttggaggactaaaatccctccctgcatagcttttttcgcatgggaggcttgctgggaatgaatattaactatggacagacttagaagtttggttaggattactgtcagtggttgttattgctgtttaagggatgaggaaacatgcaatcatttattattgtggtgtcctactacatatgggctctttgggattgattgggttattgcgggctcggttaggggtgagatttgggcctgtgatggtttacttgtaaaaagaaacattgctaatatgattcctttgacggttttttgggtcatttggaaagagaggaatagtagagtttttgatagtgttgagaatagttttaatagaattaaagataggtggatacactattttgagtctattttgttaggtcatgacatcaatagtgagttgaattttgggagtgtcattgatactctgacattattgtaattgcttatgtatatggatgatactcctgttttattggtatcatgttaatagatacttaacactttttatttcaaaaaaaaaaaaaaaactgctgcagaatctggtattctagttcaagcttagtagacttgttctcatacctctttttaaacatgggttcatggattttcttctcctgcttctctcttgtttgccttagctgccttgcacattccttgacagccccatcaagatgtaacctgaccttcaatgttgatggtttaactgctgtctcaagtttttaactttcatgctgcaacttcattttcaggcttatctaaccagcaacaactatggaagcttctcaactaggtcattcttggtactaaattgactggagcagctgataacttctttgttagccagcttatattatcactaatagcttcaccattagctataacttttgatgtgaccacaggagattaattattattgttaagagatcctttaaaagcctccagctggtcattgtataacctagaagccactggatccatggtcccgtctagatatggaagattcagtcttcaaaaccatgggacagttcccctcccttgtgctatcttcggtgagaggccttttatcttggcaattgttcctgctggccagaatggtggtgctggtaccttccaagtacctgggatcaactatttgcagaggccgttaatatccattgttaacactctttctcttttccatccagacatgatcttcatggtagagtttgaggaaggcctcaaactattattgaaagtttttcgtgcgtttagtgactcctgctctagcaatatgttatggtcacaggtttcagattgagttatgggtattaatagttagagttagtgctcgttagagaggactttttgttctctcgaattaggtgctccaaaaccttttgtaataaattctttattcataattttattgatagctacatttattgagaagagcattgctaccagtttcataatttctaagatgtggttgatccctgttattgctcaatttcctattttattttgttcctaaacaaccaatctctattattccttattttattttatttctaaataattcaactttctattttacttaattgttccaaatggcaatatcacccaagaaagggtgaattatgtgttgtcatcttttcagatttagtattttaactgaacttctcaacgtactttgattatgatattatgtgatatatgcgtttgccttgatattaaacatttttggatgaatgcacagctataatgatataaggcagtaatgaatgaaaagctagagagagaagacacaaaatcaatatgtagtggacctggactaatcagagacggaatctaacgtgctcacaaattgtcaaaatcagagactgaattcgtacagtctcttattttgatgtcaaagtcggtgaatatatgtcaacgtactttattcttaagtaacttaaatttaacatttaattttattcctgaatgattcctataataaagccccaagccaaaatagcaactagctttaacttcaccatgctttcttggttttttttcatgggtcccttttttgtgcttttctagttttattctattgaccacaacagctagcaagtcatcttactagagagaaaaattttgatttggcccaagttatgctagattgtttatctagtggaagggattttgctaaatttgtctccccatgtcacaacatattaattagcaaaggtcaggaaagagtaatatatatatatatacattgaaatataaaaggaaagattattatattcgaagggatgtttgctaaagttgtttcccaatatctaacatgtcagttagcaaaggtaaggaaacaaaatattgatctttaagttgcttacacgtttttcatgaactttggaaaggtttgaggatggacattgggatgaagttacctaggacacctggaagtcaagattctgttttagtagttgtggatgtgttttagaatgtgactttttctaatcactgtagtaaaacataataacaattcatattactaagttattcattagtgtcaacagatacggatagcattaattagactgggtgttgtagaaataattgggtgttaattgttatatctaggattgaccatttgggtgatatttttgtaattctttacgtaacactacttttgtaaatttagctccgcacaggagactttatctaaggagatttttctggcactcatgagctttatggaggataaagacccaggttcaaatgttttctctatggtgttcgtttagaataatataacaaaggtgaaggaagactttttggctgcattgattgacttctcagaaggggatcctttgtgtctagcctcaatttcacattcttcatgctcattcctagaatcttagtcacttcaaacatcaagaatttcataccagttagttcggtgggttgcatctgcaggtttattgtagaagtgttggctagaggttgggtagcatggtggttaaacttcaacatgcttttgtggaggggacatatctaggatgctattttgattacccaatgaggttatggactttttgcaaggaaaaagagttgagggtttgataactagatgttgaaaagacttacaaccatgtttctgggggatttttgttctagatgcacagaggagacttggatttggtaacaaatggtgctctttggacgaagtcttgcaactcttcttcttcttttgcaactatagtcttggtggctcttctagttttgcaaggcgtcttaggttgaagacaagaggatcctctttcaccatttctttccatcttttgttatggaggctcttaacaggttgattgatagaatgaaggaccacaagttactccaggttttgtttgtgcgggagcaaaggagggagtggagataatggacttgttttttgtggatggaacctttttattttgcaaactaaattctgaaattttatctaatattagatgcatcattttatctcaaaaaaaaatattagatgcatcatctggtgcttgcaagttgtttatggtcttaaaattaacttaactaattctaaaatggtctcttttgtgaagagtgggatactgagtctttggctgggattctaggatgtaaattttctaatctccctttcgaaaatatttggggttacctattggagccaagttcaaagatacatctatacgggaactagcagtgaccagatgttagaagggactgatggggttgaaaaagagattacttttgaaatgggtcaggctcattggtatcaagggtaccatctccaagttgcctatctactacttatctttgttgcaatccttgcctattgattacttatctttattcccaatcctgttaatatggctaaaaagttggaggcaatccaatgctatttttagtgaggtaattttgaggactgcaagaggtttcacttggtagtgcataggtgaggcctgctttctgaaagggtgggtttggtattagatgaattgttgaattcgacaaacctcttttttgggaggtgattttgaagatttatgaatgatcaaggcagtccggagggtgatcaaaataaaattcaggatggagacgaggaggtggaggtccaggcaaatctagaagaggttaagggtttggttggacaattggagcaaagaaggggctttccaacaacaatttcctagtgtatttgcctttgccagatataaggatgcccaccttgactgagatttctcttttgcctcttgatctaggctgtggacggttgatcttgttagaaaccttaatgactgagaggtgtatgaatacgtcagacttttctagcatctttcccaatgtactggtccttacaaggatattaataagtcaaactggaagttttgtcatgatgtatctttttctgtgaaatttttctatttgcaggtagccaacattttactgggcatgggaattttccctcaaagcaaatttggaaaattaattatcctgccagaattgctttatttgcttgggaagcaacaagcaggatccttgtgaataggtgttatgcatgaaagacgacagctataacactaggtcacctcttgtgttagtgtcatctctctttttgccttttgaagtggggaggcatgatctgggacccttgttgtatcggaagatgtattattataggataagaatttgttaataggattttaattcttacggagatagaagcattatactgtttcattgtcctgatcaaattatgatttatacataccctttgattataggatgaatcttctgtattagtcagactggttaaataaaatatactaaacttatctcatttatctagtgcatcggaagctttattattatggttgttttattgatccatgtgataatggattgccaaggcattactacataatatgcttgtaatgttggattaccatgtctgtattttatgttcgatacatctgtcctcatcctttccgtacttttttcagtaaataggatgatttttttggaagacaaatataatggatataagatctcttttattgaagaccatacccgaaaatggaaataggtaatggaaagatcttctatgaccaccgaacatagatacatttttcctgtgtggtgtttataaaaacttgattatattgtattttctctggatttttaactgcatttttctacttatctaattgaaggtaactcctaatattatggactgctcatgtcttattctggggcaaaattgtttgattgattgatttatttatttatttattattattattattagtattatttttgcttcaatgctcatttttaaacgactcagaatctaggacatttgaacctccaacctccaatttgcggagatggaaaggcattagttggcccatagttgactaaaaatcttgtagttgctgtatgcttttgatacaggaggctagaggacttg

SEQ ID NO: 8546 - DNA, 2922 bp, Carica papaya
  Intron number 1 from transcript evm.model.supercontig_49.1 22 (locus evm.TU.supercontig_49.122) derived from phytozom e v7.0 (chr-ID supercontig_49; pos 863247 to 866168 revers e strand)
cttcaggtatctatttgcctgtattttgtagttagcatttaatactggaagttgaacagcttttactttgtttagattgatggcttgatttaattggttgatagttatgacctagacttttagtttacgttaccaatagtttaccttactattgatagcgtttcattttctgtttggcggtactaatattttatgctgaggtaattccagagatgaccaccctgccagtaactgtagtttttctttccctttttctattggttatacactcatctttgttttgctctttggcctactacttcttcacaaatttaaggtgtatgtacccacacacagctgtaactcctggttcttttctcagtcaatatttggacaacgaaatctttctgcaagtcagtatgaatgaattgctctaattcaagttcaattaaattgggatcatttttagtgtattgatactgggtagtatataagttaactaattcagtttaaatggtccataactgattctaggttggttgaatttgtttgagcaaatagaatattatagtagcactatcagatgtatgcatatttcctatgttgctgcaatcaagattgtgtatcttctggacctggaagaatagttgatttctaatggagaaatgtactggaaatggtggataagatttgccaaagaacgatctttgctcttagttgccttgatctagattactggacttgaaattgaaataacatagactggttgaccacaaatggcgactagagccgacttcattggctataaggatttgtcttgtcatttcacatgattagaggtgactagctttccccttgtgaacccagagcatgtttagttcttatgcaatattgcagattgagaagatttcagccaatttaactgcagtctgcagaaatatggtttgtgtggttggtgttagtggctttcttaatttttggctgttaggcgagggtccattgagttctggcggtgaacttgttagaatggcatatcttggtttgggctttctgtaaacttttagaattttcagcataaaaagcaaggacgaactaatggttgatatattttttgatgtttggtacagtgggtcaagcttacctctattcagtctaatttcagtaatgttcctgtttgtaagctttctaacaaaggaagttttctatcatatcctattacaaattatttgctggtttctaactaatctatgactattttctaggaaacaaatttgaaagacgaaagtgtggagcttatctctattcagtcttactttcatctttcaaatttgtttcctaggaaaatagtcatagattcgtcaggaaccagcaaataatttataatatgatatgatagaaatcttaccttcgttagaaagcttccaaacaggacattaccgaaattagagtgaacagaggtaagctccacccattgtaccaatcgtcatagaaagcagtaagtctgtttttgctcattatacagaaaattaatgaaaatctcccatttcctctttcacaacattctgtaaattttcttctatttcttctttaacttattttctcctccattctcatcttcagttcctgttcttcagtagctaggatccaatgaacaaaggtcgtagcatattttctttctagacattttgaaaagcttgtatcgaccttttagtttattctctctctctctcttcattttctcttgtgttatagacattttagttatactaaaatgcaaattttgattatgatgagagaagtacatgtatctaacttcataccattgtaacttgtgtgtgtttatatgtatctatatcattgttgttaatgggagaaaatatagggattagcagataatggctgcgtgtttgcatcaaatttgctctagaaaaagtattggatgtaatatgagcagattaattattgagtcagggagtggattgcagttgtattgctcaaatgatattaatagcagatcccatgtttcatttttcaagtattttgagctttagtcagaaatttttatttttgtctgccaaaaatgataagaatttcctcaggtcctttcttttggtcatgttatttgtcacgtgatttattatgtatccggtgctttctttttatactttttgttttccttttatttcagctgtatgtcttatctgctgtcttttttataatattccctcccctaccgtaatatagtttctttttctattaaaaaaacaattgtctgaggtccacttcttgacctaaaattttagttggtaaggcatgtattttcttatgccttcaaaaaactttttgtttagtctttgcatcatttgctttacttgtatcatcttgggagggaatttgggtgatgtcatgaaaatgaccatgtgcaagagcattacgacaaccaaatgttggcttctacttttaattccttgttatcatgtttcctcttgaaagtttgtgatttataaacataatgccattacttgatttttttttgcaagattctcagagcaaactgctcatagattaacatgttaacttgtaggatttttatatgtggtttttgtgcctataatttccaataaattcaattgattcatgattaccaattttgttatgaagttgaataataaaggtttatatgcatgataataatacaaggaatctttgatgattttctcaagtttcttttgtttgcatcgattttacttgccatgttggaaaatgtgacttatttttgaaaaaaggtggaggggcctggttttctgctgggcatgaatagcatagggagttatcagtttcatgcacttattgaaataaattggatccattactttcagtgccttctacttttttctttaattaaaatttgtctcttgatctttatatcttagattacttggg

SEQ ID NO: 8547 - DNA, 1722 bp, Carica papaya
  Intron number 1 from transcript evm.model.supercontig_95.9 (locus evm.TU.supercontig_95.9) derived from phytozome v7 .0 (chr-ID supercontig_95; pos 164794 to 166515)
ttcttgacggcccggcctcctctcctgatcgtgttgtatgtctcttctcttttccgcgttctgtatttgtatatttaatgttttcatgtttattttcttcctgttcgctatatattctagggttttcttgcttcaattatatgcatagctcgatactcccttaaattgtttccatttcacgagttccactgtgctttgttaacaaactagacaaaacgaagcttgaatgctgggttgaagttttagcattacgtgtctagtagtgatcatactccagcaaaaataaactgagaagaagtttgtcttgcaccgagaatagtttgttgcagtagttggtatttatcatttcgccaactgtttgccttagttttggtttaacaaaaggaaaatttatcttctgattgacctcatgtagattaggattccgtttaattagtggaaattaagggcattctttcttcagagaactttaggattttacactttcttggtttctttgggttggcacaagttcctgtctccagaaagtaactaaaataaaaaacactagtgcaacaataaggttactggaaattaaagtcaatcctttttcaggaatggcttagagattgttgttgtatgggatctgtattcttttattcattgtgaataaatgactttttctccaaaaaaaagacatgagtaaacgaccagtattatgctaaattgaggaatcaacaatgaataaatcctcaagtctcgtgtaaaactgagaaataactaataagtgggttatcaagtgtcacttctttcttcaagtgttctgttgtgtcatcttaactcaccttaactgagaaaatgctgtgggaaaccaaccatcgggtcatgttttagcctgacttattggttatatgttatgaacatacattaacaaaagagaaaaatgaggcacgtgttagtttaagtgtgaagtaggcaagaagaactgcacaaaagaacagagagcacaaagaatagaccaagtaaatgcaataaataagacaaaaaaagaaacttgtcagggaaatcacgaacagagttgtaacttgcaataatttaagtaaccgttaaaactcttgcaaggtatgcaaacaactcaacttatgaacacttagacctgcctttgtacaattagatacaaaatcatctatttttgaaacaagaattaaagtagtagatcttttagccccttatcgtcgtggaggaaagattggactttttggaggagctggagtgggtaaaacagtgctcattatggaattaatcaataacattcccaaagctcatgggggtgtatccgtatttggcggagtagacgaacgtactcataaaggaaatgatctttacatgaaaatgaaagaatctgaagtcattaatgaataaaatcttaccaaatcaaaagtggctctagtctatggtcagatgaaggaactgccggaagctcgtatccagggatagatgactaaaacagtttcagacttctgcctttcaaaaaaaaaaaaaaagagaacattttcttttctatagttaattatgcaactgtcccccaagctccaggggcatgattaatttttattttgattcttggtagctgatttctttctctaagatattagcacagacaaacatgtattcggccatttttactctgtttctttttaaaaaattctattcaggtgctaatttccggaaaggaagagccag

SEQ ID NO: 8548 - DNA, 1222 bp, Carica papaya
  Intron number 5 from transcript evm.model.supercontig_535. 2 (locus evm.TU.supercontig_535.2) derived from phytozome v7.0 (chr-ID supercontig_535; pos 6502 to 7723 reverse str and)
cttctatctcagcttgttggtcaacaatcaacccagtaagctgagcctgatatgattgctcttggctttttttatattcattactctaaattaactgttatgcaaagttttatgttagattatgttaattttctggatattatccctggatagatgcactatattctaactctgaataacatggttatcctggaaataatattgacgataaacttctaactttgacaacaaaacagaaatgcaatttatgtaaacctttccttagtggaatgagtcggctaattgtcaattaaaatcagtatttgctaagttaacaaatgcgaatatctttcctttgtaaattcattatattcttcttcatacagattccttatttgcatcaaaccactttatatgatattctttggcatttaacagccgtttcttaccataaatttagatacctggtgtttattaattttggagtgcacagatttacttgcaaacaacagaatcttgacaacagtgcagtctaagtaagagtccctgggtccatttcaagtccaactttgtttcagaggtttagtaatttaggttttctttgtagataattaattatgtttctttcaaatttggtgcttattgtaataatacaagtaggtttagcattttacttatgatttaaattctttttagatgaggaattgaattaaagccgctaaatacactcgtaagagattttaattatagagagaattttatgttagcttatgctttgtttatcggatgatggaatcatgacttcgtgatactttagagacaccttgtgatacctagcttatacttcttaggtgttatgtccaagaaaccctatttatcatgtttaggttaattacttttttccaaaccatgcagattcttcctaatctgttctatgtaaaattgcagcatttgatagaagaaatggaattggtgatgaaatagatttctatctctatatccattattcctttaggatgcaatttactttgactttagattattattcaaaagtttcagctcaagggttaaagtatttaaagtggctactcactaggtctagttggcgagctagggcagtatggttttatctttttatggttgcgagttactgatgcagaaaaagatatttagtgacagtttttcctaaatttggtgctcctttgcagggaatctggccgggctggtggaagcacaggtatac

SEQ ID NO: 8549 - DNA, 1718 bp, Carica papaya
  Intron number 7 from transcript evm.model.supercontig_1758 .1 (locus evm.TU.supercontig_1758.1) derived from phytozom e v7.0 (chr-ID supercontig_1758; pos 116 to 1833 reverse s trand)
ggttggtatcttgaacatgatttatttattattactttataactttttgttttggtagttattatgcttgttgaactgtggcatgcatgtttatatagatatatacatatatgtgtgcattgagaaggaagaacatataatctcattcacaagggagtgccacttggatgtaaaagagagaatatactagtgttagacaagatatttaagttttgcttgatctcccacattaatgagagggggggctctttaagcaaaacactttaattgggtttaatttaggttcgaattccatgggataggaatagaatagattacaagtaagattttacagaaaacacttaaattgggtttagttcatattctaattctataatataggaatattattatattacaaataagataaaatcttaaatgaatataatgttctaattttaagtcaattccatgtccaattcaaatgagatggttttgtgtttcattctttaacatgtaggaatgcaaatttatggttgaggaattgaagttatgagcttatctaatttaattatgcatcagatgtgtaaattgtaactaatttgtatatatttgatagctaagatctatgaatcgaatgagaatagaataggtttgaagtagatgtattagacttaacattttctttttgaaataaaagtagacgcaacattttatctaaatgaagaatctttagttctatgggaagaaaataaacaggttgtttggagctgcttataaagaactagatgtttgttgcaatttaaagcacttagatgttaatttaaaaaatattacatttggatagagattctcattgtaagaaataagtattcgttgtcttttggttagaaaagaaatagatgaaactacataggtggtgaatatgttaattaagtaaacctttaaatcaatatgcaaagagttagagaaagatgtctattttttcttttttctaaagatgcttataagcatctaaaaacagcttgctgattgcattagcaaacgggtaaagtgtagataggtgcttataagttacttttggtatttcttgggatttgccagacacatttgagggcctcctttcatcttcttttggtttcgaatttgatgatagaggttaaagccttttggtccagtgcgttctttgcttagttatgggtgatttggcttggaaaaaatgcaagagtatccaggattgcccttcaccatttatgattcttttagaagacttgtgtttcttggcctccctttggtctaaggcacatggtcactttaaatattttctttgttgctttacataaagattggtagcttttctatctgaagaattagttgaccttcttattttttcttctctttgttttactttctttttttaggataacttatcctctgttttatgtacctttcttctttcttccttaataagatttgtttttaaataaaaagaatcttaagcaatggtggagaccctcgaaatgcttgcaaaattcttttcttccttcttgccacaacccacaatagctaatgaaacacaatcatataagctattacaaaagcttggaatctcacttcagacattaaattttcataagattttattgatgtataatttgatatatgactgtcaccagatttggttgttggtttatttgctgaatgcagccttgtgagtgttgtggttaaagtgattggcg

SEQ ID NO: 8550 - DNA, 4770 bp, Carica papaya
  Intron number 7 from transcript evm.model.supercontig_140. 22 (locus evm.TU.supercontig_140.22) derived from phytozom e v7.0 (chr-ID supercontig_140; pos 375237 to 380006)
gagctgaaaattcaagctctcttgcagctgctgtggtatagtataaactattttctttaaaattagaaattaataaaatggccttttctctgaaagcttaaggttgaataatgtttgatcttgaacattgttagcgtttggcatttttactatccagctagagttgcaagtttatgtccaagtttaaatgttttatctttatggttttagtcatatgttacttgaattagtggataagcttgtttaggaaatgtaaaatgtagactctaattgattaagttagtagagcatgtttcttttatggaaaacctgctaccatagagtaagattaagaccttttgtatgtacttttaaggctggttagtgaaaaattcagattttttttttccccaaaaatttttcttccctccaaaattcttcttctcttcttctttgcccaaataatgctagagtcttatagctcttacaaacgagaccatgaaagaagaaaaattagctgcaaaaactaaaaaactacctcacagaactgaaatggcctctggtagttcaatctatttcttaccttctatcttcagtgacgaaaattaccagttgtgggctgttagaatggatggcaaatcaaaaggaatatatcattgacaagctgtggatgttggtgaagaacctcttctcctgagagcaaactgatggttgctcaaatgaagcatcatgcaaaagagacaacaaagaaattcaaggctctctcttttacactcagttctgcctgagatatctttctaggattatgtcttgttaaactgaaaaagcagcttgatatagaattaaggagaaattccaagcaaatacaggtacttaacctaagaagaaaatttgaggttcttagaatgggagattcaggaaatacaaaagtcttcacatatacagtcacaaaggttgtgcatcaagtaagaatattgggcaaagagctcactgacaagagggtggtgtagaaggtctttgtgagtcttcaaggaaaggtttaaagcaaatttatcttctcttgaagattctaaggattttcaacaataacaccaactgaacttgtgatactctccaagctactgagctgaggaaatccttaagaatgaatcatgtaacaaaaagtgcttttgtgatgaagaacaaatgaaaacctcaaggaaacaatggtagaaaaggaagttgcaacaagaaaaagcaagaacgcaacaggaatagagaaggtaacaagaaaggcagctacctatcatgttctaattgcagaaggaccagccatcgtgagaaatattgtataagcctggaatctagttcatagcatttaaaaggttcgagcatgtgaagaaagtttgcaagaacaaaggagaacaaggtgaattaaagccaaaagttgtgaaaggtcagaataagaagtggggagtatttggaggttcaagaaaagggaaatactacaataatgacatattcaagtacaaaacaaatctctaatgtgttgtttttggtagattagacaaaaacaatttacttagtgtaagacaaatgcttaagaaaaaatatttgttttcttttaaggacaaatcatgcatcattaatttcgtcaatggttgtgagatcatgtctgtcaagaaaaagaacaggagcttaactttattgtggtacaagtcacttacgcatggaaaataattctctgctttgacataggagatttgatagtacaaccagtagatccttaaagtcctagttagaagagagtgtagtagaaatggagtttgtgaagtgtgtgaatttggaaagcaaaagaaattaatttttccaaaaaagggcagcctagagagctacagaaaactgcagttaccatacactgatttatgtggatcaattagcacttgttcttgagcggaagtaagtattttccaatatttattaatgcttactcaagtatatgttaggtgtattttttgaaatagaaatctaaagctttggggtgtcaagtcttcaacatatagtagaaaatcaaagtggaatgaagataagaaacattagatcaaataatggtaaagagtacatcaataagaacttcaacaagttcttgaatgaaactaagattcatcacctacttaatgttgcttacacacatcaacaaaatgaggtgagtgagaaaatatagaattagtatgaagatgaccagatgtttgttgcttgagaagaaattagcaaagaatttttggtagaaattgtacacacaacaattcacattcaaaataggctaccagaaaggccttgaaatggtaaaatacagaataaagctttgcaaggaaggaagccagcaacagagcagttgaggcttttggaattatttgttgtattcttgtttcaaaagttaaaagagacaagttggataaaaaaaccccaatttggggcattaacaacattgttaaagggtataaagtcttcaacaatcaaacaaaaaagttgattatggtaaaaaacgtcaaagtcgaggaaaatgcttactggaattgggaaagagcaaaacttaaagcttcaacaaagtagtttgcactgctagatgttattaaaagtcaagaagtttttgccaagatgttattaaagatcaagaagtgtctgctgaggaggagaatcaagtgtgaacactaaaacatattctgattgtgctgtaaaaggtataaaaactcttcaagtcatttatgataggtgcaattttgccctattggaaccaaccaattttgacgaagcattgtaatcattagcatggacagacgctatggaggaagaagtaaagatgatcaagaagaaaaagacttgggttctatccacaaaacttgtcaacaagaagttttagggctcaagtggatggataagaccaagttgaatgttgatggcttacttaacatattgaatgctagattggctgttaaaggatgcaccaaacattgatttgattgacacctttgccctagtagtaagatatggcacaatgagattaatcatcaacttagaaatcaaaagaactgaattggaagatctatcaacttggtgttaagtcagccttcttaagtgactacttgaaggagtagatttatgttgaatagccattgggttctgaaggagaagagaatggcttatttgctatagaaagctttagctaaattaaaacaaactcaaagagtctgatatgcaaaaattgatgaccacttgctgcaatagaagatcaagcaactaccttgcacgtgcaacaagtaggggatgttgagttgatcatttgctctacttgcctgcaacaagacaagatgttatgtttgccacaagactactgatgcagaataagaagctcgtaaagtagacatatttcaataatagaaatatgagacagaatcaataaaagaatataaaccttttgggaagttaactaaaaaggttagaaagttttgatttccttttctaagttttggaaagttctacaataaaggaaataggatgatttgttttcctatttcttatattttctattttctagattttttattcctctagttatttctatttaatttatttttccattttagtaggttttttaaattttctatttttgatgtatttagtgcccacaattaaggtacctagtttagttattaggtagactatttatgattattattcaaacattgaaatattgtttgattatcgaaattcaagatctccaaatttggttcttaatagattttctctaagttttctcttcaaactctttttatcctacatcaactactttccatattcatgcaaagttcaaccgaattgcatttagaaatttggaaagagattgttgaggtatcaacataaaattgtaaattatggcatttggtatagaagggtttctggtgtgaagttaattggatttacaaacagtgattgagctagttcagttgataacatgaagagtagttcaggttatgttttttgtcttggaactacagtgataagttgaaagggtatgccttccatcaagcaaacaagaaaggttgctcaatcaactgcagagatagattatattacagccacaactggtgtcaatcgagctgtttggatgaggatgtttcttgctgacttgaatcagaagcaaaaggaagctacaatgatcttttgtgattattaatctgcaaatgccgtagcaagaacctaatgtttcatgacaaaacaaaacacatcaagatcaactaccattttgtgaaggacactgaaaaagaggagaaggtcaacttgctgccctgtaggtccaatgaacaaatgactaaaattttcatgaagggactatcaagatttaagtttgcaacattaagattcatgcttggtgctttcagtaaaaatgtcaaggagctttagtgtttcatttttgctgttcagctaaaattataagttgtgtccaaatttaagtgtgtttttttaatcagttctgtattacatgtattagtggataagcttgtttacaaaatattaatttagaatttagattgcttaagttagcaaaatatatttctttatgcagaaaaatctgctgttgtagacagtaagactaaaaccttttctaatgtatttttaaggccagttaatgaagaatttagatgattttccactccaattttttttttctcttctttgtctaatgccaacaaacatgaacattggtccaattttacagaattttgttgatctagctggaagcgagcgtgcttc

SEQ ID NO: 8551 - DNA, 2754 bp, Carica papaya
  Intron number 1 from transcript evm.model.supercontig_182. 10 (locus evm.TU.supercontig_182.10) derived from phytozom e v7.0 (chr-ID supercontig_182; pos 119977 to 122730)
aacttgagaagaagaagcaaaggatccaggtgattttcttttgcgtttccgttcgtcttcaatttcttttatcaatttttgtgtttattacttaatacgggacaatctgcggattttctcctgggatattttgttaatatgttttttttttttttctttttgtgagggtgagggcgtttgtttgccaggaaaatcgagtaaaagaatttcgacttcattttggacttctctttctaacggattaccattttctttaattactttcttgatggccacgattggcggacttctctagtattcccaccttttcgcccgaaacgaacagaaaccagccatcgttattgctactttctgattttatgttttcaatataggtttacttgaaattagctcaaacttaataacttgtttctaattacttttgttttttttttctgtgagattgtgataaaatattaatatttttcaattaaggaaaaatctcagttgcctgagaagcttcttttaaatttttaaacaagctaaaatttgtaatttttgatttttatcaaatgttcttttccgatgaaaaaagtttcctttttgacttttcgtcacatacaatgacagacgaggaaacttccttgaagtttcgtagttatagtttagtggggtttttcttatttacttactttttgagagaagaattaagctccttgtctcatcttaattgctcggaaaagcgaatttaagatacgatcaatagtgcttggttaaacctgagttgtttataaacatacatgattaatttagtaaattaaaaagtgaattatataagtctaagttattaattaagaaagggaattattaaattgatatttactggtttatccatctattcccaaatcttatccacaaattacagagcgaacgtccaacttcctgtctttattcaccccaaacaaaattggaacctcatcccataatctttttccttccccttgtctttttgcttgcccttattgtccgtatatttcccacttgcatttttgaggttctttagcgagaaaggtgtaagctttttttttttttttcttgttggttgaaattttgaaaaatattattgctaaaagaatccttccaagtgttttgaacaccaataagaaagctctaaaggaacctcttcaatccagacttgtggggtgtattgtctaccaatttttgttctgccagtcaatgttcaagaacattacaaattctgggtacaaaattaaaatttattctcctaaattctacccttaagatgcttaatatcctcaataataattccctacttcgagagatccacatttgaaccattgattgagtcccctgctatttttgcataattgctaaaactttcccactattgctgcaaaacaaacatttctaagctttgaaaaatttagagcactgttagagaacttataagcttttgtttaccaaacaataagtcaagtcaaacgctagtaaatgtaaagctttttgcaaaattacaaagtgttaaaactttaaaaattatcacttttattattatatctattttttcttaaaaaataattactgaaaactgaaagttttagctatattaaacttttacaggattttcagcactatttctgagagcatctttatttatagtaaatagctaaaaaattggagggatattttttttaataattgcttaattaaggttataactatggaattttatcaaaagagttaaaggaggtaggaaacctggcctttgaggcgattttgagattttcagcatatttgtcaatttttatccttagttctcaaatgaatttgggaactgaatactgactgatgttatcaaggtctcaatgacatggaatctcaacaatctcatattatatttctccatagttaatatgaataaattcaggaaaaaaatgtgtatatgaatctaattgtaaaacaagtgaactgccactggtcaaaggaaggcataggatgatcaagacaagatacaatccagtaaggatatcaaattggtgtctttccctgaaacatacttgctaactccgaaattggatgtgaatgttgtatttatccaatgataaaaccgatcattgaacattatattaacatatttgtatgaaacagtcaaccatgcagatgatacctaatgggagatggatagtctccctttcatgagttaagaggaaggatgacaatctgaatttctgtttcatctgcctttagatagaactattctagaggagcatacagaatgcaaaatatctttcagcatttcatcgcttatcttttttataagaaaaaaactagtttcagaatgaaaaacacttgtttcatcttcccatgatcaacatgtttgagttgggcatcttcatttacggattattcaaggtgatcaattaagactgatgtctggcaaatgctagattttgcgctttgtattcatgaaaatcaagaaactctttaaaggtttaagttatctcaggcactggcttgtgttttttaccaccaagaatgcaaaatggcctcttgaagactctacttctagtcacaatcttaaatgtattgagcacacctgcattgattcctccaaagatatacttcaggacatgataatgaaattttttgcagctctggtttaggaaatagctagcaactgttattttcacatcaagtctttcacctcatcaattctcatttttatcaaccaggaaacgataagagttgctcttt

SEQ ID NO: 8552 - DNA, 7113 bp, Carica papaya
  Intron number 6 from transcript evm.model.supercontig_59.5 2 (locus evm.TU.supercontig_59.52) derived from phytozome v7.0 (chr-ID supercontig_59; pos 542393 to 549505)
gagtcgcccggatagaattacggaaacttaaagtgatgttctttcttttattttatttcctattatgtatgtgttggtttctcattagttactttattgatgcaggataaactaccttgtcatatggatagtttgcaaacagaaaaataaagatagactgaacaaaataggttagacagaataataattagaaaaataaacacaaagacagataatatggaataaaattctaataaagaaatttttaattcattattacctattctctttattggtaactgctagctttcatataagcattagttacaactaatatggaaaattatagtagagaagatgtaaaagattctaattcctataacatttaatctacttgaatagaaaagtaaaatatcacaatgcttgaataaacctaaataatctaaataacttagaaatacaaaataataataattgttacacagaaataatcttcttcacggtgatagctatgtaaaagtcattatcttgtccataactacccctaaaatgcattaacaacttgtacttagatttgtaatattaaaatcggacccaactggccattttcaccattccgactgtgaaccaaatacctaaatgttttgattagataaatatattagataaacataaaacaagttagaactagttaaaactgatagaaatcagtaacaactatcatattcaattaaaatcaagcagttcaattgatgatattgggattattttgcaatggagtgattttcactttattgtgggtgatttggtcagagctgaaagctagaatctctcaggactattaatcacctttttcatttcttttggataaagagtgtgttttagtctctgttagactaaggctaacagttattttcaggatgtttctttatttgtttaagtggagattagctagctagcctttcacttgaatagctagcttatttttttcgtggatacctaatgctccttttcttattctttctttctatcaatatatcttttttttctataaaaaatattgtactttaaataatataaatttaattatattcttttatatgtgtctttttagaaccagcagttcaactaatgaactacctattggtcagacgaataaattagtgaacttatgttttagctagtttcatgactgatttggttttaataactatgctcaaactgttatcttatgagaaataaaagaaaattttattaacaactcaaaaagtggagaaattctgatttcttattatctccgataaataatttacatcctaatatatatactaaagtggccaccgaaaaaggagaaaaaattcctgcaaatcaggaattccaacaaaataggaaaactagaaactacaaaatctaattaaagaaaaactaaaactagaagaaagagatcaaaaactattctaagaaagtaaataacatcctaactaattgcacaagtgtcggctactttctatactcgccctcaagctaggttgtagatgttatacaaaccaagcttggagttcaattcatcaaagctgacccttcgtaatgctttggtgagaatgtctgcaatctgaagtcttgttgacacatagcttagctgcacaatctcattgttaaccttttctgaaatgaagtgtcgatcaatgtcgatgtgttttgttctgtcatgatgcacatgatttttggttatgctaacaactgctttactgttactaaacatcttgacggtgtccattgtctcaactttaagttcccttaatagcctttgaagccacattccttcacatattcttagtgcgagaacacgatattctgattctgcactactccgagagacaatagcttgttttttgcttctccaaatgacgagatttccctagacgtatgaaccagtggctgacctctatcagttaattctcctgcccagctagcatctgtgtacatctcaaactcacgtttttcggatcttttgaagagcaaaccatgtccaggagtcatcttcaaatatcttaaaatcctattcactgctttcaaatggtcctcattcagattattcatgtgctggctcaccacacagattgagtaggcaatgtcaagtcttatgtgtgatagatagattagtttacccacaagttttttatatcttcccttatcaactggatttctttttccatttctgtttggctctttgttgggatccatgggtgtattagtaggtttgcacccacgaaagtcagtttcgcttaacaagtccaagatgtactttctttgggatattacaattccctccttagaccgagccacctccattctcagaaagtatcttagagtcccgagatccttgatatcaacttctattgcaagcatctttttgagtctaataatttcttttgaatcatcacctgttataatgatatcgtttacatatactataagaataactatcttagttagatttaacaaacagtgtatgatcagcttgacactgatggtattcatttgtaatcacagttctggcaaacctgtcaaaccaagcacgagaagattgtttcaggccatataaggatttcttcaacttacaaaccaacctgtagtttgaactatttccaagcccggaggtatagtcatgtagacttcttcttcaaagtccccatttaagaaggcatttttaacatcaagttggtatagaggccaatcttgattcactgcaagagagaatagaactcgaacagtattgagcttggcaacgggtgcaaaagttttcttgtagtctatcccatatgactgcgtgaagccctttgctacaagtctggttttgaatcttttgatacttcatttgctttgtacttgaccgtgaatatccacttgcagtctacaggatttttcccatgagtcaattctgtaagagtccatatgccattactttctagagcccgaatttcttcaactgcttgtttccatgctggaacctttagagcctcgtgaataaagttaggaacctgcacactatcaaggttggacacaaaggccctgtaaggtggtagcagcttcctataaactacatatcttttgattggatgactagtgcaccctcggacacctttcctgtggacaattggctgattagagtcatcaaccaatggctcaagagtgtcgtgacacaaaagatccataccattgtgattatcggatgcaggacttggttccggttcttggcagtcacagatagtctgcataatgtcctctatatgctcagttggtcttctccttctggtttagacacaaagttcatgattattagtgtcaagttgaggtggagcagagacagttttagtgcctgagtttgattcttcaagtggagccggttgagtggaagtgtttggggtatttggagttgttgagggaaaaatggcctgagtgtcttggaaaagatctcaaatatgatattccctcaagttctccccctgaatatcggatttgtgaaagtaagattggttctcaaaaaaggtgacatccatggagttgtatgctttcctagtgattgggagtaacacttgtatcctttttggttagaggcataaccaaggaagatgcacttgagagacttgggatcaagtttggtgcagtgttgttggtggatgtgaataaagaaagaacaaccaaaaacctttagtggtacgttggaagaaaaagagtggataagtggataggctttcatgagagtatgacgagtagtttggaattttagtactcaactaggcatcctattgatgagatatgtgactgtgagtatggtttcccctcaaaagtgtttaggcacatgattagagaacatactggcacgggctacctcaagtaaatgtctattcttcctcttagtgacgccattttgttgaggagtatcaacaaaagagcttatatgaatgatacaatgattggaaagataaggaccaagaatggaattaaaacactccttggcattatctattttaagtacttgaataatgctttgaaattgagtagagatcatggagaaaggattgaaatatggtggctgtttcggatttttctttcgtaaggaatgtccaagttgttctcatataatcatctatgaaagacaaaaaccatcgaaccccatttatattttttactcgtgagggtccccaaatatcactgtgaattgcaaaaactggatgtaaaggtttgtattgtaaactagaatatatatgtctagtatgttttgcaagctgacaaatttcacatttgtaaaaattagattttttattgataaacaaatgtggaaacaacttttcaatatacgcaaaatttggatgagcaagatgacaatgccataaaataacttgactctcagaatttgaaagagacacagaattggaaacaagattgacagagttggaactagattgagaagcacaaattgataggtgaacttatctatcaaggagattattttctttgagcaaatatagaccaccatgcatctcaacactgacaatcacctttcccgaatccactgcctgaaattcacaaatattagaatagaatttagtcacacattttgagtcacgggtaagtttgctgattgagagtaggttgcaatctaatttaggaacataaaggacagagttaagatgaaaatcctttgttaattggactgatccggttcctgccactggagagaatgaaccatcagctattcggactgcagcgtgaatagtccatggactatagtttctgaaaatgttgatgtctccagtcatatgatccgaggctttcgagtcaactatccaaggttttggtgtcctattttgtacaatatgagtataggatagagtaccttggtgtgctagaagactggtaggttgttcagcagaggattgtggtgcttgtccagaactgggaacgtgaccaaacattttctgcagtgcctcaatttgctccttagtgaatggactgaattctgcatttttgtctgttgtggcagcagcatttgacagttctctctctcatatcttccactgaatggcttccaatctgcaggttttccatatattttccagaatgtctccttcagatgaccaaatttcttacaacggtcacaccatggtcgtcttttccttggcttattattctgagaggaactgtgagtgtacaaggctgacccttcaacagtgggtgtattgtggttgtctgtcatcatcagtttctttttgctctcctctctacgaacttctgcaaaagcctcccgaatagttggaagaggtttaatccccacgattctccccctgacttcgtctaggtctttattgaggtcaagaataaatctgatggtccttttctgttcaacaattttcctatacaaggcagaatcatcagggcatttccaagaataaatctcgtacatgttcaattgcagccaactgcgtgtgagagtgttgaaatattgaataatactcaattctccgtgtcatatctcaatctcaaataactctgaggaattctcagtgctagaatatgtttcacaagcagcctcccatatctccttggctgtcctacagagcaaaaagttttctccaacctctgtggtcatggaatttattagccaagacataaccaagtgatcatcagttttctaagtccagtatttaggatctgttgtttccggagcagagatttcgcctgtgagatgtccatcatttcctctgccacagatgtacatgaaaacagattgtgaccactgaagaaaattgtggccatcaagtttgagatttttgacaatatgagaggaagaatcgggaacaataggggctgtagaattaggctcggatctagaagtgacaggccatgccgtattttgttatgaggaaagtgcggtagagagaaaaaattttggaatggattagggtttaggaacctggctctgataccatgaagaaattctaatttcttattatccccaaaaaataatttacatcttaatatatatactagaggggctggcatagcagtccaccgaaaaaggagaaaggatccctacaaattaggaattccaacaaaataggaaaactagaaaactacaaaatctaattaaggaaaaactaaaactagaagaaagagatcaaaagctattctaagaaagtaaagaacattataactaattgcacaagtgtcagctactttctacaaaaaggaatacaaagtagatgggaaggataaaatatcctcgtgaaaaaaaaagggaagaaacattgaatcctagctcaaagagaagtaagaaacacctatcttttccttagaaattgaattggttaagattgttgcttgaagattgtcaatcaggccataactttatgaagatagcccccaccagcagtacatattctcctcagggggacatacctgcaaaatgtcagatgtgaaaaatcctccaaactaacttgcagtgaagaatacacatgactattgtttcaaatgagaaattgggagatactcaaattcgggctactatgaggggaggtactaaatcatattattgaggcctccttcctttcttgagtgacaatgcacctcccatctatttggatgatgccttctagtgtccctcatgccaaaccatacaaaatctcttatagtctattagtaatgtcggttggggttttaagcgtagatggatgataatgaaggatgctggacaaacatgcgtaaaggagagtgacccaaccatctaaagaaaatgaagcacctttcaccagctctctagatgcatagaaattgttcaagatgttatctatttaacttctctattgaaattagttgctttttccttacctacctatcaagtacatgcacaactcaactaaacattttagcttattgggaaacatagctattgagaatgtgatatattttaacttcgagtttttatcactgaattgctaatctagcaagaggtttctatcagttagatatcttccttgttctttctttattatattgattcaaatggttgaattcttctattcttcctgatctgcaggcggctaaagaaacaggtgctctccaagctgccaa

SEQ ID NO: 8553 - DNA, 1431 bp, Carica papaya
  Intron number 5 from transcript evm.model.supercontig_42.1 59 (locus evm.TU.supercontig_42.159) derived from phytozom e v7.0 (chr-ID supercontig_42; pos 1530487 to 1531917)
agatcattaactgtttcttaactgcatcatattctgtgagtctgtttgaggttttattttgttgtacatttctgtaattttattgccttatttttccttctaaaattcataaattgtttatggttgctttgctggaggttgttatcaaactagatatattttttatttgatcctttaaacaaaaacattttagctttagcaacttggcttaagaagttagacgaggcaccattctagtaattcgaagggcatgcatttattcatgagtttatccttaagaactatcagagcatattctgcatcctagttcaggtattgatgaatcacgtaagttatggtacttcatttcattaagatgataaccatacttcattagataatcaatatcctctttgcgtcagaaatggcttaaggaaaatcaatgtgtgaaaactttggataaccttttcaaaaccgccgttccacggggaggacagacttaatatggtatgtctaactttcagatcatgatggaaaggtggatgcttgttctgtgacatggttgacaaagtttcattttcttttaatcattgtcttctgggagtaactattctttaaagcctcatattacttgttaaagacaaggttaggcagttaatgtgctatattcgaatgtttaagctaaatttcgttggcaagatattgcaaaatcaaaagagaaacacgagttcctcaaaaagaaataagaacaataacatgtgcaggattgagttcagatatgttaattttagtcttttgtctttcacctcatttagaggttgcttggacttcattcttagcgaggagtttgatatgcatattgggtatcatcttcagccaaaaatttaaactggtagaaagcaggcttttaattatatttttacatgctctctcatgtgcaaatagaattttataggaggctttccacataaaatcaataaatcaagccatttcctttaattcatatattgaagaaaaatagccaagaaagttgctctgagaaaaaatagaatcctcacaaacctatgtaggtgctcactaaatcctggtggggtttttcttctaaagaaagaaaacaaggtccttgtagatttgccatacagctcactcattaatgccaatctctatctgtttaaattcacagctgatgcctcgattttcaagagtttggtacacacgttagtaacaacttttggtagttcccaattcacatattcttttagttgtaacctgattccagaaacttttcttcttttgttctttttgagaaaaattcgtaaaattttgtatgttttactttgtgtcatcataaactttctaattattaatggtatgtcatttactttttgaaatagggctgacaaatttctaatttattttgttttatttgtgcagctgactctacgcagggtc

SEQ ID NO: 8554 - DNA, 568 bp, Carica papaya
  Intron number 1 from transcript evm.model.supercontig_171. 9 (locus evm.TU.supercontig_171.9) derived from phytozome v7.0 (chr-ID supercontig_171; pos 85206 to 85773)
ctggaaatatcgagcgagagcttcttgctaaacaggtcttggtctcagtaccttatgtactccttttcttattttttattaatatgttcgaaatataattttattttggtgttttgttttcttaattgatgtaaaattggtcgcgatgtgccgattatagaggaatttagttctttttttttggcttttttcatgcggttgattgactaaattttgttgaatttcatattatgaatttgatcgtttttgttcttctgttttctgaatttggtaggttttcttaatgaactaagatctgatacaaattatttgcaggattttgaattttgatggggagttttttttagaggtgtagtttattacttgagaaatatggtggtcttttgaagtacaatacaagtcctctatctgtttcttctcttgattttttttttcaaattttttgtttggggttcttctgatcttgctgattctttttaatttacacttttattttcagaagagaatccaaaatcttacagattcttttcttatgttggtatgcaggttgcattagatataagtgaag

SEQ ID NO: 8555 - DNA, 3108 bp, Carica papaya
  Intron number 1 from transcript evm.model.supercontig_116. 80 (locus evm.TU.supercontig_116.80) derived from phytozom e v7.0 (chr-ID supercontig_116; pos 853491 to 856598)
aagtagtttctgaacatctgactaggtactttttagtttgatgtgtccagttgacctgaatccttatgtcttttgaaattttcttctaattttaatgtacttggacgcctcaaaataggtttaatacatgcaaatcttctttcttcaattttatcgagttttcacgatcatttgttactcagaacaacatatacacatagcttctacattaaggcataaggctcaggcaaagctagaagcaatatttccaatttacacatggagcatgcatttgatgcttctttacactttcatattgggcttttgaggttgcaaaaaatgctttcttaaatatgtttatcgtttttcttaattcttcagaacataatcttgtggagtctgtgttgtatgagttgcgatatttttagcatctatgagaatctgagaactcctagtgaatcctaatgtggtggcccccagattgtcgccagtgaaagttgggaacttccattaattcctagtcatcatttaaaatttcctaggatttctatagaacaaaaaatttctgaagcagctacaaatttaatttgtgataatccattagtgaaggccataaagctgacaaaagtcactgttaggaataccatcttttctttatcttaagaaattcattacttggatctgaaatgattttctaagatgaaaatagtagatgttttaattcacatgattctttttttgagagataaaagaaatattcttaagagaagggtaaaaaagaaaggtacaaaaaaggaggataagaaatcatcataaagagaaaaaacaagaaaacataataggagaagttaaacataatagaagttatgtggaaggatgaattattgttttattttattgaatattaggactctatacatacaagtgaatgacaacaacaaaaggaaataatattatttatagattacaaaaattcgggtctcttactattccaaaaaaaaaaaaaatcgggtctcttaccaattactatttaccctaatgaaaccctaatttgtacttcataacactctttctcaagctggtaaatggatactatctattcccagtttgacaataattgtctgaaatattagattacttaatcttttagtcataacatctgtaagttgtgaagtagttggcatatatggagtataaataatttcactgtccaacttttctttactgaagtgtctgactacctcaatgtgcttatttctgttatattatactggaatataagcgaaactagttactaatttattatcgtactagagtctcgttggtctatctcattgaattttcaagttttctaaaatcatcttcaaccataaaacttacacattctttgagttatagctctaaactctgttattcactagaccaagctaccacattctgcttcttacttctctatgttactagattccgtacaagaaaggtacaatatccaaaagtggatctcctgtcaattagtgatccaacatattctgcatcactatatgcttcaagaagctgctcattgtttttttgaacataattccccttcctcagagtacctttcaagtaatgaagtattctgtaggctgcttgtaagtgtacttctttaagattgtgcatgaactgtctatctatattaacggcaaatgcaatgtctggcttggtatttgaccagtatatctattttcctattagtttctggtagatttccctgttcacatctgggtttttttctgtcagttccagtttatgattgagatcagtgagtatgctagctggcttgtatgctagtttgttggtttcctttaaaaaatatgtgatattcttgttgggaaatgaatatttctgactttgagtacatcagttctattccgagaaaatattttaaatttcctcactccttaatctcgaactatccagccaagcatttcttggaagctactttttcatcttcattgtttattgtaacaaatatttcatctacatatatcatgaaggttgtgactcctactgactctgaatgcttaatgaacaaggtgtagtttccctaaatctacttgtaccctatgaataatattacctttgcaaatctaggtaactatacccaatgagactgtttaatcccatacagtaccttcttcaatttgcgtattctgtttgttcctactcctttagtaaaagcggagagaatctccatgtaagatttcttcttccaattctccatgtagaaaaacattcttaatatcaaactgctacaattgtcaattgaagttagcagctaaagacaataggatatgtaccatattcatctttgcaagcaggtacaaatggcttttggtagtcaatcctgcagattcaggtaaaccctttggtcaccaatcttttgccttgtatctttccagtattcgatcgcgttcagttactttagttgttttcccttttcctgtttggcatttagctttcctttctttttctcctaaactgaaatgggaaaaagattatgatggtgtgcgggtgaactgtcattttacaatcaatattaccatcttttgaacttttaaaatatttgtgactgtgaacgtggttattttttttgggcaagattggacttttttcaacaaaaatactggagtatgatcagctattttgtttccaaggagcagagtgtttgtatgtgcattaacatttatttttgttttcttttttgggtgaggtctatgttttaactcattaacatgttcaacacttatttaatgctgcagtgttgtcaatttgacaccatgaaaattactgaagagttggaattttgatgcagtttggatgtttttgatattactttaactgcaagcatctaagtacttcttcagtctttaaatcattttactgagttgctattatataccattgcacttttgggtttatctaagcagacagatatatgtttggcacaaaggcctggatggacaaaggatccaaaccttctattttgtttatgattttcctttaaggttaaattttgaattgaataacatgcattgatttgttaaattattaggaatattcaattctttggccttgagtctcaacaga

SEQ ID NO: 8556 - DNA, 6832 bp, Carica papaya
  Intron number 8 from transcript evm.model.supercontig_846. 2 (locus evm.TU.supercontig_846.2) derived from phytozome v7.0 (chr-ID supercontig_846; pos 4700 to 11531 reverse st rand)
cctttttttctcaacgtgccacatcaaaggtgcaattctcatgctcaggcatctcagccccttttctttttctttctgtcttatggtgatgaagtagaggattaagtggattttgatattggcgttcctggtatgtaacaacgaatacacataggcattcacattatcagagttacattgttcttattaattatcctccttttatggagtgttttcaccatttagaagcaagcttctttgctgcacttgtctagttatcatgtttggggatttacgatcagtagttggttactaaaaatcattcttgaaattttttatcttttttgtaaatagagaactcttccatttaacctggaatgtgttactttcatcgaattgctttatttccatagaatatgctttctcattccacatctatgtagattattgtttctgttagagtgttttaatttagtatacaactgttaggatactacctcatgtgttgcctagcctgacttttacagtggtcttccaataggaaatgagggttaaaaatgaaggttgagaaggaaaagagagaagagaagataaatagaaggagaaataggaagagagagcagagaatttagagagaacgactgataatattagattatcattaggaatcttggtacaaggtatagggttatgtagtaagtggcaccaactagctcatacatttgccagattgtgcataatgactatcaggttgcgcacggtggttctaatataactacctgattgaaaaccctaattaactagccatatttcaaaccctaatacaactaacttgacattgtattcttgtcattcacgatgtctctcccttctttagtttgaccttctactcgaggtcaagatgtgataattgcaccttgagaaaggtacaatttcccatgtggtttcttgccccaaatttaaccatttgacaagggcttgtttaaccttccttcccgtatgatggatggtcctttcttggaggataaattaggctccactaaggcctaatctcatttgtcacaagtagtatcttgcttgcaattttggcattccccgggtatttttcaagtcatggacatatggaacacctgatgaatgcatgtactctctggtaaggataacttgtaggtcacttctccaatcttctctactatttaatatggtctatggtatttcatgcccaatttgagccattcccagatggcgagtgatgattgtggtaaggctagagcttcaacaggacccagtctcctttgttgaatttcctcttagaccttttagcatttgcataattcttcatcatgtttgagcttccagcaagttttcccttagcaatttatcctttccttccctttctttgagctatcattccaacgtggcggctgctgtttgccatcaatggtggaggaaacccatagagcgcattgaatggaatcatctcgaggacagagtgatatggtattataccaccattaagcaaagccgagccattttgtccatggtttcggcttcctgaagactacaaatcattggtagttttccacacattggttcacctattttgattggttgtcagttgggggtcacatgcgtgctcatcatttattcagttcccatcaaccctagcaattcatctagaatgtgctagtgaatatcttatttcgatcagacaatggttttagacattctgtgcgactagcatatgtgatccatgaagactcttgtaactccttgaagcaaaaatggatgagccaagggccaaaagtggtcatatttagcatactggtacactgctaccatcactatatccttcccttcatattttggcacctcttctataatgtccatgctgatgtgagtttaagcttgtcgggggattagtaacggttgcaatagtcctgggtacaacacatgttcccctttatacctcgggcacttatcacattcttttactcagttctccacatcctctttcattttaggctattaaatccttgcttcagcttctctagagttctttggatgccagagtgacctcccaaaggttatggtagcattttagcaaattctcatgcgcctttcttcccttaccacctagattcgtcctctgtgccgaagaataccatggctataggtgttggatggcctcgattaaaggaaaatggataattcaataattgccttcttgacttccacatcttcatcataaaatctttgcacctcttgaatccatattgctacagtagttgagatcaaggtcatgaattttaatatcttctagaaagggtgtctgctgccatgttctcctttcctcttttgtaatggatggtgtagtttaagcccataagcttgataattcccctcttttgaattactgtatgtacatcttattccatcagatgcttgatgttttggtgatctttcttatgatgaagggcacaacttccaagtaatgttgccatttggtcattgccattactattgttagtatttccttcttgtaaatagagagagattgatgtttggagctcaaggccttgtttaggaaggttatgggtctatcgtcttgcataagcatcaccttaattccttttcgactagcatttgtttccaggataaatgtaatgcggaatccatgatcaacatacaaccctgaacccacacatacaccatggatgtggaacccatgattaacttgcaatccgaactcacacatacacttttagcaaagaaatttaaattttaaataaactttccctatttaacccacaattaacctataatttggaattaacgtaattgggataagataaaagaattgattaaaataccacaaggatattttgataagttgaaatcaatccttgatgtaacttgaaggttgaagaaaaacctcccaagaagcaaggtagccattggctaccttttgaataaagttgcagtaaagttgaactaaaattgcagtaaagttggcccatttatagatgtaggccatgagactccttatggaaaaagactcctaaattaacaatgctttctcattataatgcttatcttaagaactctgtaaagaccataatctccacatgatacattacatgataaaggactctttactcttgaattaaataagaaccaaatgcaaggactctttagttgatggaaaccagccatgtttgaagaagagtgctcgacaattttatatctgtatctgtacaactttccatttttaattcttgtatacaaagaatatccggcttccatctattcatacatccccgtatgacttgtctgtttttcctatcatttatactcctcacagtccatgatataattttagcaatcatctagcattcatatcacatccccctatcttctttatctctctcctccgcccatcataatttattgaagattgaaaccgttttaattccctaggagtgccctcttcctgattcttcttcccccttgttccagtgcattccgttctcttctcaactctccttctttctatttcggcaaacaaactggcagtgatgagtttttgaaggttttttttttgggttatcttcaggcttttacttgaatgtggtggtagtcaaaccttcaatcagtcttggaaaatgctgatgctccttgcaactcatctagatggctgtcaactgctggaatggggaccgtgtttttaatagtaatggcattgcgctttctatggtatacacagaactgccagctcccatcattcttttttcactaaaaatacaagaaacgcgaaaggagtgtggctatgtgcaatcaccttgctgtcaagaatcacttaaacctgcttttcaatctctgatttgtgaaagtaggagtactgtaaggctttccattcaccaaggaggaaccaggaatgagtgatgtagagtgaccaagctccagaggaggtggtagggacactggatcactaaacactggatcactaaaaacattctcatactttttgatgaggttcgatatctcctcgtctaactcttactctatctcactagatattgtcagccttgttgagtctctagtgatatattccattgaataaattaggttgcttgctccaaccattctctttgtatgagcttggagagtcctttctcatatatcttttcaacagtcccctttatcttacttcctaaatcatttacggttgccttccttcctaatcttgacttgcggtttatgaaaatccaacaaaatggggcggtccttcttccaattggcctctaggatgatgtcaaaaagcctaaggtcaaggacgaagaatgaatataggaaactcaccttcttcatagtccatttcactttggaggtgcagtagtgattgagcatcatttgtccaatagccaacaaaaccttgatgcgggttattgcaatcaactgtgtctcacactgagtgcctactttgctgtctatgaaggaaatttttttttgaaataaaaagtatatatatattaacaaaacatcaagggagtgtcactcatatacaaaagatacttacaattccgtaaggcagtcaatcacacgcctaaaatcttccactcgttacaaatcatgcccaagtaaaagagacccaaataaatgtcgctatctatctctaatttttttaatatcactatccaacccatcaaaagctctcctatttctttcttttcaaattacccaaaatatagtcagcggtataagtttaataaaacttttctttatacaaatgccatcccaagcccaaatctcctccctcaccaaacccgccataacccaattgaccccaaggagaccataaatcatagtccaaatattttaaacagccggacaccataacaacaggtgattacatgatccagcctccagtttactgtctatgaaggaatatgagcagccattgtcaatgtgaatcagaattgattttgagtgtaaggacctcaagacattcatggtgcagccactcttggttttctgtcgcctgcaatgagatttccctactatctgtttgctgcctcagccacttccttctttctcgccactttggcctccggctctttttgtttaggggcttcaatcataaccagctatttggtttttgcagtggtgcccaagttagtaccttccgccacgtctatagcaagggctgtgggcttttttggcctctgagccatttcagttggtattatgcaggattataactttagtgaggctaccttggccgaaggtttggtataaggagggtgttcaatggtagggggtttggtgttgagattagagctaagcatgttcataagctagacttagggttctctttatttaatctgctcagtgaagaagaaaataagcttcatctaaggtgggtttaccttgagcatgtgcaacctcagctcttcaaacctctcttgatagtctgctagtgaatctttctacctgagtttatgaaactccactgtatcagctacccgttggacctccaaccgtctgaatatttccttctcgaatgcttgcctaatctgtgtggtccccgtgctgtgactgtcctccttggaactatcgatcgggtttgtcccaccaagtaacagggaagttccactctttgatcatcaggcacccatacagttggaaatacttgttgcaacacctaagccgtgtgcttggattgcttgctttgagaatttggatatccactctaggattgttgtagccgataaccatgcttatgttattgaagtgtggctagagctccctgtttcttttcccttcaagttcggtaataacctttttgctgcgaggaatattgttgggcttgtatcaagggcaatgttggtggtgcatggaacgtttgagccgaagagggctggtgcatgctcatagaatgccagcaagttcgctgctgaatatcagctagtttggtgtcagtggtggtgttgtcctcagtcataaagtcttgcatcagacgttccaattgagccaccttttggttatttgtcatgggggcctttcctttgttttgtgactccaccaagttcgactggctttgaaaccaagttgtcaaggtactggttgatgtgttgcctagcctaacctttacagtgatcttttgagaagaagtgagagttaagaatgaaggttgagaaggagaggagagaagagaagataggcagaaagagaaataggaagagagagccgagaatgtagagagaatgactgataatattaaattttcattaggaatcatggtaaaaggtacaagattatatagtgagtggtgccaataggctggtacaattgccaaaccgtgcataacgactctgttaggtcgtacacagcggttctcctattacaaggaaattgcagaagaaatattctaatataactgtctaattcaaaaccctaattaactaacttgctatatttcaaaccctaatccaactaactagacattgtattcccgccattcatgacatcaacttcctgtcttatcagcttccttgatttttctcttcttattttcacataagactttttttcttcttgtggacatttatacttttgcatttgttggaggaaaaattaatatctgatagcattcagatgcttctacttctaacttgtttatctttcactttgaaatttgtgctacttggccatctttcttgaccattaacatctgattattgttaaatctaatgtgcgttattatttttaacattttgtagacaattgacttttaatctcttcattagtatctcttcattaacatattttctacaggtgccaaatattactg

SEQ ID NO: 8557 - DNA, 2049 bp, Carica papaya
  Intron number 4 from transcript evm.model.supercontig_33.6 0 (locus evm.TU.supercontig_33.60) derived from phytozome v7.0 (chr-ID supercontig_33; pos 590832 to 592880 reverse strand)
aaaatgtgagttatttatatttaattgacagttaattgaacaatttaaattattcaccctgatcaattcagttttatttgattaacttgattgtaaaaggagaagaaattgtagcacacagctacatgaattagcaaagtggaaaccatatcagttgtctttctgttgatgtggagtatgtaggaaatggagctttgaaagaaatttaacaaaaaaattagcacggaccaacttaagcataataataatagaagtctgatctcaagctaggctattggtgtcctttatataggcatcaaccatacagaaaataaaacacgtaaagttattggaacctttgatagcaactatttgtgctagaataaactactactcctagaaaaagaactactaaatatctttctgaaaatggtaaactaactgtgatcaaaagtatcctctccaatttgccatctatgatacttcattattttctatccctgttagcattgccaagaggttgacatctctgcactgtcagttcctttaggaggattctgaagatatgaggcatcacccctttgttccatgggatgacatgaaaagacctttgactttgggggtcttggcattagattttgactgccatgaaagagggtggctatgaaagttcatgtatacaagactaatggagagaggtaattgttgcaaaagatgggctagaaagaagagaccggaagacagccatgattactcacagttatgctactaacctctggaagtggattagtaaggaacagaactccttggtttattgttgtttaggcttgggaatggttagacattaagtctttggacagaccagtggtgcggtgatagtcctcttaaagataggtttatagcatttttgctattgctagagataatgatgcttttgttagggacattctggtcatcaatggtgaatctcctttgctatgggccatcaagctgtgacagaatcttaataattgggaaattgattacatgatttatctcctgaattccatttgctcctgtcattttgaccctactgccagagatcttcacgtgtgagctcactcaaagaatgattgttgtctgtcaaatcctttcacttcagtcttcttcctcaaagtgctgttgtccctagattcccctagaagcagatttggaagaaaaaagccttccttcttatgcgttctttgcttgggaggccacatgaggaaaacttcttaaattagacagtatgaggaagcagggaatgttcattgtcaagaggtgtcctatgtattattaagcaagtgaattccttaactatttgcttatttggtgtgtttaggctagaagtttatgagatctccaactttgtccttactaaatgtgctttttatagccagtggctcgattgaaaaggaattattggcttgggaagctattggggcgtgcgagttcctgaaaaagttcatctccctagtcccttaggttatctcttggtttgtttagacaaaaaggaagaataagattttttatggctatcttttgctagcattttttggttaatagtcagcttcttagttatgaagaggatctggggaacctcattgagattttgatttctagtctaggcttgtaagtgttcttttatattgggtggcaccccttggtgccttgttgataatacttcttttcctccagaaaaaagtttccaagtgaaccttaaccttctaaaccatttcacagtaatgaataaaatgtcgtgaacatataaatttgaatcttagttcttccatgtacaggtaatgtaggacaaattagaattgatctgtctctggaaaaaaacttaggcacttcaggttcttaaatttcacacttaagaagccttgagcatgacagttaaggtttaattgcatcactcaacccaaaaaatgagggaatgctgaaagtattcataatttgtccatgatttgtcatacatcagaggactttttctgcctaattgcatcattgagttctaacttggtctacttgttttgaaaggttgaagggctt

SEQ ID NO: 8558 - DNA, 4840 bp, Carica papaya
  Intron number 6 from transcript evm.model.supercontig_92.7 4 (locus evm.TU.supercontig_92.74) derived from phytozome v7.0 (chr-ID supercontig_92; pos 616772 to 621611 reverse strand)
ctagaagaattaaacggtcgcatcagccaagtaaggttagatgcaccctttcatctgaacaaaaaaaaatacacatttactgcatttggtatatagaacattttctaattttcattttctatgctcctaaatatttgtctataaaaacatgcgtgatagtcgaaaatgagataatctacaaaaaatgaaagcaatagtatggataggtttcaaaatactgaaaagttacttttagtattttttataatttttttagtctagagtggtaatatgtacatatactaacgtacacaaaacatatattatgttagaaaacggaaagaaatgaaaatattttcaagtagaaaacaaaggctaataatctctataggaaagggttgcagtttgataggaataacgttagatggagctttctaattgttggatagaattcttttgctgttatttatttgccctcactatctgcaaatccaagcaacttcaaacttttcaggtttttacaaccagactccacgttcataatttataaatataagcaaaaaagggaattttgaagactcctcaagactcctctcttatgccgcaaaaacctatgtctcacttcaattgctcaaaccttgactttgctagggcctcaggatgtctactaatttttcatcaattcttctatgcacaggaatgaccttgttcttctgaacttctctaagaaactaatattttgttctgacatgcttattcttgtcatgagaaataagacaatttgaaattgcaattgcagcttgattcgaataaaatctaaatcttctcaatagtttcttgaccaatagcttgattaacagaagtagtagcaacaatgtgatcaataacttcttgcttttttgagctgaatgagagaattcgtgaaccatggctaagtgagtaaccaagctgctcttcatatattataggatcttgcccttgctatctgcaaatccaagcaacctcaacttttcagatttttgggaccagactccacaacttatagtgctttcagcacatctaagtactcttttagtgacctgaaatgaacttcacttgctcaatgcataaacctagggaggaaactcagaaggtgcataatatcaagccttattgcaaatacactgggcagtctataagacttctttccgcttgcatcaattgtttcaatgcaatcttctttgcttagctaatcatgcagtgcttgcaagtttgactggtaccacggtagtttagtattagaatgtttagtgcttcatttaaaagtaacaaatttgaacatcgctgaaaatatagagtttgccactttttattttaaaaaaagaatttgtcactttgtgggtgtattacgagttggtgactggtttgtagtggttggtctagtaggcttagctcatcagtatgttggtggggctgcaacaaccaaattgggtttgtcctagagaactattataaatttggtgaaatgaacattccatggtgctagttttttatagttggagtagccacaaatggtgcctacaaatttgcaactctccatgttgaactttttcttgctcaatgaaattgctttcttaagattttataatctccacgacaagcctttattccttaaaaaaaaaaagtgcttacaagtttgcaattctctaagttgaactttttcttatttttcttgtgcaacgaaaatgctttcttgagattttaaaatctccatgccaaggaaataggcatttctctcataagtccacattatggacctttggattgtttagttaaatttcaaactattctttatgccaaggcaagtcaccaacatataaacaaatagcaggcaaatcattgttgtttgtaattgtcacataaagatctaatttacttgaactcttttcgaatccaagttgtgagagggttatcaattttcgtgtagtgggctctaggagcgtgttcaggctgtacgtactcttcttagtaagtacaccttgtcttcattttattttattacaaagctttcagcttgcttaacatagatttcctcttctttataacccttaaaatttgcaacttgacatcatgttgaaaaattttccactactcttgagctactaaagctagcaacagatttatggtgttaactcttgccatttgtgcaaaagtatctgaaaatcaacaccatactaccatggaaagccttcagctatcagcctctgttttagtcttgttattaaagcaaaaggatctgaaaatcaacaccatactattgtgcaaagcattcagctaccagccttgttttgagtttatcgatagaacatcaatgttcaatttggctctaaacatccacttcacttcaatagcattcttgcaacttggtttatcaaccaaatccattttttcaaataaaagtacgaagttgtattgaagtaaaggtgctaaaggggcattgcccattaacaaaaaaattacaaattgattaaataattgattatagagtcgagatcatcaaagcatttgatgttatatagtaaaatagtggacccgaaataatggaaccaattgtcagtgatgattttgaagtcgatttcttttcattcgaaaacattattgttttttttcttccaaatgacccaaaatatagtgagagagacgagtctaaaagttttcttgtgacagttcaatccttcccatgcaagtagctcttccaaaattgatttatatttgacccaatatagtctcatgaggccaagaatagtagaccaaaggctgtgagagactggacatcgcagtagtaggtgattacacgtttcattgctatttttgcagagaaaaaatctattgacaattgtaaagcctattttcattaaattatttggtgtaagaatgcggccctttgctgcttcccatgcaaaaaagaaagttcttggagtggcacccgaattccaaataatattagttggaaattttgtctgttcttgtagaatattgccgatcagagtcttatactgggacttaactaaaaaattaccagatttggtgtgttgctagatgagtttgtcattgctgtcagttaagtgaatgcgagactgagtttggagcaaatgttcatatttcctcaattttccaatcttgcaagtttcgagatactatcacccatcattgatttagtttgacagcatcttttattaaaatgtctttgtatctaacaatcgcataaatccacgtctgattcttttgttccggactctacaagtgggaaaatatcaccttctggtaaggtgtatcaaagaagaaagaaaaattctgcacttaataattagtttgtataggtattaaactttcttttttatgttagaatattctgcagttttatatattgggtatgggtagtctctatgtttaagaataagacaaggaggtagttcttaaaatctgggtactttagataacttccagaataactgcctatcctttattgtaataaaacctattgctgtattctggacagactcatgaaaaatatttatcaaattttaagtactttcttactcaagagattgttgtattctcttttaatgagtccataaatttgcttaaaagaagaaaaactcaaacattccctaatatctactgttttccatggccatcatcccaaaaactagatccattagtaaggaccctaatatcttttcaataatcttttgctcctcttccttagcatctctccatgtctagctcttttctgcctcttcatatcatgcaagctaaagtgccacaactttatttatttttttaaaaaagaagtaccacaattttacacctttgataaacattagtaagatctggttccttctatatattcatggtcacgaaacatgtctggcgcttgcttctgaattcttttaggatctattgatgcattttgtccaggctccacttctactttctcccaattccagactaaaaaagttcattaaccttgatatctctactaagtattactttttttgtcataggttaataaaccctatagtcttttcaaatgctccaatattaaagtataattcaagctcaaccttttaatcaagcttgtatttcttctgttttggcacatgatcgaagcatatatagccaaagaattttaaggtagtgcactgaatttgaacccataccacaattcaaagggagttttatctttaaatgcttttgctggcgactattgagcaaggtattcaatgattcggcccaaaacttttctcacagcttcttgtcaaatagccagcatcttgccttctccattatttatcctaaatatctgggtaactaacactgaattcatctatcaaactgattttcttctgaagatcttgcatgaacaaaacaaaaataacaaaaaacaacagaaaattataacagctccgaaaatatctgcaaaaagagacaactttcaccaattacacgttcatggtatttttggggttttgacctagatatctaagggtgtaattcttataacacttcaaaggaaaacaaaaatggcattacccaggcaccaagggataccaatgcatcccttgtagagaagaatggccttagtttagcattcatgacgttcaatcctgtttttcttcatttcaccatttttcatgtcattcattttgggctagcgtatggcactattcttgcctattacctgcttgctgatgatgaactttagtcattatgtattacttttttgatacctgtaattgttatcttttgatactgattactaggtcatcataaattttgttgattacaagaaattgcaaattttttgcaggtgatagag

SEQ ID NO: 8559 - DNA, 2025 bp, Carica papaya
  Intron number 7 from transcript evm.model.supercontig_81.8 9 (locus evm.TU.supercontig_81.89) derived from phytozome v7.0 (chr-ID supercontig_81; pos 378008 to 380032)
gactggtgagttttccagtacatgtctgaagcttgcatgtctcattgtggctagaatttaaaatgcagcagcttctgatatttacttctgtcatgtgagcacttggtggagtttatatagaagatctttgtactgattccattgtctcaatattttggctctgtcaccttttgatgtctctgtgttcgttttattattccagtacataatcacatacatctaattcttaaccattctacaagctgatcttttaggtacatctgaattacttaaataggcaaggataagttgtcagggcttgagtatgatctaccctggacatattaattcttgaactcttaatatagaaagtgccctttcaaaacagaaagacataacagctgatgtagttaaattcttgattctttccttgttaattattgtttctaactctgataattgtataggtagactacaaaaatttttctttctatgcttgagttacttctaccctaccttgaaaatcttgagggtgggcattgctcaaaccctaaaactcgacttcgtaattctactttttttttttgagatattcaaaagaaaggtctactttgtaattctacttattaagactgttatcaaaattagaaatgtgaattaactaggaatgggatgagaatgaaaccaaatgggactccaaagtattgctaatagagttatagacttattggtgattttatctctaagaggttattggttttcttctcattcaataaattgtgttttagctactagcacccctttctttaattctttgatcctaggaatttaatttttatttggagatgaattgaaatgctaacatcaaagaattaaataagagggtaaggatagcttaacttcaaaaatcatgttgtaataatatatatcaagactaatatagaaactaaatacaaaattagttagaagaaaatgggaatggaaccaaatagcctgatagacccagtatttaattgaagcatggttgaagcaaaatttatctatcatttcctaagcatgcagagagggagggatggttcagaacttgagtgtagaaagctgtactggggtggggagggaatgggtgattttggggggaatcaagttggttagttaaaaaattaatatctattagtaacagattgagataaagttaaatgcaatgacaaaaataatgaattattcataaatgtttttcctgactagatcgtgatttttttttaaaaaagagagtaaatctttatttgattatgaaaactttatatattaaggaaattgtaaaaaaaattagtataaaaaaattatttgtttaattggcagaatttatatatttttaagtagatattttgtgagtgaaaacttttgatacttcaacatttagtgcacatggatgatagataataagctgctctaactattggtcatgagcaatgcaagggttctattacatcgactttgggggagcaaatgaagtttggttctatgaggtagtctagatgaggattcaaagaatattactttcattgtttcaattgttccataaggtcatggagctcttgcatggagatgtttctttggaaaaagaaaatgtttttttctttaagcagttcatttcactagaatctgatgcctgttagtatcaagtactcttgctccatgtcatgcttcgtactgcatatgatacctgagaaggatatggagtatatggcctgcataaactttgagaatcagatgtttgtaaccagagctctcccggtatattattttttcttcttatagttctatttgcctatgcacttaatttattttcaaaatagtcgagaagaaatggatactgtctctaacaagtataacatgagtcagttgtgatgtgtttgattctcattccaaatatattgctctgctataatgagaaaaggatagtgtgataaatacttaattttgtatcttccacttctgcatgttctctcaggatatttggcacggataagggttacagaaaattga

SEQ ID NO: 8560 - DNA, 1491 bp, Carica papaya
  Intron number 4 from transcript evm.model.supercontig_49.8 9 (locus evm.TU.supercontig_49.89) derived from phytozome v7.0 (chr-ID supercontig_49; pos 626007 to 627497)
cagggttccatttatacctcataggctcaaaccaggttagtcaatctcttccagttaaaactgttagatttataaggaaattactcttttcttctctgtagttattgtagaaggatgaacttgatttccagactatggttgactgtggtttctaccactaaccttttacagcacattggatgacagctacgtttgttccagactgtgaaggaatgcagatattgtatgaatagtttgtgtttgaaaatgaagtcaatgaaaatggtcaaagttttaggactggagtaataaccaatcattgtttacactttatctcaggagtactatttttttttttttttgaaaaactgaggaatactattttagttatcttgatgatgcattgcagttgtagaagcagctttttgttttaatataaataaatttatagaaaaagagctgtattatatagataaagtaccaaagagtgccacccatttagaaaaagagaaagccaattatttcaaactctagtatggtctgtgcatttattttcggacaaaagatgaccattgccaaaaaatgtcttgttttttttttgtataaataaatttatagaaaatggaggtgtaatgtatgcccatttagaaaaagagagccaattctgtacaattcaaaatctaagtaaggcccaaggctttttttggatcaagaagaccataggcccgcaaattttttgtgaccaattatcctgtactcttgggaagacaggagcctctccttcaaagattctggtttctttctccccaaactgtttgggaaactggaggtaggatgggggataaaaaattttccatttttgtttaggagcagccatgcccaaccgcacgcaaacagaagcatagctggggcattatttctttggtgttatgtatccaggaagtcggaagcaacatagtcttttaatttttttttggggcattctatgttgcttttaattttttttgcctctgtttcctctacaaccatgagcaatagtcaccctcttaaattactctatcaactgttggtatttcatgtttggttatcagataaggaatttggaaactcggggaaagggtcagaggaatcctgcacatgacatgattcatgtcttacttgatgattccggaacttgagaacaaattatgaaaaatgaaatacttgtctgttaatagtttggcagttcagattgatgttaccacccatctaattgtggtacctttagacctttgcaacctcatggttcataaagcaagcatccttcttttttagcatcagtcaatgtcattgttgataatcattgtatttgttttttaaaatgagatcatcattgttaatcatcattgtattattattcatgggttgatattaactgagcttctattaaacctggagttttctgttggttaaactaatataaaagcatgtctttcagactacctacgaaaatttccggtatagagcagacaa

SEQ ID NO: 8561 - DNA, 377 bp, Carica papaya
  Intron number 3 from transcript evm.model.supercontig_66.1 2 (locus evm.TU.supercontig_66.12) derived from phytozome v7.0 (chr-ID supercontig_66; pos 135402 to 135778 reverse strand)
agtggtaaatttccacatttccaccttaaatttttctttgaataatgagaggtaaatttccacatttccaccttaaaaactatggtcaaacttggcacctctctcattattcaaagaaaaaaacacgcatgaaagcatgaaatgggagttgtagttgaattatgaagctttatgttgaaaagattttagttttgatctactcatggcttgaaaactgtcatgttttccttgttatgttgatttttccttacctagttgtgatcagtacctttataaaggtattaatctagagaatagagcaggttgagcttatggattacttttctgtctgacaaattgcagtgtgcaaactaacacgaagcctgtggaaggatttg

SEQ ID NO: 8562 - DNA, 3338 bp, Carica papaya
  Intron number 1 from transcript evm.model.supercontig_123. 49 (locus evm.TU.supercontig_123.49) derived from phytozom e v7.0 (chr-ID supercontig_123; pos 658935 to 662272)
ccgttcattcgcagacttcctgagttcaaattctggtaatatgaatttctattagtcattttttttttaatataattctatcagtcatttttgcttcttttatcgcattgaaggttcccttctcatggtttatttttagttgtctggctagttgtttaatgattataaaattagttgagttcagatgtaatcgtcacgctataaaaccaaaggaggaacttatttctgcttgaaccggttttagtattatctaaccggcttaatccagttattgatttttttatccctcggaataatacgtgttttcttgttataaagaaggctgtttcccatttagatattgcagaagctttaattcttagatattatatctaatctggtttctatctgtaacatctccttatttactttgctccttaacaatccttgtctgtttgaacttttagtactgaggctggctgctggactaatgaacttcctgttaagagggcctctacttaaaaattaaagagcaagccacaaggatttcatgaaataaaattttgaattgaatcatcatgactaagacaaatttatttactattcattaaaatttgtgaatgctgcattgaggaactgctgtctgatggatgtgctgagggcctcagtcttggtaataagctgcagctaggttttcatagaacaaggcaatcatgtaatatccagtgatttctttgttcatgtagttggtagatagatatgttaccttgaactgtgtttctcaaaattaaaaatataggcttgctaactatttattctacacagacgttgtatgtccttgacctctgactatgtcttgggttagaagttctctagttactccacaatttttatctcattgaaaattgagttaggattagctttttataatgggaaattgtattataatcttctctcctagttggcttcttgtggaaattttcactgtaggttatagaaccattctgaaatcaatacctccattagtagtttttgaggttcttataactaccaagtagagggatcttcataatctgacttaggggtatattctaaagcagttgttgtctttctaattcattggaaacattaggcttgatatggtgcatggaaatgttttctagtttttatttctaaaattcatatgtatttgaacataaaataatcgttatagtttgtttatggtggtatcaattgtaaataaaaacagttttctggaaaaccacaacatttttttaattcttttcaagttcaggcagtattttcatattattttctaaataaagaatacaacattttttttgctcttttcaaattcatgccatattttcatatcagttccaaattataattttattttcaattaccacctatgtttttatctagaaacttgtttgattttgggaagtgaaacttgagaagtactcccatggaccaaaccctttctgtgaaaacaataatttcataccgtcagatgaatacaccatgttaacaaagctgttgtggtcagcttgagataacctctgttgttggcttgagaaaaagccattacaacctatgttgatgaagcctgtgcaatgtctattaactattacagactttgtggcataaggtggtgtatgtcaacaaaaacaaaactgatgacgataatttagcaactgtgatattcgtaataaaagtttgcttgtgattagttggaagtagcatgtacccaagtgatgctacaaggatacctttgggcttgaagcccaagaaattaggagacaagccatagcactatccagaggattaagatagagttgccatctggatagtagccgggacaaaaagatgagggttcaactcagtcctttggaaggaacccaactatcatccccgatgatgaggtcggcagtttgtaagaactgaggaaggtgctggatattatggtcaggctcctacttagagttttggtttaattatgttaagtctgttagacttgatctttctattttatacctttatcaaatagtttagagcaggaaaaaggcatacaacaatatatttgcaaaaaaaaaaaattacaatgataattatatcctaaaattaagatgctatttagtggttggagtaaagtaaaataaagagcctgttaaaggaaacaataaagaataataataatcacaaaaattataaggatagaatagcttaattgaaataacaaatctgataaagagaaagaagtaaaaataataatacagaagagatatatatttcaaaaagattgtacataatagatataaatgataaagagtggtttggaattggatccaggaaagaatatggctataaatgagtcatttcaaactctaaggagacctttcgaaggtatcgtgattttgtactaactcaaacatatttgttttactgcattttgtcctctttcttttttcttactccagaataccttaccctcctttcattttttctgttgaaaattgagtgattatagttatattgttatatcagaaatatttgcttcctaattagaagatatggcaccaaggttgactaaatctttttggtttggtttgccatttattctaaaaaattctttcacttattaggaagatttttacaaaaatctctttaatttggtctgctattcattcttgaaatcctcttattaattaggaaaattctcaccaaatctctttgatttggtttgctatttgttttggaaaatcctctcactaattaggatttttttttgtgtagatatgattacttttgtattataaatataatccttgcattattatcaaagacaataaaaatagagaattttcattcttcatggtaccatagcaattcttaaaaaccaaaaactttttcctccttgttcaatggtgtcaatcatctatattattttgtccccatctgttaccacctctaatggagaatctgagtccagtgccttatcattactggacagaaattgaacagtcataactatttccaatgcaatttcaattacgattttcatttctggtcgagaaaaagatgattgcatcattggtgcaatcactgaaccaatatctgattatccacactagaagatgtagaaaactgaaaataacttagttatgtcatgacttataaattccatgaggaatgatgttgggaagaattttaatataccatacattgagagctatgagcagttggatgaatcatttgctaatttctataacagattcttgctggttcttaaagaatttatgttttattccatttgtgatttaggtactccatcaccaaggctttctgtgtggcattct

SEQ ID NO: 8563 - DNA, 939 bp, Carica papaya
  Intron number 2 from transcript evm.model.supercontig_99.4 2 (locus evm.TU.supercontig_99.42) derived from phytozome v7.0 (chr-ID supercontig_99; pos 771712 to 772650)
tcaatagtgtcaccattcaggtcagtcctcttccaatttcaaacattgtgtttatgagaaaatagtttgtttgtgatttctctcaccattaaatttagatgaatagtagtggatgtatcataggtcttcagtctttcgtctgtttgtatggcaaatattctccataattttctttttcagctattttatagtgctaacttcaagttctagaataatgcatcattcagatcattccatgcacttcctgttttacagatgccatttctctctgtgtttctgttttgttttttcaaacattaaaatagtctgtttgtgagttcttcaccattagtttaggtctttaatctttactctggctttatatggcaaatgttttccatgtttttccttttcagctactttatagtgctaacttttaaaattatagaataatgtatcattcagattattccatgcactttctgttttacagatgccctttctctctgtgttctttttttgggctaattctgatcaagctttatatcgttgtaaggttacaaattttcattgattttaactttacatcagtaacgagtaatatagatctttttctctttttcactataacgatctagatgcccgtttccaagctatcaaatacttgaggttgctctcattgaaaaatttttggcttcttatacaacaaacattaatagttggtatagcaatatcccttggaaaagtaaatagtaattccctgaatttgaatagtagattactgaggcaactaacagatgaatgcttttcattacttatgtgtctagttggaggatccttagtctgctctatgttcttttcacctattattaacatcttctttctatccgataaaaagttaggtttgtgtgtttctattatccagacaggtgagagtaaaaatctatttgtcagcctgga

SEQ ID NO: 8564 - DNA, 705 bp, Carica papaya
  Intron number 2 from transcript evm.model.supercontig_42.1 76 (locus evm.TU.supercontig_42.176) derived from phytozom e v7.0 (chr-ID supercontig_42; pos 1704889 to 1705593 reve rse strand)
ccagattttgatccatttgcattcttgtcaaggtagactatattaaacaatttgacatattttcaagatttcatatagggctaagtctttctcatctcttatgtaagtatatgatttgcctcattcacagtattcattttagaaaatatgttgatgtagtttgattttagaaatatcttaagagataattttgtatatatctcgagagatattttatatttattttaaaaaatattttatgtttatttttgagatattttgtatatattctaaaagatattttatgtatatattttaaaaaatattttgtgtatattatggtaaattttttgtaaaaaatactctcgtaacttctctatataagagtttacatttttattggtgatgtatcattattttgtcatactataaaagttttttctcgattttatccgtaaatgtatgtgtatttgtcgaatcatagtagatcttttagtttttcttattctattctttattttttatgattgtgtgcataatagaaattaatttttttaataaaatgagaatgaaacatagtatttaagatttttgtatatcatataactaataagatactcgtgttacatatttattatttaatttatttgcgttcgatatttaattgatccttcaagtttacacctaagacatgactaataacataaaattagaatcatttgtagg

SEQ ID NO: 8565 - DNA, 873 bp, Carica papaya
  Intron number 6 from transcript evm.model.supercontig_13.2 43 (locus evm.TU.supercontig_13.243) derived from phytozom e v7.0 (chr-ID supercontig_13; pos 2139230 to 2140102)
aaagttcattcaggtatgagattgctccttataggatattcttttcttaatttttttatatattaccttttggaaacatttgatctttctcaccaaatggtaaagaaaaattaatggtttatgactttaataattggaatttgatgagttaccctagtttctgttgatctggttgtccaagttaatgtgtgtagattatacaagctttgaatttcttatcatgttttataatctggatggtatggttctagtggaaagctttagaatataatcaagtgaataacagtcttaaatatttggaaatactgaactaataatgtggctggtgttgaatgcacacattatccatttaaatttcagaatgcttcttgcttttgcaattggcccccatgagatgcagcgggagggtttaatataattacagtgccagaaagatgagaaatatgttttttaatattttccagagctctcaattttaattagatttgtccctggcattttgtgaaatttgattatttttgggaaattctgtggatttttcattacattgtgcagtaaactccttcaaaatactctcaatattaaaaatttcattttgacttttctatcttatgattttatcttctgttaagtattggagttaactagacatctgaagagtgaaatagatttgacggatctctaatcatttctaaccgtgacttggacaccgcaaattttcctttaatttgcttaatttatatttttttgagatctaatgataggattaggaacatagctttttttgggagcttggatccttgaaaagatggtttgccatgtttattccttaagtttgataatgctttacaaaattatctgtggttttaggaa

SEQ ID NO: 8566 - DNA, 1652 bp, Carica papaya
  Intron number 5 from transcript evm.model.supercontig_54.4 1 (locus evm.TU.supercontig_54.41) derived from phytozome v7.0 (chr-ID supercontig_54; pos 874878 to 876529)
aggaactattatcaagcagaaaacatatattacaggtaaagtaattcaatggaagctgtttataagctccttcgttctgtacctttgctctgatatgagtccgtttttccaactcagtggtttgtagcatgctgcattctgaaattactctaatttatcactcactaaacttcatttttatgtcataactgatgcattgtattgtcaaattatgtaatttgtgcttgcttgatacttcttcagtattctgtaaaaatgcaaatatcaatttttaaaaaacaaaagtatcagctgctctatttttaggcatcaaggggttaacatccatttatgaagggaacttattacaagtgaagattcttgagaacatattttatatatttgatttttagctaagatgcacattttcttttgggagttacctttgtctatgggaagattggaggctcttttatatttatttattttttctttctccttgttttatttgaagtttttctccttatcttatgtttggatcatggtaaatggtagaattttaatatatggtatgttacgggcgtgagaaaaccatgtttgtttcaatttccaatggtaacaaatggtatttgactgacaaattttgaggtgaatttttaaactactaaaatggtggtattttggtgggtattctatttgtttcctattatacacccatctaatttaattaatttcatagatgtcctgataattaaaaattcattaaattagtatgataatataaataattattatttattttattaaatataaaattttaatttaattatgtataataattatttatttaaatacaaatataattatattaataaataatttatttttcttacatacttcttttatactatttactattacatataatatgtaagggtaaattagtaatttagataaaaatataaccataccatcctatcatcaaaataaaaatatgccattaacatatattaatagataatctaaacgtaaaaaaattttgccattacaatcttatgttattaccattcaattactggtattattatacgttaattaaccattactgaaatttattcaaacaaagccttagatggatacttatcttttcgctttaaaatttcaatttctctcaatattttcttctcttattactaatttttttaaaagaacatactgaacattgagcccatataaaaatacacaaataagtcatgctttaacaaatcttataaaaaaactggcatcatcttctagaaacatcgataaatgttgaaacattgatgtcttcttgcaacatcaactgccaaggactttgacaagaaatcttgtaatgacaagaaatcttgtaatttcttcattttagtaggtcataaatgaaaattatttcttcatttttagtccctaggaaaacatcaaccttaagatggtttttgacactaccagtttcaaccattttcttcccttccctctcattgttcatctaatcttaaactcaatcattgtactgcactgtagagtaaacttttttctcatagttcatctttttgaattctgataagatttttccattctttgtttatgtcacgacctttttagttaatacaacaagaagcaatcgagcttaagaacaa

SEQ ID NO: 8567 - DNA, 4788 bp, Carica papaya
  Intron number 2 from transcript evm.model.supercontig_2.77 (locus evm.TU.supercontig_2.77) derived from phytozome v7 .0 (chr-ID supercontig_2; pos 1340923 to 1345710)
tgaagcatattgctaaagatcccagtgagcgtaagtttctggtgtattctcttttatgtcaacattttcaaacgtggaaataactaggcttatgtttgctatgagccattttgattagaaagagaagaaaaaaagaattcaactttcttattccacaatgtatctagttatatgaaaaaaatatgatttgacatggtagcaattgcgaaacaaggtttggcatgtatctcatcctcatgctttacaaacttctcattactgtcataaagggttttgggtgctgacaaaaatatcttatattgactacttctctttgctcgtgttttttttttaaaaatttttccttctttctattgggggacggctttgcctttcatactttctaatttaatattctcttccaaagttactcattttaccattctatgaaataaatttgggtcggtatcataacaattgggaaataaggtttgacatgtatctcatccttgtgctttgctcactttacatcattacgataaggatttgtattgattaatcctctttgttcatgttcttttatgtacttttcttctttcccgatagtggatgtgataggtcccaatcaaagctattacaattgctaagcaaatagaattattcttagggtgagaaaaaaccataatagtttgatttgaatatctgtattgttactgcatactggaagattatctcccaaaaaaaatcgatgcatattggaagagttcaaatacatgaaggaaaaccaactttttctaaacttacaacttcaactacttgaaataatgactctaacaaatatttacgaattaagagctacaattattcaactattgacgagaccatatgagacaagtgtgtggaagaggatctgcatagggaaggagaaatttcaggagtgccttaggtagagagtgggagatggggacagagtcaacttttggtatgatatttggctagatggaagggctatgagagcaaggtttccacggatttttgttatagcacgacataaggacatttttgttgaagaggtgttcactgaaggagagggtcggagggagtagcatgtggaagtattgtgtaatcttgatgattggagataaacgaatgcgaatcgctgctaagtgctttgactttaatttcgcatagtgaggatcatgaccaacttgtatggactctcagctcaactaaacaattcaccatagggactttttcaaatatttgatcaagagtcaaacaaagaacttcccattcagacaaatatggaaagttaatgcaccccaaggataacactttttgcttgggaagtagctcgtgaggagcatcttgactattgataagcttatgagaggagggaatattatggtgaactgttgttgtttacgtaagagagcagaggaaacatgcaatcacattctcctttggttctccattgtatgcagcttatggtctatggcttttgggattatgggatacaactgggtcatagcaagtacactcgaggaagaaacttgggcgtggaagggtaatgatgagtcagaaaaagtacttggggctcattcctctggctattttttgtgttgttcagaaggaaatgaacatgggaatttttaaggagtaaaggagggtattgataaaatgaaagtgtaatatccaactgggtattataaataaaaaaaaactatggaatatatatatatatagatgtatatatatataattaaacaaaagaaaaaaaaatttaaagaaagaaagaaaagaacccaaagtgtactctcggagcagaagaagaaaacacgtggtcatataatatatatatatatatatgtgtatatatataattaagtaacaaaaaaaaaagaaaagaaaggaagaaaaaaaaatagatagagaagagagggtcgagcggcatcgacgggagagagagaagggtcgcatggtgttgtgcgacgctgcaattgaaggagaaagaaaaaggagaggaattgccatcggttagagagagaaaaagaggagagagatagaagacacgcggtgggtagagagagaaagagagaagaaagaaaaaaaaagaagaagaaagaagaagaaaggaaaaagaaagaagaaagaaaaaaaaaaagagagaagaagaggagttgcgggaaaggaggaagaagaaggaaaaaaaaaagagaagaggaggagctgcgggaaaggaaggagaaagaaaaaaaaaagaaaaaaaagaaagaaagaaaaaagaagagaaaaaaaaagaataaaaagaaaaaaaaatgatgaaagaaaaaaaaagaaaaaaaaataaattaaggagaaaaaatgaaaggatggcgactaaatataatgttggtgtaccgcatgcgatgcgctgattcgatcatcaacgcctgatattttcggtgacacgcatgtgatagcgcgtggtggcgctaacgactgggactgcgtgtccgaagataaaatctattcctaattttgcgtaaaatagtttataaaattatttataatttaatatatgtgttttctattataaacgagataaactacataaacggtattcgaatttccgagagaattatagatcgagttagaaatgattcctaaagctttcctgatcacattataagtaagaattatgtgtattccgtatgaagacataaattatatgtttatataaatgtgtatatggatagtgcattctgtgaatgtttaaatgtatgtgtagtataataggaatataattaatatgtctaatttgtatttatttgtgttcatgtatatgtgtatatatgttgttacgcatgtatgtgtatatatataaaaatatacgatgaatgtgatatgaattgataagaacagacttgataaaaacaaaactgataagaacaaatgcgtgaataaatatatatactatgttgtgtgtaattgtgtatacgtgtttaagtatgaacgtgtgtgtatatatcagtagagattgtgtgtgtgtgaatataaatatatattatgtttgagacatgcagtgaaaatacatgtctgtattgtaatatgtatgtgtattaaaatgtgtgtacatatgttatacatgtgaaatgtataagcagtgtgtgtacgtgtggaatttggatatactgtacttgctgtgtgatctggtgcagatgtacggtgcgctgtacttgttgtgtgatctggtacatgatgattcagaaaatagtttgaaatgtatagctctaatgtgcgtgatgatattgtgtattttgtgtgtttgtgtttaattatgcatataattaagattttaagtagaaaataagtgaattggaaatgagagagatttggaaagagtgtagagtgtaagaaccctgaatacctactcgtttagtatgaatcgaggagttgagagtgcatgtgtggctgaagttcagcagatatggtgggtatgatgaacctgtacatggatagagtttgaagtctaatccagacgtagataaatattcgtgtgagtatgggtcacctagtaaacgtaactgttgtagtcattgtgtgatttatgtgtgtgttatccatgcgatggagggattcatttcgcctttcctcgatgatgacataaacggcattgcgcgatgaaaccatagaaatgatctttcgagtgtatctatgatcatttttgtgtgtgtgattatagtttgagatgatgaaaccttcgatgtgatattccaagtgtattataatatttcgagtgtaagtttgatttgaaataagaacaaaaattaagttataagagtgaaaattaaaatatgtttcgtctgataaattctgttttgttatatattttgattgtgatgctttgtttaacattttctttattataaatattaatatattttacatattgcgtgagtgtatatgcgtaagtctccgttataaaatcatttttcttactaaactcgtgaaactcactctaatttacccccatttaggtcaaaggagatgaggaacaagttcaaaatcaaaataagatgctgaaggaaaactttattagcatttattttaatattgtaaattaatttaaatgtctcaattatttgtaaatgaataattattctgtcataagcgatgtgtattaaagtgtagtttcgctgtatatttaatatttatctgttccattagttgaaaatgttgtactaacgtccgtactcaccgacattggggttcgggatattacagaaagagagatggttccaatcccttggagtgttgataaagaaataccatttgtattccatagagaatgtaggagaactaattgatatgctaaccaataggtaaattctttttgctcatgggttttgcactcccttgatgcatgtaattaatgatgcacatcacactttttatttaaaagaaaaacagagctaacagttattcaaatgacagacaatagctaacaaccttcgtttaagacttcaaacggaactatactagtatgcatgcttaatggaaccttatactatgaaccttgggtacttggtaggaactcgttgcaatctccttggcttttcaggatgaattaccttatcttaccatgttttgtaatatatttttttctttctaataatatatcttcctgtatcagaaaacaaaatatttgatatgaggatatcttcacttgaggtgaattactccatgtatccttccttcctaatgttaaacttgcaaccatgtcattgtgcagagactggtgaatccatcctggtccttaagggacca

SEQ ID NO: 8568 - DNA, 1463 bp, Carica papaya
  Intron number 2 from transcript evm.model.supercontig_7.90 (locus evm.TU.supercontig_7.90) derived from phytozome v7 .0 (chr-ID supercontig_7; pos 815335 to 816797 reverse str and)
tttgggggcactcaagtgaagcttggtgagaaggagtaagtcctactgccttgtttgaaatggcagtgcagtttgattcaagtttaacatagcaataacatactctgttaaatttttatgactgatgcttttctttctgattggtgcttccttgtcctataaaatgtcccatgttttgtttgtctagggaatagttccttcgcatttctctgcagcactatgtcttctgttaattacaagatgatatcaaaattttattgtattttttattttccacaagaacccagatagaagactgactacctattctattaacacaatgatcaccttctgtcgatgttaatatttttagcagccttccgtaacccctgagagccatggcatattggtggcaaatctttcagttttatgagcaccgtgcagcctgctttaactactcaacaggctttatctacaaatttttgctttttaaaaaaaaaaaattgtacagtgatttcttaggtatatagatttgattttggatgttctaaggtgtatgatatctttaatgtcttcttctggaacttgtgttggcttagcacagacttcttaggggattgttcctccagatttgagtatcagttgtcagatatgttatagaaattcttttttctttccctctatttcaactcgtagtgtggatatttggtttgcttttggatgaattctaatttagtacttcttgataaattctgttagaaggcagaaagggaataatgctcccatttttggtttatcatgtggattttccaaaagtggttttcatcatttttcaaaccatcttttgcatgctttgctagtgtctattgaggcaatctttatcatttttaaggctttcttttgcctgcttggcttttcctatgaaagattggggcagaaggggtgctatgaaggttttggtttattcttgtctcttccaagcttgtcacttgttccttgttaaatgggctgcacttcagtataataactatgaatggataatctatggttggagcagcttttgtttttctctttaacgattgttcttggcaatataatccaaactgctctaccatactctaacatagacagcaaaaacctctttcaaatgaaaagaataacctacaaaggaagcatacatacttgttttatgtaagttgttatgttgttatttataatcacatgcatttgttggaaagatattattaatcatgtgctgtcttgtttgttgcttctccttagctatgttagcaatattcatatgctttgtttcacgggtgtctaagattaatctactttatatacaaagctgaatttcactgcacattagctgagaagactaggaaagaggaggattattttgtgggtatctaaaattaatccactttctatgcttattgatgtgtattcctgtgtatattatttcaggtatcatctttacaggg

SEQ ID NO: 8569 - DNA, 1015 bp, Carica papaya
  Intron number 5 from transcript evm.model.supercontig_160. 10 (locus evm.TU.supercontig_160.10) derived from phytozom e v7.0 (chr-ID supercontig_160; pos 224034 to 225048 rever se strand)
gttctaatcatgtatgagtttttgcttcctgtagcctcactcttgattttttagcagcatggctttctcatttcttgcccatgcataactgtgtaaatttacaaatgcttgctgtttcttttatgattatttacctctaaagggaatcagttgttgagtttcttttgtccgtgcatccatgttagcctatatgtgcaaaagtagtggctgaatttatggcaggcgaactttattcttgtcttttaaaacttgtaatcaaatgcttttacgtatttcatagttctccacattatagctaggctttatgttttgaataattaacttttccttttgtctaggttttagattttatgtccacattaaaacttgtaatcaatgttatgtgtatcatggggtgctatgccatatgtctaaagaatgacaattaagaagtttctaggacttctgcaaacaggaagctagaccttggaataatggatgcaaatggatgtcatgcttaaagatggcttgcaaactttttgtcatctcaatatctagtcttaagctagatctggttgctcactattgtctgaggtgaaagttggttaactattgtatttataaagttgaaccttatatctggtgctatctggctatctgacctgaagaagtgcaggcaagaatctcataaaaaggattcaggaaatgttttagctggttatttggcgtatcagatcatgttagcaatttctacttgccattagttcaaggagggttgcactgatagtatctgttaatggaggcattcatagtattatagacgtgatgatatttctcatttttacttttagggtttctgatgaaatcagaaaattatctttggaaactccctatggaaatgtttattctgagacagatttatttcatgatattcttcttgcaaattctatctacaaatgctgtttgcttgtgccttgattttgaactttgtaattgaataggcaccgggtcggggggcttctcttgataggaaacg

SEQ ID NO: 8570 - DNA, 1316 bp, Carica papaya
  Intron number 1 from transcript evm.model.supercontig_139. 59 (locus evm.TU.supercontig_139.59) derived from phytozom e v7.0 (chr-ID supercontig_139; pos 410461 to 411776 rever se strand)
cccgaacttttgctcgccgattctcctctctagaggttttcaaattttcttttcttatggctagatttgggcttgggttttcttatttgagtttcctgcttgacgttgtgaaatatatttgtggtatttattagttttgagttttagtttatctttttaattgaaaagcttggtcaagcagcaactggatttcctcttggaaaaagagctgttgagtttgagttcataatttttcgtagtagatactttttcttcttgtttgcgatttattgcggcaggtttctctttgctagccgattaacgttgatgggttacatttggagttgattatgggcgatggatacggaaattgctgtgagaacttatggattttgaagagccttgttcaagctccacatattattgtctcaatctgagttaactcgctgagttttgtatgatgatttcgtttagagagaatattgatgcttatttggattggcttattgttttgttacttcaaatgtaaagaatatttaactcgaactgtaagcttatagtcctttatataagaaaaaaatgtctgatacttttttaagtgaaaagtcagtaaggtgattaaaaaagtatattcagttgttttgattaaaaattggattactctttgaagtgctaaaaagttctagcttatttttagaacctctcattagaacaaatttacaaccttttcaacttcatgttggatgcttggattaataggaattttaagaaaaaatagtgtagcctacttgaaatgcatttggataaatcgggtgttacgggagcagaaaatacttgtgttatattattaggtctgcttgatgtccagaccttccttgcatgatgataagaacatgttctttcttgcgctatatatgtcagccattgataaaaagtgcagggatgtatactgttgctaataaacattaggaggtattctattgcatgatgaacttttttcattccttgaagaacacatgtgtaaatcaatctaaccatgtcatagctgctggactagaggcaacaaggagttacaacagcgtgttgatatagtggtttggtttaccacatttgccatgaatcataagtaatagatgtagcatgtaactgatatttagtctctatcaaattcatttctcttctgaattcttgaagggtcatgtaagggcttttagtgtgttctaacttttaatctccgcccttttgcatatttagttttttattcatgcttatttgccaaaacatatatgttttttggtgcaggtattagcggcacaaatcaatatttataggaagtt

SEQ ID NO: 8571 - DNA, 2141 bp, Carica papaya
  Intron number 1 from transcript evm.model.supercontig_37.1 07 (locus evm.TU.supercontig_37.107) derived from phytozom e v7.0 (chr-ID supercontig_37; pos 843115 to 845255 revers e strand)
cccaggagttcctcgaggttccttcattttctcttacctttgatttttggattcgggttttagctctattagtaatcttccccggccgtactttttacagctgattttagggctttggaatcaaaatgttttccactaacttgactgtgtgttacccgggttcaaatccttgtagttcttcagtgtttgggttagagagaaattctctgtccgtttaactactagttgcagaaacaaatattgagcattggaccatcaaagccatatttattttcatcaaatttaagtttgggcgtgtcaagcctctgactttagaactttaacagtgtttggttcaattcatattctcactcctttgaatttcttggtagaaagtaggagtttaccttttgcaaggaattcaataatggtaagagttgaattgagtcaaacgtgaaaattcggtacaattttacatatcaaaaatattttagtaattaattaaaaaaaatagataggaattgaaccaaacaggctgcagaagaaatctttttatgcattaaagaggttatgtggtatccatcatgtattctttaagttttaagcaaaatgatttccaaaagtttgatttaggggtaccagtagtaggttaactggacattttagaggctcattcaaaaaaacaaacatttttcaaagtaacatgtccaagatttgctgtgaggagcttttctcctgtgcctaattgattaatggttatagtcttatgaatgttcaatacagtttttccctagagattttttattcttgtgataatgaagctttaattaataggagcatctgtcctatatttgctcattctacttaccttgcaggattgagctaaagtacctaggacgaatcttctggttaaagattatctacaaacaaatggatgtttttatgaattggttgatttgagctattggttttcgccaatatttttgcctcaatgttactgcttatgattttaaactgcttcggttgctgaagtgatttgccaacctattatttactctgcaagtggaaagtagattagtctatctttggaacagatgtattagtttcgtgaaatttatttgtaaatcaacagttaattcatttagcagatgctttaaatccttcgatgaaaaatgaatttagcagatgctttaaatcctttgatgaaaaatgaatatgaaatagatcttctaagtagatgaagaatttgtatttctagccaatttacaaattgtcataatagtatgggctaagattagaaattaattagtgtgactttttatgtggaatttaatatttagaatttaatatgttttccttagtaattgtactcctagtaatatctattgtactatgccttaatctaattctaattgggtattaactaatctcacttttgagacaagtccaaatattcaataagcaacttaggagaattttttcaatctttttggttgtatgatgcaatcaaattgttaaatgtgatgcttaagaatttcagtttatgatgttcaagaaactgtgttatattctaaattcttaagaagacaaattagtcttaattttttcctacatcatcatccctaaattggtaaaaattgacttcatgtagaattccatatggaattagaacaaacattttgaattctataaattttggtagtaagcattccaagctgtcacacctgtgacggttccagtttaagatgtaatgtgatttttatcattttctagtagaatttgtattcttttctagctggactaagtgcggattatgtaaatgaatttcataacatttttggatttatctcaaacataagctttgttagctggatatgcaaggatcctgcttatatgctgttagttcaatgtttacaagttgaatacatgatcatttgcacattacatattttgctcttgaactttgttggtagcagtccgagaaatgaaagtaaatccgtagtggttcttccatagtcaaataggattttcagaaagttgtgcatctccactggcattatttttccttactcgtacacagtttgcattattgattgctttttgaattatatttgattatacttgcagactgtgagagagaagtgctttgacaagtgcatcac

SEQ ID NO: 8572 - DNA, 1026 bp, Carica papaya
  Intron number 1 from transcript evm.model.supercontig_3.12 6 (locus evm.TU.supercontig_3.126) derived from phytozome v7.0 (chr-ID supercontig_3; pos 974849 to 975874 reverse s trand)
tgggtcgtcctctaattaataccacgccctacgaggtattggttgtctcttagttttgttgttcgtcggtttttttttttttttttcaatttgttaaataattcaaaagcttcagttattaggttatctgagttttgttggtagaattagtatttttaattaagacgttattgaatttgaatcagaacattttggatatggtatttgattatgaataatttgatatatttggatttgtggagattataattgcttatttggggatagtatatggcgttttctgttgaacttattgcaattaagcttccatttttaagaatttaagaaaatcctctctctgtatgccaaacataggcattgggctctctttaatgagtaatctgactcattaccaatacaacagatgatagattacggtgaaaaaaataacaaccttcaaattaaaatatgcaatgctgcatcagtattgttttttgatagtgaagcattaaagtatatcaaattattcataatcaaattattaatgcggtaataacttgacattattaatttggttttgtattaaatgggcagaataagtggagtgaatcttcgtactgtttcacgaagtagttttcctatatagggacaatgagtctaatggtctgggataaggtttctttgatggataactgaattactaggtttattaggtgtgagaccaatttggttttgtttacaatgcaatgtaaatgtagacagagtaagctgcttagattttgcttgactaaaaaatttagttagtttccttaaatgaatgataatgatgtgggataaatttaggatttcttgaacctgccatgttagaatgtttcttttttttcgatttaatctttatacatcttttcaaggaattagtttcaatttgaaaaatctctgtacctagagaattatggactttaaaaaattgtctttttaattattaactacgccattatttttattgttgttttatgttttgagttctgctttttccccttcaacagg

SEQ ID NO: 8573 - DNA, 6637 bp, Carica papaya
  Intron number 5 from transcript evm.model.supercontig_36.5 0 (locus evm.TU.supercontig_36.50) derived from phytozome v7.0 (chr-ID supercontig_36; pos 412461 to 419097 reverse strand)
aggtaactttaacttggtcatgaggccgtacttaagctaaaaattcagtcaatctaatttcttttcatgctgttgaaaatcaagtaattatagtttctatatcataaatatttacttcctaattagaagatatgacaccaagattgaccatctctttgatttgacttgtcatttactctggaaaatcctttcactaattaggaagatttttttgtgtaaatatggtaatttttgttttataaatacaattcttgtattattataaaaaaccatgaaaaacacaaaattttcattcttcatggtattagagcaattctctaaaacgagaaactttttcctccttgttcaatagcctcaatcgtctctactatttcatctcaatctgttactaactctaatggaggatttgagtccagtgcctttatcattactggacacaaattgaatgaccataaccatcttcattggttgcattcagttatgatgttcatttgtggtcgaggaaaagatgactacattacaagtgcattcactaaaccaaaatctgaagatccactctacaagatgtggagaactgaaagtaacatagtcatgttatggcttataaatttcatgaggaatgatgttggagagaattattctctatgaaacagcacaaggaaatctgggatttgcgcgtgaaacctactcagataaggaagatacaatggaagcttttgagatggaaggtatcctcaatgacctccttcaagagaacctctcagccaccaatatttcaaccatctgtgtaggtattggcagcaattagatgtgtatgaaactactcaacgggactggccaaccgatgcagccaagtataataaaattgttgagaagaaatgaatttatgagtttctgttaggatcgaaaaaaaccttgatgaagtttgtggtcgaatcctaacaatcaaacctcctcctaatctgcaagaggtactagctgcagtctgataggaagaaagcaggagaaagggaatgatggggcctgggaactagtccattaataataacgattttgcatcacaaagaactaaggacaagcacaccaataaggaaaggccatggtgcaagcattataagaaacttggacacacccgtaacacctactggaatattcatggaaaaccacatgatatggaagccaaaaaccaagagggagggatgtgcaaattatactacaaccaaggaacaatcaaaccaatttgactaggagcagttggaaatcattcaaaagctgcttgttgatgcacgaccgactttttttactccaaattccagcccttcaggaatagcaaatgtgaggcacaaaggtattttttcaataattctcaaaacttatagggtggacaagaaaaatttgtggatagtcgattatggagcctctgattatatgactggtgatgtatattttactcgaaatgtcgctacttttcatgaaaattttattgtcgatatagctgatagattggtctcaaaagtgattggtagaagatctatggttatattagaaaacctgaccctcaattcagttttatttgttcaaaatctagactgcaatttttgtcagttagtcaacttacaagggaaaaaaactgagtcactatattcacctctaaatgttgtatctttcaggatttaacttcgggatggatgattaacagtgtttaatttggaactttacatgctcaaaacaaccgaacctcatgataattttttaatggaaagaagacaatgtcaatatagctgatagattggtctcaaaagtgattggtggaaggtttatggttctattagaaaaccaccctcaattgagttctatttgtgcaaaatctgaactgcaatcttctatcagttagtcaacttacaagggaaaaaaaattgtcgctatattcacctctaaatgttgtatctttcaggatttgactttgggatagatgattaacaatgtcgaatttgggactctacatgctcaaaacaactgaacctcatgagaatttttttgcggaaagaaaacaatgtttctttgccatcaagaataaaaatagtgaaataatattatgaaatcatcgtttaggtcattcaaatattctgtatctcaacaaactctctcattagttgtttaatcataactttattgaattttagtcagaatcctgtcaattatccaaatatgtccgaaatacctatcctatccaataatataaagaatcaaatctcatttaagcaattcatattgatgtttagggaccatacaaagtcaaggtttgactggaataagatggttcataatgttcatagatgacaactcacactttacttggggatttctaatgaaggaaaaatccaaggttgtaaattgttcaagttctcaataaaatagtgcaaactcaattcaacagaaaaatccaaatcctccacacagataatgccaaagattatttcagttttatccttggaaatatttgatcgaagagggaattatccacaaaaattcatgcattgacgctcttcaacaacatagaatagctgaaaagaaagagacttgtattaggaattacatgagctatcatgatttagtctcatgttccaaaaattttacgggggatgccattctcactacagcttacttagtcaactggatatcttcccatgtcccacaattccattcaccttgtcaagtcttcaaaagtgcctatccatcaacatgacttgtctcatcaattcttccaaaggtcttcaagtgttgataatttgtttgtgtttctcaacaatttagaagcaaatttgatctccaagccataaaatgtatcttcattggatatacgccaaatcgaaaagaatataaatgttattctctggttacccagaaattctatcactttatagatattacattttttaaaaatgaaccattttattctaagaatgatgttaagggggataatggaaatacgaaagaaatttttttttttttggaaatttgggagcaacacccaaatacaagatcccaaatttgttgagtcaaatcctcctaagtctattgtttccccaaacatcagttctagttcgaaaggtccctttcagagtatttctccaaacaatgagaagaactcttaatatactcaagaagacagaaaagccagacacttacgcaggaacaaatgcacgaaagagctagtcatgaagctggacatgagccattttgggaagagacaatcgggtaaaacttctgacaagttgacattacaagatctcgatttaccaattacttaaaggaaaagagtcaaatctcgtattcatcatcctatttacaacttaatgtcatataagaaattatcacttgaatatcatgctttttctactaaattcatggaaattcaaattcctaatagcattcaagaagccatgcaagatcatgagtggaagtaagctgttattgaagaactcaagacaattgagagaaatagttcatgggccttgttcattaacctttggaaaaaaaacctctgggatgcaagtggatcttcactattaaacacaatgcagttgttaacataggcagattcacgggatagaaaaaacatttcctttctaaagggggcgactgactttgattaaaagtacttctgtgaatctccctatttattacttgtcagtgttgactatcctggtcaaaattactaagaaattagagagtattcaatgtagcttttttttggaggatgatgacagtaacagaaaatatcatttgcgtcggtgggatgatgtgaagagggctaaggggaaggggggcttggggcttcggtctttggtggatttaaacaaagctttgttggggaagtggttatggagataccatacggaggaggggttgttgtggtttagggtcattggggcgaggtggggggacatggtgggaagagagagtgataggaggttagctaggcctcatgggatgggtctttggaagggtatttgtttggggagggagaagttctttgagggtattaagtggaagattaggaggggcaacattattaatatttgggaggatgagcggttgggaaggggcagcctgaaaaatctatttccaagagtttataatttagtgttgaggaataatgtggtggtggaggaggtgtttaggggtagggatgggagaagcgggtgagatatcgatttggttagaaatctgaatgactgggagattgacgaatatacaaggattcttcaagttcttatggatgtccatttagatacatgtaatgataaagctacttggaaattcaggaaagatgacgcttttactgtgaaattattttatgattacttgacgtccaaagaagataataaactgaattttcttgacaaacaaatttggaaggctaatgcaccttcgagtattgcttttttttgcttgggaagctgaacaggagtgcatccttactattgacaagttgatgaggaggggacatattatggcgaatgggtgctacctttatttggaaactgttgatcatgcaaccatcttcttctgtagtgttcggtgacatatagtctatggcatatggtgtatagcttactgggtgtaaattgggtgattgggagttcggtaaaaaatgaattgtgggtttaggacgggatggagattagatataagttttctaaattgattcatttgtctatcttttgggttatttggaaagagagaaacaatagagcattcaattggtgtgtgagagatattggaagaattagagatagatggcttcacttttttggatctctaattctgggtcatgatttgtatgggtggaatgattttggaaaagttttaaatgttctaaccgatttgtaaataattttatataggagtgatactccattggtgttacatacgtagtatacatgcttttattttttttaaaaaatatataggcagattcaagacttgtttcattgctaaagtctttactcaagcctgtggtattgactactaggagacttttatactcgttgcaaaacttaacaacatttgagttctctcgttattggcaacaattctgattggaagcttcatcagttagacatcgagaaagtctttttcaatggagagtgagaaaagaagtgtgcatggagatccttgaaggtctcaaagatcaatattaactcaaacaaggtttgtaagcgaaataatctctctatgctcaagcaattgcccatagcttggtttaagagattttctaagactgtaagaaattggatatgtccaatgttagtcagattgtaccctatttgttaaacattctcctagttgaaggatagctatcataattgtttatgtagatgattttatcttaacaggaaaccatgaagaggagattatagaacttaaaaaagttttaactcatgaatttgaagtcaaagacctaggaaatctaaaattttctttggaatggaaattataaggtctcaattaggaaggtggtttcacaaagaaagtatgccttttatttactcaaagaaataggaattttgggttgtaagcctgcaaataccccaatagaagcaatcacccaaggaaaaatgaagaagaaaacaatgaatcgactagtcatctacctcttacacacacgaccagatattggctttacttttagtttggctggtagttcatgaataatcctattaaagaatacatgaatcgactatatcatattttaaggtagttgaagaaaactcttggagggcttcacttcatataagactaaacaagaatatcgaagtgtttattgatgcatatttggtaagatctagtattgattgaagatccactttaggatattgtatttatgtgtggggaaattttgttatctggcaaagcaaaaaacagaaaatggttgcttggggttagcggaagcagagttcagagctatgaccaatgtgatgcgtgaaggaatgcggttaaaatgcttactcagtgaacttaacattcaagtaattggtactatcaatatgatgtgcgagagccaagttgctttaagtatagctaagaattctgttcgtcatgataggacgaaacatgtggaaatagatggatactttatcaaggagaatttagaagggggaataattaacatctcctatgttttcactattcaacaaagagaagatatttggactaagatgctagcaaagacaaattttgaagatatgaggtccaagctaggcttacatgatatttactgcctaacttgaaggggagtgttaaaaatcgagtaattgtagttgttatatcagaaatgtttacttcctaatttagaagatatagcacaaaggttgaccaaacctctttgatttggtctgcctttagttctggaaaatcctctcacttattaggaggattcttatcaaacctctttgatttgatttgtcatttgttctggaaaatcctctcactaattatgaggatttttttgtgaaaatatggtaactattgtattgtaaatataattcttgtatcattatcaaaggcaataaaaaaatacagaattatcattcttcagttaccttcggaattgatcaggtattacaatctc

SEQ ID NO: 8574 - DNA, 3577 bp, Carica papaya
  Intron number 2 from transcript evm.model.supercontig_62.1 42 (locus evm.TU.supercontig_62.142) derived from phytozom e v7.0 (chr-ID supercontig_62; pos 891887 to 895463 revers e strand)
tttgctgtaggacccttcagggacacactggcaaggtatttttctttcgaatttgtttatatcgtgtttctgtacctgtatgtatatatgtatgggtgtttatttgtatgagttttgcgtctagtttactgagtttttcaattataaggttgccgagtaatttacttctttttctaaattatgattgttatgcttcgacagaatgtatgtaagttggtgaagttagaaacttcgtattacgcggcaaataaagtttttggagaaagtttagctttggatttggaaattataggatctataatggaaatttcgaatgtaaagtagctcaagataaggggttagtttctggattacgactatgattgggtgtagtaaataaagccaggatttgtactcttcaaaaagaaaaaaaaaaaaaaaagctaggagttgtacgttatgatccctttgcgataaaatttggaccttcatcacagtttaaaatgaaatttacttacaaaattaggagctgctcatatccctttgatcagctggggtaatttaactattaaagccaggagttgtatgttatgatccttgcctgataaacattcaagcttgaccgcacattcaattataatgttgccaagtaatatacttctttttctaaattatgattgttatgtgtcgacagaatgtatgtaagttggtgaagttagaaacttcgcattacaaggcaaataaagtttttggagaaatgtaaagtagctcaagataaggggttagtttctggattacgactatgattgggtgtagtaaataaagccaggatttgtaatcttcaaaaaggaaaaaaaaaaaagctaggagttgtacgttatgatccctttgcgataaaatttggaccttcatcacagtttaaaatgaaatttacttacaaaattaggagttgctcatatccctttgatcagctggggtagttgaactattaaagccaggagttgtatgttatgatccttgcctgataaacattcaagcttgaccgcacattcaattataatgttgccaagtaatttgcttctttttctaaattatgattgttatgcttcgacagaatgtgtgtaagttggtgaagttagaaacttcacattacaaggcaaataaagtttttggagagtttagatttggatttgggaattataggatcgataatggaaatttcaaatgtaaagtagctcaagataaggggttagtttctggattgcgactatgattgggtgttatttgactagtacataaagccaggatttgtaatcttcaaaaaggaaaaaaaaaagctaggagttgtacgttatgatccttttgcgataaaatttggatctttaccacagtttaaaatgaaatatactgacaaaattaggagatgctcatatccctttgatcagctggggaagtttgactattaaagccaggagttgtatgttatgatccttgcctgataaacattcaagcttgaccgcacgttcaattataatgttgccaagtaatttacttatttttctaaattataatagttacgctttgacagaatgtatgtaagttggtgaagttagaaacttcacattacgaggcaaataaagtttttggagaaagtttggctttggatttgggaattataggatcgataatggaaatttcgaatgtaaagtagctcaagataaggggttcatttctggattacgactatggttgggtgttatttgactagtaaataaagccaggatttgtaatcttcaaaaagtaaaaaaaaaaaaaaaagctaggagttgtacgttatgatccattcgcgataaaatttggatcttcaccgcagtttaaaatgaaatttacttacgaaattaggagctgctcatatcccttagatcagctggggtagtttaactattaaagccaggagttgtatgttatgatccttgcctgataaacattcaagctttgactgcacattcaattataatgttgccaagtaatttacttctttttctaaattatgattgttatgctttgacagaatgtatgtaagttggtgaagttagaaacttcacattacaaggcaaataaagtttttggagaaagtttagctttggatttgggaattataggattgataatggaaatttcgaatgtaaagtagctcaagataaggggttagtttctggattacgacttgattgggggttatttaactattaaataaagccaggttatgtaatcttcaaaaaaaggaaaaaaaagaaagcaaggagttgtacgttatgatccttttgcgataaaacttggaccttcaccgcagtttaaaatgaaatttacttacaaaattaggagctgctcatgtccctgtgatcagctggggtagtttcactaataaagccaggagttgtatgttatgatcctttcctgataaacattcaagcttgaccgcacgttgaaataaaatgagcttacaaaatttgaagctgctcatggacatgaaaggaggcatttcattggctccaaccataaatcatgaggtcattgcaattctggaatctgatttgattaaccatttcgttgcaacctgtttaagagttcaaggaatgatcatcttcaactaccagaaagttcaattctttttttaatgaattctttttttttaatgaattttagtgtataaacactcaagaacctttgcaatatcttagataatgtactaatttaaacttgccaccagatggatctttgagttaaacacttactttgattctttgatataaacacttccctgtttatgagtgtaagttgctttcatgaaagtgatatgcctgaccttgcattaagttaggaagtagaagttataggcattacttaaaaatttaatctgccttgctactacagtgatttatgattgcattcagctgtctgttatttgtagccacttagtcagttcttagttatctttataactcgttgcttgttttccgataatgtgcatattatgtgatccatgtcaacaaactgtttttttggttgtagtaaatgggtttacgaccatggacctctacctttatacggtgagaagcgatcaaataggctagcctagtgattcatctaaagaaagattctatttatgtataatcagtgtatcttgtgcaaagctacttattactataaatgttttagttaaaaattaagtctgcaagtagattgctgatatagcgaacaggaaaaggaagaaaagaaagaaaaaccgttttgtaaaaattaggagccagaatagatttcctcattcatgagagcatatatgaaaagcaggagagtcctacagcctggcttaatcatattttacactgtttatttttagttaaaatgaagaattactgcagtgaacaaaatgaatatttgaactcggtactcggagtatttaatttctttattgatgcatatggaacctgcaaaaataagtagtctattttttctcctaagacgattgctacataacactgtaatccctaagaaactttcaggtatactcattggattggactaccgagaggaatcg

SEQ ID NO: 8575 - DNA, 6118 bp, Carica papaya
  Intron number 7 from transcript evm.model.supercontig_23.1 57 (locus evm.TU.supercontig_23.157) derived from phytozom e v7.0 (chr-ID supercontig_23; pos 2292386 to 2298503)
cacttgtcgcacaaggacttaagtgagtacttttcttggctagatagcctagattcagtagtcaacccatagaaagatgaatacctgaattttttgctttgttcatatattgtatgttctatttacatcgtgtattcttgtagaattactaaataaagcttatgtctgtttagattcgtttcttattttatagtagccgaataagtaggatccatatttggttatgggatccacaaaataagggtagatttttttctttcctaggattcccagagtatgatgattctttcctatttttttgctgacagttcgtgtgaccctctcctataggtatgtagttatggtgaatgaagaaggtaagaaaaaaaagttatcaaacatggtattatagccacctctgaaccacttccaataaaaccatatcaaatgactaaatacaggatcacaagtgagcacaccgcaacagccaaagtcacatcccatctgagaattttccagtagggactaatggaggaatagacaaccccgacagtgtccatcactggcacatactaaatggccaaattatctttcattatcccaatcggtgatgatgtttgtatatagaaaggggagggatgtttatctcactggagttgcagttccaccatcaaaagaaatccagaatagtggacttagaaagctgagaacaacatggtcatatcctggcttttcaactcaatgaaaaacgagattggggaggatttctttctgtttggatcagtaaaggaggtatgggatgcaacaagagagacttactccaaagtagacaacttgtctgatttatttgctgtgaagagcatacttcatgatttgcaaccaagggacctcagtgtaacccaatacttcaatatattgacccaaaatttgccacaactcgacatgtttgaagagcatcaatgaaattgccttgaagatggcttaaagtacaaatgaattgttgagaagaaacgtttatacaagttcttgcttagactcaacaaataacttaatgatgtgcggggaagaatcctgggttcaaaacccatacctcatatccgcaaagctttctttgaagtgcacatggtggaaagccgaaagaaagtgatgctcggaacccctaattcatcgcaaatcactggaagctctgtccgtgctactctaaataatcggaaactctagggagagacgaagtaaaagaaagggtgaccttggtgtaaccattgtcgaaaactagggcacacaaaggacatttgctggaaacttcatgggaagccagcatatcagaaacagccccaggacctgacagaactgagggagattcaccacctcaactagaacactatttagtaagcagcatatggagtttttgcagaagctgatcaacctccaccaaataaatagccccctaattggtattgtcttagtggctcatgcaggtaattctataactactataactatcagccaaaaattaaacaatactttagattctggagcttcagaccacatgacttgtgattttcgagtctccgaacttataactcttgccacaataatatttatcctcaagagtaactgtatccaagaacagttttccaattttacatcttatactaaggatgaaagtgcaattattttgtggtactataaactagggcgtcctaacttcagttatctacaagggcttgttccctcattattcatcaataaagattttaagaattttcagtgtgaaattatcaatttgctaagcatactcataatcctatcaggttcaagcttatgaagaatcaagcccatttttaattattcataatgatgtatggggtctattaagggtaaaaaatattacatgagcttgatggtctattatgtttatagatgatcacattagaatcacatgggtataccttatgaggataaatctaaagttggggagatattccaaaaattcaacgcaactctctaaacccaattctatatagacattcagatacttagaaaaaataatgtcatggaatactttaaacatattcttggaagatgtctacaaaaccaacgcattatagaccaaagttcatgcattgctacatcccaacaaaatgaagttgcagaaagaaagaatcgttacatccaaaggttgccgggtcactcacattctcaactcatgttttaaactatttccaagagtaaagtcatactctaccttatcaacaaaatatcttttcaagtactaaatttcatagcacctagctaaatcgtaatatttgtacaacaatgtgatcaaaaactcacacaatttcaattagcatcaaaaacttaatgttaatataaaccctccctacttaatccataattaacctatgattgaaaataaggtaataaggataaatgaatttattaaaacgttataagaaaaacattgataagttaaaatcaattcagaaaagagattgatgaaaatgccacaagttatcttaataagtaaataccaatttccctcttaacaagaaggttgaagaaacctcactagttgacaagttaaaaactttgtattttattgacttcaatcttgaataaatacaactgtgaattgatggtgtatttatagtatggatcatgtgaataataaggaaaaacaattttctaaattaataataaaattacataggaaaataaatataaaatagaataggaaatttgcaacaattaagataattgctttttaaaatatgatagatatgatctcccttttcaaatagagaatatcttaattaattatggaaatgattcagggaggaattaaggaagattatgataggtttggaaaaagattaatttcccctataatcctcccaaaattcatgagattcaatctccctttaaggcataggatttgttttcttctttctcttgatttcttatgcggtttaggaaggaaatcccccccctggttgatttctcgaatgtgaagaaattattttccctttctttgctcacatcactaaaagtcggtaaaatgcatctttattggatacgtctaaaaccagaaggttaccactattattccccaagcaacaaaggttctatatctcaatggatgtgccattcttcaaacaggagctattttaccccaaacctggcatttaggaggaggaagagcaacaaaaatcccagatttgggactaataggggtgaacaaccaactgtgagatcaaacaggtgaaaacaaccaaggtatggaatcataacctacctcccaacacattgcaagaccttgtccttgaactcataacctacccatgaggattgctaaaaacttttgaccccatggctggcaagaatagggttttattgtgtcttcaaggaataagaaagagaatatagagcgacattcattacttgagcaaagccaagagtccaatccgaatgagagttctcatactcaatcggataacatatttggggatactttgagtgaatccatgattatatagagcgacattcataacctacccgtgaggattgctaaaaacttttgaccccatggctgacaagaatgggggtttattgtgtcttcaaggaagaagaaagagaatatcgagcgacattcataacttgagcaaagccaagagtccaatccaaatgagagttctcatactcaatcaggtaacatattcggggatactttgagtgaatccatgattatatagagcgcattcataacctgagcaaagccaagagtccaatccgaatgagagttctcatactcaatcgggtaacatattcgaggatactatgagtgaattcagattgataatcgtccaattgccgtaaggagaggtaaagtcatgcacaaatcatccgttatacaattttctctcatataaagagttgtcacctcaatttaaggcatttgtcacaaattcagataacactcaaatccccaagttaattcagaaagctatgagtgttccagattggaggacagtagtgttaaaggggaggaaggcaataaagaaaaatagcacttgggaacttacagaactatctaaaagaaaacaaactgtgggatgcaagtggatcttcaatgtgaaatgcaaagctaatggaagtactcagagatttaaagctcggttaattgctatgatattaacacaagcttatggtattgactaccaggaaccggttgccctagtagccaagttgaatacagtctgtcttgttatccttggtagctaaccttgattggcttcttgcattttttaataggaaacttacaggagaaatgtacatggattttcctcgggctttgaaatgcaaacaaatagaaatgatatatataaattgagaaaaattttctatggataaaagcagtctccgagaatttggtttgataaatttgacaaaactgtaatgaagcatgggaacacagtcttaaactaatcaaataatatttgtaaaccactcctaggataggaaattagcaataccgatagtatatggatgatgtaatcttaatgggaatgatgaatttgcacgtaagaagctcaaaagtatcctgatcgaggaattcgagaccaaagatctggaaagcttaaatacttctttggggtgaaagtggccctgtcaaggaaaaggggtacagtatctcaaaaaaaaaatagtcatgagcctgcttaaggagacaggaatgcttggttacaaacaagcagagactcctatagcaccaaaaatcaaatttggagcacaaggagaaagccatccaatacataagggacaaatatcaagaccagttagaaaattgatctatctcccacatgcaagacctgatataggatttctagtgagtgtaatgagttagttcattaataacccattgaggaacatttagggtctgttaatagaatcctaagatacctaaagatgacccctgataagggattatacttcttcaagaactctaggagagacgtgggagtatttgccgatgctgagtaggcaggatcagtcattgataacagattaacatccgggtattatatgtatacacgtgataatttggtaacatgggaaagtaagaagcaacctgtggtatctagaagtagtccagaagcagagttcaggattatggttctaggaatctgtgaaggaatttggcttgattgtgtcctaaaagaattaggaattgaaaactccactccaataaaaaatgtttcgtgacaacctctaagcaataagtattgctaagaactcagttcatcatgctcatataaaatatgttgagatagataaacattttataaaggagaaaatagaagagatcattcatgtgggtacccattcttacaagccaacggacggctacacccctaccaaatatttactgagaaagaactttgaagatctaagttccaagttaggcatgattaacttatatatttctaacttgagggagagtgtagaattactaaataaagtttttgtctagtttagatttgtttcctattttgtaatggccaaataagaaggatctagatttgattctgggatcccacaaaataagggtagatttctttctttcctaggattcttaaaataagatggttcttttctattttctggtgaatgaagaagataagaaaagaattatcaaacaacaaacccttcagctactgaatagaagtgttttctggatatattttttggctatcccgttaacaattttgataatgctaaaatttctctgaagttatgctctattgttgtaaaagttatatttggcaataaaacacacaagtttctctctttttggagaatgcggtgatggagtgttgttggattcagttggctaaattagaggcgtctgtatgatgccagaagtagttcttttgggaatatatgaaagcaaatactttgacatctcttgagtcatgcttaattctgtggacttatacttagttttgttttttcattaattttattacccctgaagaaaattttggctgttggatttacactaaatggtgcattctgatatttgaatacatcctattacacagggtcggtcttgctgaagtacttctcggccttcttg

SEQ ID NO: 8576 - DNA, 3909 bp, Carica papaya
  Intron number 1 from transcript evm.model.supercontig_144. 5 (locus evm.TU.supercontig_144.5) derived from phytozome v7.0 (chr-ID supercontig_144; pos 212230 to 216138)
agcctgttgcagttaagatcatttccaaagccaaggtaaactgccattatctttctcacttgtactgtttcgcgacggattgtgtacattgctctcatttgaacaaaagagtgtttagctgattttgcaatttgttagtgtttttcttggggaatttgttttgggacttcaatttcaacacttttggtagttggtcttgaaggttttacattttctttccccttttctttctaaattttataagttaggatgtgccttaacatttcagcttgttgaaaaatacttaatctcggatcttttatgcgtatggaaaagtttcttaattggtgcagctaatatagttacttcaaaaccatgcatctgctaaggataggtctcaaataataacttgtcttcttcgaaagcttggggaagtagggttccaattttccagatatgtctagttaaacttggaagctcccgtgtagtttggggcttattagttgtcccttttgtacatgtcttatctatagtctttttcttggaagctccagaagaaatatttactcgtcaaaatttgggtctgtgtggtaaggacaggcagttttgtccgtatccattgcgtgcatatagactttatctaactgaaaatagattagctcggtgggcataataggtagtatgaaactggtgatcgtatatcgttgtactatgatcgatctgtagctcacctattactacagatcatctttagatttatttttctaggaccaactgagagcaataactgcagaagagaaagcaagatggaaatattgctgtcagaatccaagagcaacacatggaatctgctgaaaatagacgggatatggtttccaaacatgcaacgtgtacctactggctgcacaaatttccttattgagtgattgatattttccttgcctttttagctgccactgcacaatgaacatatttccggcaactgaaatgacaaatttgtcaatttatatctttgttgctgttcttatttgatttgacatggatcctagatatccaaccaacaagtatgtggcagtttgtatcttggtataaggtatcacatcctgaaatcctgttgaagagctgtctccttatatctcccattctcaatttttactgacttaattctggaaaatgaaaactacatcagcattttgctctggttatgacatgaatacccatcctgaatcttctaagaaaggaacgcccattgttgatattcaattagcatgtggcattgtgatctcgatggcaaaatgagtgttatcccattactctatctggcacacagtaagagggtatgtcttaaatttactgcaatgtcaaatgagattattcatgcacactttcttgtggtctggatcctcattggtgatcatccctgaatataccattaaatttctgccaatttgctttcatggatagcgtggcaaaagtcccataagtatcaagatgatgggatgcatttaatgctattatttgaaacgtatttcttcattatgagtgttccacctaaaggtagactctttgtgtatttattaagttatgaagtacaaaatcacccaatggatttatcaataaattacatggtatcagattaatcactagagaggatcctgaccaccttgagtaatggttgcaaagtttgatgggagtttatgagcttcccaaactttgggttttggacaattcaataaacatgtcttagaagaattttttttttcttatgcaacatgattttaatgttggatttattgccggtatattaggatttgtttttttgtatatgttggcaagggatgactgcagggttatagtgaaagttgcatttgcagttgcagcattaatatatttgtgctacacgtagataataatgtgcatgcacgtatcatgtatgcatgttatatggatgcttgtataagtgttgcattacatcttcaaggtggttaggagccactgaattttctattcatggcaatgccctttgtaacacagggataagcttgcatgctttttgtaatatgcaaaattgctatcatgttttgtagtgttgttacaaccatgcatcataaatacatcatgatgagcatgtactgattggtccattggttcttcttctctgccttaaccaagagggagagggtcccttctcaccaccctgggctatgtgccccctgtaaaggacttgaacaaaaagaaatgattcaggatatttgatggtaagacagatttcattgctgaatcaaggtttgcctagttagatcaatttcttaacctgtcaatctttgacaacattggaaataattatcgttcagtttcaactatttagatatagcctgattttatcaattaccagtagctccattaagataaaagcatgaaaactctgaatttcttggcacgaaccacaactgattgacagctgcgaaaaacaggcaagttgaagggctttggttaaacagtatatcttttgaagccagattatttggttgacttttttctttcttgtctggcttcttccctgttccttctgattcttatatatcaagttgttacatatcttatctacaacttaagaatgtagtgctctccctttgcgtgtttttcgtctcctacagtaacctttaacctcttctctctatcactcggttaagtatatttcaccagagatgttattctagtcaaggcaatgtgagcaatcttccacatgaaggaaactgtagttactagtagttaattttgttaacaacaaatattcacttagaggagtcatagtaaaagtatctgctactgcatatatgaagatgcattgaattgtagtccttttgtgagagatttgacatggtcaaatgtataatcagaaacaagtcagtggtgttctgtttcgttggttattttcaacctatgatgtcttatgcagagtttaatctgtgtagtgtatgattatgtagcattacctgatggaaatttgttggcttgtgttttagtcacttgttctgctaaatgagaaaagagatgcatgaattaatggaaagattcccaaattagaaacttcctagatatgtataaactatttgatagagccatataattctttccataagatcttgaaaagaaatcttacttgataatataacttttcattgaatggaaagttatgaatttggagatattgactgttatattacagttataaactcatcttgttttcataattctagcccctccctttttcaaaaaaataaataattctagtcactcccatattttttgacctgttagataagggaacaactgagcttttgaggtgaaggaacccccttccataagattagatatggtccacttttacatgtttagtggtcgtcctctttccaatgaggagagctcgtatacttagtagatatctttaattgtatatagctaataattttgcatagttggcagcctcttagtgacttgtgaatagcacaatcttcttctatctgaggagaaaaaaaaaaaatgattacgtgatattataccccgtggttaaacatcaatctttcatgtcatggttactgttagcaacttccaattatctcctcctcagttgcgtaaatattccatcctatggtatgtggttgttgtattccttaagttttgtttagcagcttgtactcaattccttgcgatttatttttggctcaatagtagaaattcatgatgcttcctctcataattaaataatgatcaatctcatgttatgtctgtgaagctacaacggatgctctctgattgcttttcttgcttgtccattttattaaagctgggacatcttttcttttccatccaaagtcaagcttttttataatttgtggagaatatactataacaatgcttgtttggcag

SEQ ID NO: 8577 - DNA, 8361 bp, Carica papaya
  Intron number 2 from transcript evm.model.supercontig_66.7 7 (locus evm.TU.supercontig_66.77) derived from phytozome v7.0 (chr-ID supercontig_66; pos 731058 to 739418)
gcatttggagatccaggaagcctttggcagcacaggtaaggtcaaaaatataatttgcttttatgaaaaggcagtgttttcaggttgagacagaaaatattggattaatttttttttgggtaagaattagctatcaagtcattagtctgaaaagctgctttacttctgattgcctactggagaatgaaaatcatggggaagaagtatgtttgtcattgggtaatacacagaagtagttaagatttgtgggaaagggcaatattcctggcaagcttatgggctaaagcacatgggcattatcccaacactagtatctcagagctccattgaaactggggtgcaattatctttagcacgtaggattccgacatttttgcattattctactgctattttgatactatttggagcataccttattctccgtatttgtaactcttcctttctctttctataataaagttttttcttttttctacaaaaaagaattgaaaaaaaggggaactacaatagattcttgtgtacatttgaaagaacaagactagaatagattcttgcatacactatgtgttcttacattcttagtaatgttttttctttaatatattagcttaaaccattacctttttttgtgttttctcaagcagaattatttctttttttttttaaagaaaagattctattaagagcaccaagttggtgcaactcaatacaaaaagatttatggaatttacaatcccctatatctttaggaaggagatgagatgccctttaagcaaaatgcaaaatattccaaatctttggtttctgatctcatgaaaagggggatgaggagttgtcataagttctattgtttcgctatttctagataatccaaaaaataaaatgaaaaaattagagataatcttcttaaacttgtgagaaccaatcggtgagagatgaggtttggacgtggagagacatcaggaggaggaggaaagaagtggacttaatacactatacaattatttcaaaatagtggaaggagaggaacaaaagggtttttgatgggggggatgatgtaaatgggtttgatttacttaagaatatatggttccagatttttagttttttgttattaggtcattcttcacagtccatggaggatttaggggatcgaattgaatagttgatagatatataaattcttttatacatgggatgacatccccttggcatccatattaatattacacttcacgctttttatttcgaaaaaacttgtgagaaccaatagcaccccatgcccataacttgtctttaatagaagatcagtcatgcaatagagataattttcttcttaaacttgtgagaatcaatagcacaccatgcccataactcatctttaatagaagatccagtcatctaatagaggctgagaagggaaagtgttgaatctcataatcttctagtctcaagacaccaaaagaaaatatgcagggaattcctccttgttcatacattagaaaacatctcttggccaaaagtctcccttttttcatcagattatttgaagttagaattctacaccgagctgcctcgtaagcaaaaaaggcaatgcagggtgaggctttggttttcaatacttgtttgcatggaaagtaatctaaaattatcctcataacggtggttgtagcctgacttaaccaaaatgggataacttggcaatttatcatcgaggtttcaaaggagagggatattcgacctaattccatcattatacgcttcaaaatgtccatagtgtttgctttcttcaaactgacaacgtagaggatatttagcaagatgtctttgaggggcccttcgtcaatccgatggtcataccaaagtcttaactttttttctctcttcccaaccacaaatttgatgttgtttggaaaaggtttccaatttttgttgaaccatctcaatgggctacacctgtacacgcctttgcaattgttggttttccaactactgttatcccagccatattttgcaacaatgaacctcttccatgaagcactatcctctgtgatgaatctctacttacattgagcaagcaatgccttcttgaaaacaccaatggatttactgttcaaacctctcttacccagtaaatcccatgcgaccaagtgaaatttctatacgtcatccttgttccacccgtggaaaattactttgtaaggtatccattattttatcattcctagcaagaatggtaaatacggacaagaagtaaatcgaaaattaaaaagggcataattgatgaaaataagtcgccgaccttttggaagagagcatttccttcaactggagagtctcttctccatcttctttccattcctattttcatttctatttaaactgtagatcttgcggaagatgcatctggctgggaaggagaacaaagtaactatggatatgggaatgcacttaattattttttttaaaagaagaaaaaatacatgttcaagtgatgaatttatatatattatataattaaatattattcagagggaggagaaattaatataggggagaaaggataagatatccttccgcaaaagcaagatcagataaaacaaagaagatccttgtatactttttctttttaaaatgaaaaatatgatatgtatcattaatacataacatcaagggggtgctaatccatgtacaaaagtatttacatgtcggttagaatatcaataaaatcttcaaaaacctctataaaataaagagaatgacccataactaaaagtctagggtctagatccatctatctcttaactctatcaaaatcattttccaccccttcaaaagctctcttgttcttttctttctgcaccattcaaatatagtaaggagaatgagacccgcatgctttttttcaccattaatagccttccaagtgcaaatctcaatccttaccgtaccagccattgtccaactaattctcaataaactgtacgccatggtccataacttgtaaataaacagacaccaaaacaagatgtgattaaagactcatctcccttcttacatagaaaacaatcattcaccataatctttccctttctcattaacttgtcaatagtaaaaatacacttatgccctgccctcttgcttagaaaaaaaggaagatccttgtatgcaagagaataggccaatcccttttttaatgagataaggaaaatctttgaaagaaataatgagccttaaccaaagcaaattgtatcttttacttttcgaccataagatccatgagatggcgaaaacagtcctttccttgtttaaaacacgctttgctcctttctcccaaatccacacaaatttttagagataaatattttaatggttaggggataaacccccaagaacatcacacgatcaaagctctggtatgaatgcagcccttaggtttatcttatgttgataaatcttgttttgggaaccactttgctgttcataacatcacttcgtccaatccaaagtgccttgctcttacgcacacatttaacgtagcacaaacgcatgtcggtcctcttcttagatagcatcaataggcgacgacacttcctagtggatgtgaactttcatgcaaccagcacgaaaatgagaatccagtaaagctttaagcatataaatcagaatacctttatcaagaagaggtaggattaaggacgccaatgcagattcatgaaacttcttcaaattagagacatagaaagtaggatgtaatgagaagcttccaggaagctgcaagaggtgttgcacattacaaatttgttgaggataggaaagtggtgtaaaatcatgtggacaacttctcattccttttagagccaagagaaaactgtaagaaaagttgtagccaaagcaagaccaaatcacccaccttaaaagagatcccaatgccctccaccataatattgttccatggaatgtttagcttcaatgagttggtcttgcaaaaacaatggattttttgctggtgatcaacttcttgatgagggtgaccataaacaaccgcaaatggagtagtttgtccttaagaatggtatctcctattatagcaacatcttgcctaggacacccaatcaacttattgacgaggctgatcaccagtgaaacaaaaaagatgcatttcaataatctgactaacatcttcagtctaaccatcgggtaatccatacagattcaagacatgatcaaagaaaagccgagattcagagaccacttgtaaggatgagaaagagggatgaagtgggcgtactttgaagaacagtcaagacctccgataaaacttgtttcccctgtgaaaatgtcaaaagctccatgaagtccaaagaaatatcagcccgaatttgaataggaacagtcaaaggtggaagaaggctcgcaggttgcaaaagctccaccttgtgacttggacaagtaggtcaggcacaaacaaaatcttgagactgctttcacatgcctctccagtaaaaatcagacataaggcgtttcaacatctcttgataaccttcatgagatagaagatggatggaaaaaatgataacagaaatgagagaggatgatgagacaaatatgctcgatccttgtggaaatgagaccatcccgtaaaatccaatgtggacctgaggtgaccatgttagatttgttggttcaaaagttgtaagtccaaagattggatgacctcctgatggatggcgtcaaaggaatttagttgagaatggagcagatagagttaaaaatatatgttacctagataaagcatttgccacaatatttcctagtctgggcgatactccactgaagttgaatcccattaatttgctgatctagtgttactaaggagaagtgacgattctttgttccaacaaaatttgaagttgcaatgacctgttcaaataaaaaaactgtgcctcaaaaaatatggtctccgatgtcgcactggctgaaggaacctggttaattctctcatatgtgagaagatgcaaattttttgtgctaagggcctgttagaaagaataggataatccaactgttggaggacaactccagttcttgcatctgaagcatcacattcaactacaaatggttgaaaaaattcgaggaaaagctaataataagtagttgatactgcttctttgagtaagaagaagggtggtttagctagtttttccggagcatggaagtgagagatggcatgacaacttcacaattgtggacaaacttgtgataaaatactttgagaccagtaaaacccttagtgccttaatggactgcaataattgctaattgagctgccttcaccaattgtcaatcctttttctaaattgatatttcccaggtaaccagttgttgcccaaagaaagcacttggattgattcaaagaaacactgaaaagaccatacaaagagggttttgcatttgcttttttgaagtaaagggttttgcatttgctgtccaccaagtattgtaaaccaaaatgtaattaaagaacacaggaatgaacttccacagtagaggtagagaataggattcatcaaggcttagaaagtggaaagagcatttgttaaaccagaagacatcacttaaattcaaaagcgtcttagtgtattatgaaaggtgcttctttgctatcctcagaccatatttggctttgataataacctgaaggcaaatccaatttaggaaagaattttgcaccatgtaattcctgcaacaactcgtcaattacgtgaatgaggaacttgttattggtggtctttgcactaagagccaaataatccatgcaaaaataccaagagtgatctgtcgattcctttctctaacatgccttgacactgtcgatttatctcatccttttggtgatgtgggtagcagtataccaaaatataacagaggcagtatctgagtcgaacaggattttgtgatcatagtcacaaatgagaagcaaagattctggtaccttaagcagaattgccaactctaacaagagtgtctgtaagtttgtctcttcatcgaaggctattaaattgggggagtatattaggtactccgattcctgagtctcagatgccttgtaattcgacttcttggccattgcgatctaactgcatacacagaagaaaaatcccaagtgatagccctgagagccacaaacaatatgcagccaacacaacctcaaaacctataaatttgatgaggtaagatcaaaattcaatttgatgaggtaagatcaaaataaaagtccaattttcatgtagatgtggacccatgtacagataccgttgcctcacctttccaccattgaccaccaagactacaattgattcatattctttcacctttaaattcaagtggcgtgcaaaagatacatctaagaaagaggaaatagtaccgggatcaacaacctcagaaatgccctccagaaaaccacatataagtatcccctgaggagttggactcttagtgatggtctagagtgatattacaacctcctctaattttgatttttgcaacacttcctcttgggtgttcatttggcttcctctctcaccatttccagccaaaacaatctcttactattgtactttggcatgaaacggtttcacagttagattagagtcctttgacacgtcaatcatcaaactcggaccggctgaggtgttttgcaatcggtggccaactcttgagcttgcatgttctaattttgtacggaattcatatatgctcacttgttatcattttagtaatttgagaatcctataaccaagtataaaaaataaaaagcaaaactccatgtagcatataaaaatagtttgttatttttcttttaagaacttacatgttatagatgtatttgttcatgaaaatatgcatgtatgtgtttatggggtaactaggtaaatggaaaaatttgtggaaaactaatttttcttttcaaactcttttgttttcatgattattttctaaatgttattaagatttttaactatattacatgtttaaataaaaactagaaatctgcaatatgtatacaggcagtattcccttgatactatgtttgagagattgggttatggtggcaacatttttgagagatgcttgggatgacacgtatcctggagaggaaattcaattctggcagggcgaacgggcaggagattttaaactaaaagatagactccctagaatttattctgttgcctgagataaggagatgagggtgaagaaggcttatgagactattggtgggggctgggtttggaatgtgccgattaaatgtaacctgtaggattgggaaatggaagagtatgtgaacttgctgttgtgttatctaattttaaattggccgagcacaaagataaaagtgtatggaagattgacaaaaaaggggcttctctgtaaactctttttatgaatttcttaccatgagagagaacaacgacaatctgacagcttctttcaagcaaatttggaaatctaaagccctacctagaatcggattctttgcttgggaagcagctaaagatcggatcttgacaattgacatgctaagaagaagagggaatgtgttgataaattagtgctatttttgcaaatctgatgaggaaacctgttaccatttgctgctgggatgtcctgttacatacggcatttggtcttctgttttgaggcttataggggtgcattgggttatggcaggtagtgtaagtaaagaactttgggattgggagggtttgtgtaaaaaaaaagtgggaacatttatttcttgtcccatttactattttttgggtgatttggaaggaaatgaatgttaggcttttgagggtgtagagacttaattttgttaacattagagatggattttacacatttaaatctattttgttaggtcataacattaaagagtaggaagatatgggggtggtcattggtcaactgattgacttgtaactattttgtatatggatggtactcccttggtatcttatgcagaataatacttaatttttatttttttaaaaatatttctctcacactcttttatttcaaaaataaaaaataaaaactagaaatatcttcatgaattgagtggcgccaaatattctcaatgtaatcttttttaatctatattaccttcaatctctctgataatctctctgttacctaatttgtttgtctaattgatactagccttttcaattgatactttttttgtgaatgtctcatgtggtgtaatattttgtgggaaattatggtgtgagctagttgtgggcttgattaatagattggtttttcctgaaatttttatcattggtcctgcag

SEQ ID NO: 8578 - DNA, 1403 bp, Carica papaya
  Intron number 1 from transcript evm.model.supercontig_682. 5 (locus evm.TU.supercontig_682.5) derived from phytozome v7.0 (chr-ID supercontig_682; pos 23358 to 24760)
agcagttgattgctggatttgtgctccagtactctgtatgttttcttcttctgtatatttatatgcttttactgcgaaaccatctgcgtgattatacgttaatgggtgttaaattattcttcattctatgaaaagttcatacttaatcctgctgctggtacttttaattattcattttaggattgggaatcaaatccttcattcatgtggatgaataattacccgattgcctagcattttaactgggtgaacgagggacttcatttaattgcatttgttatggcgtccattctgaggttttcaggttgataattctgtttcactcaataatattgaaatgctcatatctactgcttcactttgtagcttcggtttccttattgccctagaactctttttttcctgcttgccacaataattagatatagttttcctttagctatatttttcatatcttgtaagatatatctttttgaaactttttcatggttagacacgacagcctttttaattttttctatcagttgaaattctcatgattttctgtattaattttccaatccatttaacttattatcgtgtacatgaaggtcattgatactacatttttaacaaagctgatcagaagctttaatataactagagcgttttttataattaatatcttatgcatggaacaaagtattattctttatatcggtaaacatatcatgtcatggatattgatgatgcaaaatgctttgtacatatgatgttatgaaagtggacttgaatgatataatattaacattgccaactgttaagactaatgggtagaatctttgcaaccaatcaaattagtataaattggatgtgcgacttaaacttggagaagtcaattttcaagcatcttacatcttccattcccactcctctccttcaagtttaagtatttggaactcatcttttgacaaagttgctttcacacacgcccattctttcactgagcttagattcatggagtaggagactcaacaattttctcttacctcttttcagagcttctacatttatatccgctgcatttctctgtttataccttgagaacaaaagaaagtagtaacttgtggaatatttaatttaccaatgttaacaatcaattgaatattttatatttctagacacactggtctctaaatctgattggtttgtcaaaagtactagaagattcactgctctgcttacatagtttcctctagtgccagttgcattaataatattctgaagccattctttgctttgtttatatcttgaaatcctactatattttctggagcaaaaagcttactaggttggaaaaatctgtttttatgtgctctgtactgaagtgttatttaggaaaattttttggttggttccaggtg

SEQ ID NO: 8579 - DNA, 1180 bp, Carica papaya
  Intron number 3 from transcript evm.model.supercontig_95.1 5 (locus evm.TU.supercontig_95.15) derived from phytozome v7.0 (chr-ID supercontig_95; pos 352102 to 353281)
gacacggaaggtttgcttggatattgatcactttcaactcaaagtttatgctgtcatttttttcattaatgtttaatttatgttattccaccttaacaagagagattataatcttggagatgcataaataacttcctttcttttcagttgttggcagacaaaaatatagataatggttgagaatccaaatactgagcgtgcattcatgggcaggcattctgaaccaaatattttagttttacctaataataccgaataagttaatcatgatcataaatcacattgagtttcctagaactattattctaatgcaatattggcagatttaagatatttatcttgataatttttgttacaaatgtgtgcaatctagaagaatttattgaacttgcattcagagatcttgcaatatagaaaacttttatatgatattttctgacagtaaaatgttacatatgctttttaccttttctactgtccgctggatgtcaagaagttagtaatccttgaaataaaacttaatagtatttcgcttcaaaagaattgatggattggaaaaaatctactaatattaacattatgacggtgctggcccgtcattcgtcagtctaatctttcttagagagagtccatgacaataagatttttcagctcataagtttctttatttgattagtgtctttttgcaatttatagatcttttattcaagttcccagcagtgatattattgttcattgcgatggaagaatgtcttgaaattatgtgttcatacccaatcacaatttcaattcatactgacatgacagattaatatttgtgattgtaatataatggtaattgtatcacattcttattttttataagaggaccattttgagtcattaaaatcatatcaagcaactagttgatttgaaggtttaagtggattggaatgtgcctaagatgcacttgacgtaataaatgagaggtagaaggtaccgtgctacttctgttactctaatcctgaagaatgcttctcaatgtatctgtataataataggctttaaatcaaagaatacgacatactgaatgccttgtcctcatcttattttctcctagaagtatctgatatctttttcttttttcttttaattaaattcttggataccagtcacacagcagctattgcagctggaaata

SEQ ID NO: 8580 - DNA, 4299 bp, Carica papaya
  Intron number 3 from transcript evm.model.supercontig_1.79 (locus evm.TU.supercontig_1.79) derived from phytozome v7 .0 (chr-ID supercontig_1; pos 1507993 to 1512291 reverse s trand)
cattggatattctggggaaacacgtaagttgttgatgccaccttagttttttctttttgggtgaggtgccaccttgctttattattcagtatgagttgactttcggagtaaggtcttcagcttcacatacagctttctgcattttggctttcaaatccagtgatataagtcgataactttgttttaaaaatatgttttattgcgtccattttagaagttggaaagcttacgaatattgtttcttccagagagttttctggatatgtattaaattctaaacataggaggattttctatataactataggttttattgaaaagcaaaaagttttcagttgacccacatttttgttacctactaaatgttttctcatataaaatgattgaaatcctgtgcaatgcttttgaaaagcattcttaattctccacactttctgcttgctattatagtgtgtggatgcttggtgtttaaaatggtgtttgggactctatataaggcttgtaagtagcttaaaaaaatatggtactcaatacataatgagtaaactgcttcatagttgcttataagtagctttaaaaaagcaccttttttttttgaactttttgtgtgttgcttacaatgcttatttcttaacatgattatttacttatttcccctttgtatgtttgtttttttaatagatgtataaaacatagttattttttaacaataaattttttaacagtaaccatctttatcatttattttctaaattagtacctagatgctctaagctcattttttcagcatcctaaatactctctaatccagtattacgtgattttgacataatttgggtgaatgggtttggatgcctttatgaggctttcattttaaaccatatttgtataaataaaaacaagctatttaataaagtgatagtttcagctgtttacaagctttgaagttttaaccgtttatcagaaaacatacaaatgtggcaatatgctatgcatatcctcttagtagttggtgacctattacgctttttcagctcctattgttgtgcattgtgagaactagtttttgggtatgttaaggtatcgtaaagtgtggacttttgttttgagattgtcaagaagcctgtcctgatttatgaagaaataaaggaagaagaagaattgcagcagaaacagaaaggaatataaaagatgatagcagaattagaatttaggaagaagaaagagtaaggaagacaaagagaagagaggaattactgtagtgagaagtttgaaatttcacttataatttctgggtacaaatcaattctcaactccactttttataactgaaacaaacaaactaaaactaattcttaattttcagtgataacccaacgactcaactaattatttccaacaaactctgagtattaattatgtcttgacattaccctccctgtaaaagcatccttgtcctcaaggatgtttaaactgaaaacataaaatcagtaatgaactgaaaaacagaaaatggaaattgagtagttcaaatgaaaaataaagttctgcctattacctcctttaattctcacctgagttggtgccaagtagatgttttgctgtttctgtttcctcaattcttgctcatgtggatgtttctcttggctagcacaggcttttgtggtaagaagctctgatgcttataggggtaaagtttaacatacaaccacacatagactaatatcattttactattttgtgtaaatttgccgttccaaatagctattacaaaagtttaagctagttatatcaaattcccctcccacaactttcatcaacaatcaaatatctatttccgaataaaagtcttaacttcttcccctctatgtttaacagctgggaaccttcccatttgcgtctcatagatgattcacttagaccaaagtcgagcatccttcgcttatcataacaatatttaacatgcatccaaacatcaattgctaaagtttacattattataaaaaaagaaaatgcaccttcagaggaaccaacaaagttcatttctacgtagttctcaaacttatcaactctttgtggacttctcacaaaaattttggttgcatttttctcagatggaagaaaagttctgctgctccatgactgtagttccatcttgaactctttaatctttttaggttcttgatattgaggcatgatatttacaaggtggaagattttgggaatattatacaaatattaattacattgtaaattttgtatataggtggtatcctcttggtacctttgtgaattaatacttttcatattttttatttataaaaaaattctggtcaatccaacattgactctcctgcatggcagcttcttgctgaagtcgaagctctcccaaccatttgagatgactctctttttgttcatcaagtttcatcttaaaatgatcccaaccttttcatttgtggaattttaacagacaactggtggtccatctatccagtcacctttatggccaaccagtttaacatgatgaaaccctttttctacttcagttccatctaatttctcaaattcccgtagtctacaacaatctacactaccaccctgaaatcagatttggagttttcttcatatatggaatcatattcatcaacaatgtattctataacacattctttcatgaatctcttatgcaaattcaataaatatctctctaattgcaagtcatcctctattaacatcctaaccttgtcaagggttatgtaatctgcatattccaaaagtaggccattggtattagactttcctcaaaagtatggtatacactattctccaatttaatttcacaacactttctcttgttgtggaagatgaatgagaacctactgtggaaataaagtttgaagaagtattaccagaacaagccaactgaagatttctgtttgatgaagcagatgctgacaaaaaggaaattttctgcctccatgattggagcgctgccatcacttccttggactcacactctctgtttttctgtgaagcttctcttggtgcggttacatcagataatcacgtattactgcacagaagctccacaatctaatcaaatttttggcttgtttgcctttgcggttcgtacatttccaacttaaactctgatggcctctgctcgagctcttttacaaacttattgatctgttgaatgcattgctgatcgactactgtagcttttcctttgttcctagtcatcattatcacggtggcttgcattttcttggaatcaagctgctctggtaccaatgtgtcaagaacctgtcctgatttgtgaagaaataaagggagaagaaggatcgttggagaaacagaaaaaaaagaggaaagaacatgagagcagaattagattttagggagaaggaagagtaaggaagacgaagagaaaagaaactgtggagagaaacttaaaatttcattcatattttctggatataaatcaattctcaactcaactatttatagctgaatcaaactaattcttatataacttttagtaatcccaacaactcactcattatttcctacaaactctaatcaggtcttgatagagatctacactagacaaatcgtttcttgagtttctcatgtgtagctctattggcggcacttctggttttttcttgctcttcctggaaagcaaaagctcctcctgagataagagtctttatttggactgcaatcttaaatagggttaacactaacaatttgcgttaggatcctagacattgtagaactattagcatggacatattttatttgcttcttgagtttggagtacaatagccatttgtttcttcactgtggggcagcttgaaaggtttgaactaaattattttcatcatttagtggttcctaggtttgtcctcctgacctagagacatttatctccacctgagttgttttgggtggagtggtgctgtagaaaaggctatctttatcacgttttaagtcctttaacaaaatggggggattttgaagcaataatctcaagtgtatattgctcttttggaatgggtggtgttttttacttatctttgctctaaggccctcaaattctttcggggttttctccatccacgttattaagtgattggaatgttatttttattttgatacatcctctttgcttgtgtttttatctttttgttggacaacaactttttcctctcttagcttgtaatatttcctttttatttctgttttattgctatagatcaagtagtttctaccagtttggacaagaggata

SEQ ID NO: 8581 - DNA, 1083 bp, Carica papaya
  Intron number 1 from transcript evm.model.supercontig_208. 8 (locus evm.TU.supercontig_208.8) derived from phytozome v7.0 (chr-ID supercontig_208; pos 147581 to 148663 reverse strand)
aggcactaaggtagggatataactttgttgaagcattttttttaaggagtatgtcacagattttttagtagatcagaaaatgtgttcttgctatctataagttaatatatgggtattattaggtgcttagtggtttgggattttatttacagattaaatgctttattcttaagttctctcatattaatattttatatttaagtactataaatacctaataatctcatttttcatatcaagtaatgagaatacattattctgagagttttccaagtacttatttgtgtgatgaaattatgtgttagaatcttaagtacaattcttaagaaatcctcacctttatacttgagggatcttaggtctaactagttatttttaggttttctatctcaattccatgaatatctaagaatccctatatttactctgaattcgtaagttggcaaattagttctagtctcatctgagattccttctttaatttcttttttcagtttgggataaaaaactctctttgcagacattgccctgtaaacttcccaaacaacttgaaagtgccattaaagttttcattttccaaaatcaattagctcacttttggttcaatttgtattcaattcctaactacttgatacatatagtagttatatactatccttgaaaagtagatttacaatatgatttgcatgtttgaggtgtctctgcccacattgataatctggtagaagtaggtgatgttgttcttcccctaggaaggacctggtgcatttattttcatttagtgtagcatgatgatcgtaattttattcaagtaattgtgcagccggcaagtgtttctgtgttttcatattagtgagttgcactgctatctaaagcctgatagaaaactgtacaatttaatttcaacaaattatgaagatttgttgatgatctttattttgatattgatactaacaaatattctgtcatattctgactacttatccttcacattatatacactctcagttctgagttatgtgtcttctgttgttaattgtcctataagaagacagagagagacagaacagaacagtaacgttg

SEQ ID NO: 8582 - DNA, 1879 bp, Carica papaya
  Intron number 1 from transcript evm.model.supercontig_38.7 2 (locus evm.TU.supercontig_38.72) derived from phytozome v7.0 (chr-ID supercontig_38; pos 1516657 to 1518535 revers e strand)
cgctctcaatttcgaccatcgacatctaatcagaggtttgcctctttccttttgttttttctaatctccttttgtttcaaatttggagtttccatttgtattgtttggttgcattgggttctgacgatttgataagttgcattagttctcgagttatttaattgacggtaaatgttatgaacaatgatatttgcgatcggactttcgttctgttatccaagcaattatgacgtgaaactatggaagtggtcgcccgtgtttgaaatgtttcaaactcatgctattggacaagacctcacgactggcttggagatgattccttccttttagttgtttatttttgtagattatatgcaagttcttcatattgctggaaatgtgagtaaccatcttttataatctttgctatgttctttttgataaatctcgatatgataataatttaagctgaggaatgttagaggcttgatattataaaaattattaagaggcttgatattataaaaattattaagaggtttgatataatatgtcgcgcaaatgatttctggaggatctttcttatactctgagaaatgataaacatctgctgctttgtcattatgtatctcatgaggcctttggatagttcaggtaaatattgcatctcgttttaaagggaaaattggctgcaaaaggcatttgttttcagtcaagacttcattgtagttgggtatccatattctcttttaattatctattggggtatttggattgactgagttggctggaaaggttcaaatttcagggttttaaatatctatactagggagtttggatggattgaagtagttggaaatatatttcgggattttaaatctctcttatgttttatttggttcaaatctgttttattctaaattcctaaatcttagttttgcaatacctagaagttgatcataatttatatatgtgatgcataattgaagtaacttcagtaattttcagttccacaactatgaagttgtattttaccatcaataatggaattacaaaaacatctaacttgaattaaatatagaatttacttagaatcacaatattgtttttgtccaaatatttattctacttctgttttattttaatttctatttcatagaattggaatttgaagcaaactcaatattgtggtatttggatgggttgaagtggttggaaacaatcaaccttctgggttttgatcacttcacccaaaagggatcagaagttgtatttatcaaatataattaatggcaataaatttttcatcagttgtttgtgtttagtcatttgttaacttcaattgaatttttcgcttgcactaacttcaattgaagtcacctatttgttttagctaatatttcgaacaagaatctgaagagtttaattttttttttgaaatattcttcttcagagaagattctgaagagtttaatagtctggtctttttttgcaaacagagtgttgttctgtttttggtgactggagtccctgttcttattctttgtcaccggtcaatatctgacaaactactttttcctatgcattgtatcaattggctattaaagatccttttagagtccttttcaggaattatcttatcatgcttgcaaatgctttgttataagtctgtcccttctttagacttctttccttctctttatttgttcagttttctataccagtgaaacctttaatggaagttgctaaggtgatgcatagctgatactgctcctcctactagtgatggcacgataagacaaaaccaattgcatgttcttgcttagtgttgaagtttatattctgagataaggtgattacatgacatttatgttggcaacttgttcagggttctcttgtg

SEQ ID NO: 8583 - DNA, 5787 bp, Carica papaya
  Intron number 4 from transcript evm.model.supercontig_98.2 5 (locus evm.TU.supercontig_98.25) derived from phytozome v7.0 (chr-ID supercontig_98; pos 520783 to 526569 reverse strand)
caatttccaaaatcagggtataagatacttctttcttctgcacggttgattcatcatgtcttatcgtatttcatttacttaccttttgcactaatgatagttttgcagattttatcaggttttaggattaaaagttgtattatttgtggtagaaccctgggattgggatctagtcaagggatgactaagtatggaaccattcaacaagctaaatgcttgtttgtttaaatcgtgtccttgtctccatgtggtgaagttatgactcagttgacaaaaagaaaccttgatcttcttgtgattgatcttagtttattatttaattgttagtgtgattttattcattatattgtagagatatatataggagaggataacagttagtcccctactaaagaatgattaaatcattacccaagaatttaattgctttagaggagaagatgtttggttcaccttataagctggtcaataggaccttatgaactttcgaacaatgttttaaatttttttatgcattttggaaaataccaaaaagcttacaagttagacagcttatgagcgaataatgttttagaaacgtagcattcctaatttctttagagaacctataaactctcaaaaataaaataaaaaaacctatccaacaaagatctaaattaccagttaacaattttaaaatttctaacctatatccctaatattcacataatttttgttttcattgtggcttatgttctcttcatcattttttgttaatttgtttatttcagaaaaaaaatattttgttaatttgctttcaaactataaagcaaatatctatatatgtaattttatttaagatgaaattgaaataatcatttaacgtaattttatttttcgaatgaattatatgtctcacattattagtaatcaaggtgataactaagtgtgaatataaaataaaaaaataactctggaataaaaataataatttacatttcaattagtttaaagtatgaataaaatgatacaagtacattgtggcagctttatatgttagaatagtgaaattaattttttctccaatttaacagaattaacagtttatgagttacatcttcactaaacacaaaagtaactcttatagtttatgtgcttatgttagacaaacatttcaacaacttattcatgagaaaactacataaacttataacattgttaaaaaccttaaaagtcatgcacaaaagaagtgcatcaaaatgaagaagtccatttgaatttttagatatactcaaaaaataaaatggactcatgatgttgcagattcctctttttgtgttagaggaacacttcaaattccataagtttcctgattcttcataatagcagagtcaattctgttccctaacaagttcaatactcttccttgaaatctggtcttggaatatactgtaagaaggatagaaaagtacattacaatttatatagtgagtaagtgttgctatgaatatgagcttggtggaaaatatggagacatgaagagcattttttgatgcatgggatggtgttggccgactttgtgtgtatggacagaataaaaaccagaaaatcatagaaccaaagaatagagaagagagtagaaggacatgatctgtcaagcctttcaaacagattttgatcaggaaccaaaaaaacttccaagctctccccactgcaacttctgtcattagaagcataggatctgtcatgcctttcacacagaccttgatcaggtttgatatgatgcctttcacacagagtagaaggacatgatctgtcaagcctttcaaacagattttgatcaggaacaaaaaaaacttccaagctctccccactgcaacttctgtcattagaagcataggatctgtcatgcctttcacacagaccttgatcaggtttgatatgatggctatacctactatcagttagtcgactcaatgctggtgctggtcaaatagcaggtagtcacatatagcttctcttcctgctgttctttgtcttcagcaacttgagccttctgttcagggttgcatcttcatttatacacttttcccatatgtccaaaagcctttaaaaacctgcgctagactccagggccaaccaattatatttctcctagtgtttggtttttttgcaatttggacaatgtagaagtttcttcttttctccttcctttcccttgcagacttcttggtttctccttctctccacatgctctgcctccagcagtgtttccttcagtcatgcttttgtttttcactagaaagttccttcaacagccccctttctcttcaaggacctactttgcttggttgtttggaaaacattcaccaaatatgtgaaaatcatcttggaaaactctttcgggtcttcaaggaaggagattttggcttcaaacctctctggaagcacctagtccaccacctttttatccgttagctcctctccaagcaacatcacttgttttacagttttcatgcttccattactctagccatgaactcattgtcgtttaagattaactcatcctaaggacttcaaattctcttcttaggttgaattatttgcatttgtttggtcttctacttccttggaactctttcttgattttggcctaggctctgtgtctgtttttacgagataatcttcaaaaatattgttttggatacaggcaggtgaacaaaggaaagggccttgtacttcttttgctatctccttccaaggggctttatttgtgtcacatttgggcttgctcttaaggagggatgctcatcaacttccatgacttcctataggttaatcctccttaaaaagagcttctattcttacttccttggaactcttccttgatttggcctaagcttctttgtccatttttaggagacaatcctcacaaatattgttttggatacaggcaggtgaataaaggaaaggaccttgtacttcgttggccatctcctttgttaggggcttcatttttgccacagttgggtttgctcttaagtagggatcctcatcaacttccacaacttcctataggtcaatccccttaaaaagagcctccatttttttggcctaaaactggtaactttctccattgaaagttggtgaaagaacactccatgaactgtttgaggctgtactttccaagttatgatgtttggtggattggttttggtggttttgcaacataaaaatattcttgtttttggtcctgcaaagagcttatgaactttggtaccactttttgattcttagctctatgtgcgtgtatggacataaacagaaaattggaaaacatgcaaacggaaaacaatggagagagtagaaggagaagaaaaatctgaggcttgaatctaattcttcttcattagaaaatgtttaaatgcatacatgctgtccatgacaactaatgttttctaaagaacacaaaaatttacctagtaaactaaactaagcaacctgaaatgacataaatataacgtaaaatggcttgtccactaatacaagtttctcacaacacattattctttggattaagacctgaattaaggacaaaactgcgttgtcaactcttcagcaggcagactgatacgagtatctcctagaccaattatgatattgagggaactatctacaacaattatctttcaatttatttggccaggaggtataagtgctaaaatttggtgaaaaacgagtcgtatgatctgactcttgaatcaataatcaacaggttcctaatagattcatctgagacagttggattttgcaaaataataaacttacctgagagtgcaggagagcatgcaccactaggcttctccaatgattttagaagcccccttattttctcagtctcctcttcattaaactgtttgtcctgagattttccttggttcagctgatttatggtgaatttgacttggtcttgatttttctactttctctttgtttacctcactgaatacttcgtgaattccattcagtttctgatagttctcttcatgatgcctttgttttttttgcaatatgtacactagagagaacccttactgtccattcttgatcttgacaaatttggccgtcacattcttttatattggcagtctttctgttttgttaccattgttgaatcttcttagacttgggattcaagcgtagtcccccggtgactttcgctctaattaaagaaatactttcatttagagatgtacctcttctttagatcctagcttaatcaaagtcaacactaagacgtgcaaatctcttaaactctatcttttcagcataactcttcaaaattgtagcatcttctgttcacttagtttcgatgcatttatgatggtcaagttcttgccatagactctaatagatttgtgtaggccatagttttcctgttcagcagcattagttttgactttgatctcatacatttgtgttgcaacatgagccttcaaatatgtatgtagaacaagcaacacccatcaaagatatgtaagttttgctaatatcaggattcattgagtttcatagccatgacatgattgtcgaactactatatcccatgtgtcaaattttggatctccttcattaggtccgtctttaggaggtgatggagtttcccttttctcttcaaataggttgaaataatttgagactacttgacataattttttccattcaatttatatgttatcggaatattttggagaccccttactgttgattgatagaaacttttttttatctgactagtggtgttgaaaacagcatcatctttccttttttaacatcttcaccagaatggtgcatcaggtctcctcttacaaggacctgacaacagaggggtccaacaaggattctgctgattaaggttgctgacagagaatacaagtccagcgagcaagctagcaatgaaggatagcatcaactttgcaataatgaagccatgagaaaaacaataaagaaaaagagataatgcagtaggatgggttttatcctgcacgggtatgtgcaaaaagagcaggcatgcactaggatggatgcatgctggagccacttaaaaaaaaatcaaggctgcgcactccattggtcttttaaatagaaaaacaagagtataaatggctacgaagaccgaaagaaatcctgaaacgagaaaaaggctctcatgcttatggattttaaagagaaactgaattttttatatattgagaacgaccatgtgcacggttatatatagcttttacaaagtgaaagtaggaaactaattatagcaaataaaataaataaaataaaatcaaatattcatataggttggattctctaacggtactccataattttaggaagatttattctcttgtattaagatagaagattgagaaattttccgagatatgtaataacctgttctcaataatttcttattcggactgtggctgtgtggttggtaattcgttctcctgctttcacttttctttttgagcacatacaaagttaacttagaagtaaaagcatttagtaatagatatgccctttgctaatttttttcttttaaatctaagcctaactgttccattttttcagatacgttagttatagttagagactttcatactgaatagaatcttattttcctggtttctggttcacacttcatctcccctgtcagaagcatttttaccttttcatgttcaaaacaacatccacaatatatgttgcaggaaatggatggtctttcttgatatggcaatatttatttataga

SEQ ID NO: 8584 - DNA, 1588 bp, Carica papaya
  Intron number 7 from transcript evm.model.supercontig_130. 53 (locus evm.TU.supercontig_130.53) derived from phytozom e v7.0 (chr-ID supercontig_130; pos 622846 to 624433 rever se strand)
ggaacattgggaagatattgctttctttggtatgcagtcctaacttacctacttgtctaagttattcattttcactaactgctcactggttcaacttgggatcatattcttaagaaaaaataaaaatcaaactagtaccatgattgtttggtgaattacttattctttcttttccgtacataaaaattgagtctcttctaagattctgtttaaatctagaatttccttaaatcacatttgcattgggggaaaaaacttcaccatcctgaaatgcataatattcaacttcaactaaagaaaatgaaagaaaagtgacagatgcctctgaagttcatctactctggattatgtttgaacctgatgagttcagggcttaatttagacgtgctgatgagccagattctggtggagtcccaaggctacttaatctacaggagataaacgttgggttgaacagataccaggcccaggccagactgtttagaatggaccgtactccttattaatgatgtaaccaaaggccttgcccctgccacctgaatgagaaaaattgcactctgaaatttgtagataatttattcgatgctttgattaccaaaacctgttacaaccatgggagaaattagcatattcatctctaagtaactcctgggtttaacatccatttcttattaatctaggcccttgattgaacaacatactgcagtatattagctttgatgtatcatgctaatacatcttgcagatatgcatattctttgacattattttcaaaagtcaaaattgcattttatcctggcaagaaaacaaatacctctcctaatcgtgcagaatatagttagaattttaatgttttagataaagaacaatataaaacatcaatatataaatataggaaacataagtagtactgtttcattctcaaatttgtatattgcatacaagtaaagattgaataagaacactgaattcttctggagtaccggaagcattcaatctagagaaagtggaactatgattcttttgaattgaggtgatttcaaagcctctgtttcatttctttgatgtattatataataattatttgatttgatcaggcagtatccaacagtttggtagttttggtttattggtgattactagttaggattgaagaattctagtgggtatcattttctatatatgtgctcttaatcttaccgtagcaattcttcttttgctggttagtgctcattgacataagctaagtcgatctgtttgattagtaggagtggaatgtaagtgcaggatgattagacaccatttggcgtaaaaataaaatgaattttgtcaggatacaaaaaccttttttttttttcatttcatatcaattatctttcattgaaaatagacatcattactggtttcaagagagcgtgcattataagagtgaaataagcatcagtcatccccgggttttagtattttcataatccatttcttattaatccaggcccttgaacctatgaacaacatgactacagtatattatctttgtcccatgatgcattacattttgcaggtgtccatattctttgacagtctcttc

SEQ ID NO: 8585 - DNA, 527 bp, Carica papaya
  Intron number 5 from transcript evm.model.supercontig_991. 2 (locus evm.TU.supercontig_991.2) derived from phytozome v7.0 (chr-ID supercontig_991; pos 6461 to 6987 reverse str and)
aggtgggttaaacactgatatgtcatctttttaaatcttttaaaagtataatggatggttttccttatccaggttattgagaaaatccttttttagagaaggtttccactttttatttagtaggtgctagagatacgggagagtgatgtataaagctagaaagcgtagccaaagaccataaagttgttaaatcttgtctaaaaaggatactgaacgattgataattcaacattgataagcagcaataactaaatttatcccaaatggtccaaatacttgtccacctgtagccttgtaggccaaatgaataatgaaatgccactgtctacttatctcgatttaatctattatggcgatggcttctttcttaagggaggctggatccagggagcaaaaactggtgtataattcattcagacattatacatctattctgaattttttaaagtactttaaaaatattgactgtatggttttgcctcattctttcaggtacgcatacccttggtggagggagaaagagatag

SEQ ID NO: 8586 - DNA, 751 bp, Carica papaya
  Intron number 6 from transcript evm.model.supercontig_90.4 1 (locus evm.TU.supercontig_90.41) derived from phytozome v7.0 (chr-ID supercontig_90; pos 665632 to 666382)
atcggtaggagtttcttccaaccaggtgagaatgatgcataatgaatatgaattagaacttctaaatagataatcaaattatatttctagctagtgtatagttattgcaagattatggataatattaggtctttagtagatttaggattttgcttatagttttaattattttaagttataggtttcctattagacttcagtagttatagttagactaaggttttatgtttaggcatgttagcacctatttaatctcacttttgaggtcaagcctttagtgactaaattatgagacttctctctgtatatatttaatctactcctagttatttttatgttatctttcaattttttaaggtgtgatatctaagaatatcaaaacttacccaaaatcgttaaagtaggcaaagttagcccttacttatcctccaccaattttgataccaattctttcactaatttttaatcttggatgttataaaacccctgagtagatggtttctttgtggccgtttcttcaaaaaaattggcatgttgttcacagagatctttatgacctttgattagttttttgggtttggaaagttttttgattggttgaactctaccttattggtccttattccaaatgtgtagaatgctaagaatataaaaggctatacaaatcaacctagtgagtagtctctataagctaattgctaaggtgcttatgttagggctaaaaagtttggttgtatctgttgttggtgaa

SEQ ID NO: 8587 - DNA, 921 bp, Carica papaya
  Intron number 2 from transcript evm.model.supercontig_3.50 9 (locus evm.TU.supercontig_3.509) derived from phytozome v7.0 (chr-ID supercontig_3; pos 3631375 to 3632295 reverse strand)
gattagatcacaaacattctttcagatccacaaaggtaataattaaaacatttacgtagtatttaatttacagagtattctactttccattcattttccaagtgttgactatttgaattgcagaatttagtttttacttatatatttgatgtattgatgagtccacttatctaatcatattttaaactctataatgatgaatttacatttatattttttttgtcaaggtagaggttgcaaaaataattactaaaacttaacattgaatgtaaaatttatttacaattagagtccaattcttattttattatatcatatttatattgtatcttcattcatattttataagatcaaatttaaacaaaacttaatctcaaaactatattattattcttattttaaaaaattaaatcaataacgttgagtgttaattagagacatggaataaaatacattgaaaacataggttctaaaattttctaaaccaatatatcgcttccaacactcaaaattaacattttgagtagtaaaatactcgtgtatatagaagaagaaaaaaaaatatgattaaatgatattttatatatcttttgtatgttttcgtagaatatttgtaacgattttatttattgtatgttaagttgtttaataggtattcgataccacatttttttataaaaaagaaaaaaaaaatcttatttatcacaataatgtaagtttagtattgagtcagtttaatctatctaacaggccacatgtgctatgataaataatatttttgggaaagattctttatatataatcataaataatatttaagataaatgatttgattatataaattcagggtaaataactatattaattaaattattgtaattgatgagtatgattttgcatatacttaattttacaggaaga

SEQ ID NO: 8588 - DNA, 1473 bp, Carica papaya
  Intron number 1 from transcript evm.model.supercontig_187. 27 (locus evm.TU.supercontig_187.27) derived from phytozom e v7.0 (chr-ID supercontig_187; pos 282001 to 283473 rever se strand)
tggttggagacgacaaggaactcgatcagttcgtactctcttctattcttcttcatgcatcttttattttcgaggatttgagctttttgatttctgggtttcgtctgaattttgccatttgggacggtattctaatttccggcgatgtctgaattgcaaattcattaatatgggctccgttaattgattcttccaattttaggcgttccatacagagatttgaattttggtttctgggtttccaatttttaaatccttattcgagcggttcatcaatttgagatgatttaaagattgaatgagaagaaccctctaaaataatcctgcaaagggtacttcatttttgtcagataagaaaatgggagtgatttgattggtggcaaaaattattgagagagaaactttttcctttaaatgcattttggctttgtgtgcttctcgttgatttttgagtctttttaaaatgcattttaccgacaaatggttctgccattatacggagatggcgtcttttttagtggttttcttttgtactggcagaaaatgtttgaatttctttaggataagctcatcctggacaaaccacattttttgcttaaaaattcagtagaacctaatttggtgttctttgttattgaggtcaaattgtaatcaatggtgcagacagatttctttactttacataaaagtacaggcggttagacatttgagggattgataatcatgttttgaagctaatttgatgactctcttgtcaatatgctgtttatcatggaagtaagaaggaatttcatttttttcttttttgagagaaatggaaatttattaaaggaagatatttactaccggattagtagtgtactattggtgcgtgaaaatttcgggggcggtggagaatgcagggtatttcatttttttttttttttggaataatttgaagacattatattcgtagattagaattaaataccatagttttatcttccatgggagttagttttcatctccaagattttagtgaaagcttgttgagatgatggcactcttgagaagctaagcctgggaacgtaaatatcattggaagagcacctgaaatgcttatactgcaacttcatggttaaactatggaaattcattttcatgatgtccaaatacattaatccagtctagtcttactattcagcctaattgagctattcggatttcaggatgattctgcgattctctcacttttttaattacctctgtaatcaattttaatcgcatatgcagcagaagcacgaagaaatactccatctaactaataatataaaaataagatattctcattttacatttgattggatggtggagaagtaatttactttgcttctacttcttatgattgtttattttaacctgtccttgatcaatttgaaagtaaggcaagatttggcgaagaaatttaaatcttaaatatttcacagacacatt

SEQ ID NO: 8589 - DNA, 2528 bp, Carica papaya
  Intron number 10 from transcript evm.model.supercontig_85. 93 (locus evm.TU.supercontig_85.93) derived from phytozome v7.0 (chr-ID supercontig_85; pos 638759 to 641286)
acaagctctccactctcgaaggttttgtcagacaggtgcgtatacttctatatatttatatcgtataaaacatttttctatatatttttggttagaccatgcattttataaagcattaagttgatggtggtgagggagttagtataccgtatgatttgcctgtggggcccatttgagtttgatgaatgggtggtgggtggggtccatgtgtcaaacgagaatctgatgctgtccttggtagctatagaaaacctaccacatttctacgagaatagatgggggggaagcttacatatatatatatacatacacatatacacgtgtcatctacgtacacaccatacatatatctatacacacatatatatacgtggacatagaagggtttggcatattaattttgttaaaaatataattaatttctaaaaaaaatattaatccaactaaagttatattttgatatttccacgtggcgactcactggtccccacaccagagtaaaagacatgatttctccccccaaccccaagaagagatggaacttgaaaaaagcccatcttggtggtgacgtcatgctctcaaccgtttgactttttctaaagttgcgtgaaagttcacctctccaatctgttataactcccttcaagtaattatcacataaattccaaaatatatgaaaaatacatttaatgatattaatatattaattacgataatatacaatataaaaaataatgttatattaaatttttattcaaatttttttatttttatatttattatttatttataaataaaaaattcttgcatcgaagtttttaataataaaaaatcaattcatatttgtcagtatctaattttttatctcacattaatcggtatttaaaaaatattattattttatctttcgagtaaaatgtgttctttatttttaattttataaataaaatataattatttatcagtatctaatttctttttatctcttatcaattaatatttagaaaacgttattatctcatctttcaagtaaaatgtattcttcgttttttattcataaaaaaaaatagttgtaccgaagttttcaatagtagaaagtcagtttatatctatcggcatttaatttttttatcttttattaattagtatttagaaaacgttactatctcatcttttaagaaaaacgtattcttcattttttattttcaaagtaaaaaatatttatattaaagttttcgatactaaaaattcaatttgtatttgtcagtatttaattttttaacctcgcattaattagggtttagaaaatattactactttatatttcaggtaaaatgtgttcttacttgataaatttactacgaaaatgtaattatttcacatgggtttattttaacactgatcatataattagtcttatctatataaaataggttgttagtatttggtttatacatttatagtacaaaagattgtattatttaaatcaattataccatgtttcaagtaggaaattgatttcacatatacaaaaaaaattcattttatattaatatatagttttttatttacctacataaccatatacaagacaaatagaaactatatctcaataaacatacgttatattaaatacatctaatacatctaaaagatatataattaataattttaatttagagtgtaaaaagattagttataatttcataattagcatatataactataattaataattgggttaaaaacctctcactaatttctctagaaaattatagggggggtcatgttaggagttatttagaacgagagtgggtcctccaaatattggaatatcgaactttttgaaaaataatgtgattgtacttttcttatgaagaaatttgatgtcatcttaagactatggtgaattaataagatttcaactcgatcatttaataatctagtcaaagagaggaatttgattttgaatttatttcaattacgatcaacttaattgttttttaagtaaaatatttcatatttacgtgattttaaatatataatttcacgtattaacttatacatacggtatttctaaacttttgtttatgaaatgttagtagggaattatatatgttataaagtctgagttatattgggtttatgatcggtttatatcatataatttacgaatatatacgttttgagaaattattgtaatctcctttggattttcaaatttgtgttttagagtaatttaacttcctacacccatttgaaaaataaaccctattagctcaacaaagtcatgggtagatatagcctatgtgaaaatttttaattatgccttcatcagaagtcaagttagcttaatcttgtttagtccaatgtgtgtgcgagttaatcaaattaattagtgataatggtggtttgattactattatttccatggatctcaatgaagaactaactaatgattctttgaaaaaaaataataataaaaactcacaggctgataatctgaggcaccaaacgcttcaccggct

SEQ ID NO: 8590 - DNA, 798 bp, Carica papaya
  Intron number 1 from transcript evm.model.supercontig_26.8 1 (locus evm.TU.supercontig_26.81) derived from phytozome v7.0 (chr-ID supercontig_26; pos 612910 to 613707)
tttggcgtccgccacaagacccagaacaaagaaaggtaagctttatttctctttttgattgtttttaattcatttccatttttgtttgggttgactctaaattcaagctgctaatatatatggttgaaattggatgtgttttctatatacccaaaagggatgcacggaaattgagtctttgttgggtttaagtcgtgaaaagacatgtagtgatggaagtcaaaagtggaaacctataatcatattactcaaataatttcgtggctgagtttaagtagccaaaagacaggcgagtgatggaaggtcttgatgtgaatattgctatataaacaagcctgaagctaacttagtgaaaactctatgttaggaaggggattctattttttttccccctgataagtgagggggtaatagtctttgtgttctggatattaatcatttgaatcagactgaaagtaagaaccaaaatttcaaattgtcttcctattggttttttttccccaaagctgctagtatcgaaatttaatttttaatagatgtatttgtgcagaataaaaaaagtggtattatgaagaagtataatgaattttgattctctgtttcttttatatctaaaagaaaattaaaagaaaatggttagtttagagtacctgattgttatattatctcagttattctgattttctgtatggttgttggttttccatcctatgtagatattttttttctaattattgatggtaggtatacattttccttttatgttttattggcttgcgtaggctcaaactgctgctt

SEQ ID NO: 8591 - DNA, 7987 bp, Carica papaya
  Intron number 4 from transcript evm.model.supercontig_5.31 5 (locus evm.TU.supercontig_5.315) derived from phytozome v7.0 (chr-ID supercontig_5; pos 2882122 to 2890108)
ttccttcttacgtagcttccgagttattgtaattgtttttctgattaatagtcatttctggacctttttaaatttgttctaagatgcccccttttttaggcaattgttaacacccctgaatagaaaagaatacaactagttgggcataaggtgttccgttgacagcacaattccctgtcctgtccattttacttgtccatgtgaaagaaagtagttggtgaaaatcatttgaggagtaatccagcaatggagttgttgaattcgataaatgttttattctttttctctatgatttgaattcaaatgcactacacacatatatacaaggagacagggtaagaaatagtaagagcattaatttctgaattattacgtccttgattttaagcacgagttggtgatttgactttgacgattctccttctgatttttagtaaagattttttccttaatccttatcctgatttcattaagcattttttccttaactcctcttcttgatttttagcaaaaaaaatttcgtttatagtctgttaccttatcagccctcctcaaggtggagactaaatgcaaatgaagtctcatcttgctgcaaaggaaaagaaatgatgcccttggctaaggcttgattaggatgtctgctatctgatgtgaagatggcacaaatcttgtaatgatattacccatggctaccttttttttggacaaaatagtagtctacttcaatatgctttgtcagagtgtgaaagagtgtggatttggacatgtgcagagcactaagatttttgctaaataattgatgatgatgagataaagtaatgccaatgttgtgtaacaagaatgagagccagactatttcaatggtgatggaagccatgaacctgtattctacttctgagctcaattaagcaaagatagttgctatttagaataccatgagacagagtttgcacctaaaaggatacaataactgattgtgcttcatcatttaagagaggatcctgcccatgtcggcatctgaagaagcatataaggagagagaacttagagatataaactgtaagccatagtcttctgtccctttaaaatagcaaagaatttgcttgactgctctgagatgtaattctgttggagtgatgaaagattgacaaagattgacaaactttatttactgcatattgaatgtttagttgagtgaatgtgaggtattgaagagtgccaacgatacttctacaataagttgcatcttacaagtttgtgtttgagtcgtgggacttgtcgttgaggaccgtaggagtggcattaggagcacaatcatccataccaatgcagttaagtagatccttaatatacttgccttgagagagaataactcctccaataaagtgtttcacttcaacacctaaaagaaagttagagactcaagatgccataagcgaattctgagctcaattgatgaattaggtgaggcatgaaaaagtcattgtgttcaatcaccgtatgtcatatacataaataaaaatagtatgtactggttgtggcggtaaagagataaggaagaatctgcttgcttctatagaacccaaggtggagaagaaatcaagataagcgattaaaccaaattcgaggagcttgttttaagtcataaatagacttgtgaagaaggcatacctagtcaggtttgtgtagatctaaaaaacccggaggttgctccatatacacagtctccttgagatttccatgcaaaaagaaaaaagttcttcacatcaagttgtctcatgcaccagcttagcaaagtggaagggctatgacaaggcgaattatagtgtgatgaatgactgtgctgtaacctttattgaaatcaatacctaaaacttgggtaaaccatgggcaataaggcaagccttgaatcttccaacagagtcattcttatgttgcttaatatgataaattcatttgattgacaacattcacatttcgtggttacgaaaattactgaccaggtctggtttgaatgaagagcctttaattcctcttccatggccactaccctctgggtatcctttaatgcaatattgtgatttgtaggttcaacaagtatgtcacctgctatagatagcatttttaagactgcaaatgtctttggatattggctattgcgttgaagatgaacgtaagtgttgctacattatcatcgatattggtatcaacaatatgatcaggcatgtttcatgcaatttcacgacttgcacactgttggttccgttgtgactaatggttcttcttcttgaggtactttaatattagaaaatactccattatcagatgcaaaggctagactgtcaagattgcaagacatttaccgttgctttcatcaaaaaaaatgttattattcacaataaatagttgtattgctgactgtgttttttattgtactattgtatcatcagtttcatgggtgattttagaattcatcataggttagagaattcagcaagctccagtagtataggggttgattcatggagagatggattgtagagaaatttaccttaatcaaagacaacgtatcttgatgtgtaaactctctttggctgaggctcatagcacagatatccctcatgaattaggctgtaaccaatgaacacatattaataagtttttttaacaaatttgtttgctccttgatgtcttagagaaggaaagcataagcatccttacacttgcaagcttgtataatccggttccttgtgatatagtttagaatatagggcctggttgtgtaaaactgaagaatcttggcagcttgttaattaaataggcagctgcaagaaaacgtcaattcataggaagaatggtagattgtcatgaaataacatggttaaaccttgtgtcaataatgtgcatatgctatctctctgatgtgatcctagatggcatggaatattcaagagatcattccattcatccaagtctcgggtaaggttgttcaacacttgatccttgcagtttggatcctaaatcgccctcacataaagtcccacaagaaaaataagacttggacatgagtcaagatggacttgggccaaactttaaaggccttgaaaggggaaagccgagcccatcaagtcaagagaagagacaagcaagaacttgtcctacaataagggcaaaactggcccctaaagagttttacagctcaaggactctcagccactcatcattaaggagtctttataattatggacagtttcgatttgcacatgaaaaattttctcactcaagagaaattttctcctaatttttctaatcataagcaacctccaaaagaattttcaccatcaatgattctcgggtttttcatctgtacaaacatggaagccgtccaacccttctttcaagagtcctaggtcagttttctgacccaaaaggaggtggaaaagtatgtaaaagaatcttagattttctcctaaattttctcttagatgttctcattgattttctcctcatggccgattgttcttgattttctcaaagaaaaagagttcttgtctacctcaacttgattgcgtcttaagttatcttcaacactaaaaatcagtaaaataatagagtccaaatccaagaagaattctctaagattaagtcaaccaaagttcaagaaagagttttacttcactttgatttatgagtttttaatttaattttttattagaattctaaataagaatgtaattagagttttcttaggatttaatttccgaattctaataagattagtaaagtttatgcctatacaaaggtcttgctcatttggttgtaaactcgtcaatttaaatcaataaaattacaagtttcttttgctttaacattcggctattgtgagtgttctttgacagaaatcatcaaccatgttgttgagtggagaatttgttctacttattgagataatctcgtgatattttattaattaccttagacctcaatcacaggttgattgtaaattaaataagaaagatttgtttaaggattaagtttggtgctaaattgtatgttggggcttttgattacattggttgattctgggttctgcatcaccctcaatcactctattttattatgtgtttaagggcatgaaatttataactacaaaattaccaatatgattaaggaaatcaaaggagttaaattctttacctccaccacattgaaacattttgattttcctatcaaattgattttctacaagtctctggaagtttatggagcaagagtaaaaatcaaaatttttttcttaaagggtacgaccaagtgaaccttaaaagtcatctataaagatagcataaaaccgaaaagtttgttttgaggcaatggaagttggtaaagtcacagtgcaatttttgtaaaggatcattagaaaatattattagtcaagtcgaaaggtgtttacaattctttctagattggcaactagcacaaatggatgactcattttgccatgtagtgccatcaatgactttctttccttttaacaaggacaaaatctttgcacttgggtgtccaaagtggtggggtaccacaaaggacgagctgccaacttttattgttgataaagcttcttgaaaatttgaattcaaagcatagagttgtctttaattatgccctttcctgactgttctctagtttccatccttaataacaaagttatattgttagaattcaacagtgcaaaagttatcttcagtaattttacttaaaccaagttctttttcagttcaggaacaagaatatcttctaaattcaattgtccagtacatgcatttcctgtatgtgttaatcaagtttgtttccattatccacataaatgatgtgacattccaaatattaattaaggtataagggtgtaaaatacaaaaacagattacgagtgcataatagttaaatatatgcagcggaacaataaagtttcaaaacccttacaaaatatataaattcccaattatatatatatttgatgtcagaagtgtcgacaaaatacaaaataacaaaataaaagatggtcacttctatcattatgtaaatagattcattagagtgcgggacaaatcatgcacttataaaagtttatgaatctacgggattctcaaatacttcaagaggtaggtcagcaatcggttcctcactatcttcctcatctgaagggaagtatggaaatgggtgagttacatatactcagtaagaaaaacagtgtttaaataatattataagatttaggagtaattaaaaacaacattattatttatcatcaagagtcatgtcagagttctttattaattatgaaaataatttaatttattaaagaaaatatcataaccatcatatcatagttatatcatatcaattaaatcaattatgctgaaaatagagaaaatcaaataaatcatgatatgcactatttttcattttattcttcacgcgaaatcgttccgacttctatctactaaaggtaatacggattcccgactatttatgtgaaatgactaattcatttcatttataataacaatttgcaacttatcaaaccaacaacacatttatggcttgtcaaattatgacacgatttatgaccatgccgtgccaatcacagtggtcctacatgttaactatggccgcggtcatacttcgccaaaggtgacccctacaatcatatcgcgtcaccactttcgttagatggtaagccgtcgtccacaggaagcagttgtctcacgtattttcagatcaaatagagagagaaacagaaatctctcagagataaaaagactaacgaaacacttcgtaaattatgcatgttaaaaccaatacttatttctcatatctatacatcgtttcatagttaatcattttttttcaccgtcaattgcatcacatattaatatttacctcaagtattaaatcatttaagtttcacatgcaaaataattagttcacatatgttcataaaacaagtaattaacaacataaatcatttcactgaaacatataaaataatcatgcaaatatttagtttaactttgttaattttgtctaaaaatactccttagtatgttagaagtaaataataaattgtttactgaaatctcgatattttcctatgccttttcttcctcttctctcctcctctctctagatcactctctcttttcctaaagttcttggatgatagaagaatagaaatagaactgatgaggaaatggtgaagggagtgtccttatttatagaaaatgggaatcgttgtatttgcgtcaagtggcgaaacttggtgaggaaagagaaagtcaatgggaaacgtgagatgtgacgacagacggatgtgactgacggatggacgatgtgatgggatggcggcgtgaaaaccggaggcacgtcacccaaacaacaacggcacatcgctcaagcgacggcggcgtgctgcccaagctggtggtggcacgcagcccacggtgcccaagtgtgcggcgagtgctgcacgaggccccagcctgcctttttctctctttttccctaaaatctatttaaataataaataaaatataattttcgtacgataaaataaaataattaatttcgaaaattatttaaccgaataaaatatgaaattaaaatacaaaatatgatatccatccagaaaaataaaaaaatacgaaatattaaggagttttaaacaaccttagggttcgaataaataagaattcacattacaaattaagtgcgaaagttttcagggtgttacaaatgatatcattccattcatatggttttaaatagacaacatacctgcatcacctatgatgtgtgtcattgctctagagtctgtgtgacgagaatgaccatttttattcaaggtgagagctgccaaggcctgtggtaggtcttctaagtgataggaatagacaaacctataccaatagtcaagggcaacatgatccatatttccacaaatctggcagattggtttatcacccttttcttgatgttgtctagcttcttttgttccctctttcatgagactaattttacttgaacttgtggtgttgtaacaaccaggtggactgaaaccttaatctttaggattaaagcctcctcaatttcctctactggttctaccatgcccatgttggtaaaaactgcttggttgtgttcaatataactcttcaatttttttatttttgagcagctagagtctgttcatatccctgaatagcaagcacaaattaactaaatgttggtaaggaggtttagttaccatactagacaaaagccatcatattttgatggctgcaagattattacaaattaatttgagttcttttacgtagatttagatctgttattgatggtcatcaacatgtttttcaaaagatcttcctattcaatgaaagatttgttatctgttaaccataaatgttccatgattgccacatgagatagttgtttgtgcctagtttgactgataccaaactggcacattgatagagtgattataatgtaagcttgggtttttctgtagcaaattgataaggaatggaggaactgagctatttatacttccacgtttgacagctataatatcatgaagaactctttaaacttttatgtgttttattctttttctctatgatttaaactcaaatgtaatcatacacacacacacaaaagaaaacagagtaagaaacagtagagcattaagtttctcaattattatgtcctcaattttaggcatgaattgatgatttgactatgacgattctccttctgatttttaggaaagatttttttcttataaatctcctgattttcatcaaagatgttttccttacaatcatcttcttgattttcagcaaagattttttcctttgaagagtttgttttcttatcagttgtctcataatttgttttgaaagttgttttcattgcttattctcagggc

SEQ ID NO: 8592 - DNA, 2487 bp, Carica papaya
  Intron number 1 from transcript evm.model.supercontig_25.1 85 (locus evm.TU.supercontig_25.185) derived from phytozom e v7.0 (chr-ID supercontig_25; pos 1964057 to 1966543 reve rse strand)
aaattgagctcaagaaagcttccgattcacttaaagtgagttctatcacccgaacagcccacacccatatacgtgtttgtatgaatatgtgtacacgaacgtatttattttccagcttcctaaagtttcttgtcggttaaatttgggaaaatgatagaatttatttatactcgaatttttagttgagtggaggggagaggggttcgttgggttataaagagatgcagggatttggataggacacagtatgtcgattggacactgatggggatcatctcaggatgagcttctcttttgggaaggccatttatgcttctaatgggttagatattctcagttattagctttcgttttgtttcatggaaattggcttctaatgggttagcattagttgtagagtcagagtttctaaagtcctccttaagttgattaggagaaaattgaaattgaaaggaagacaacttatctagaatgtgatgtttttttgacattacgtagaagttttaagttatggattgacttctgctattctctggtatgtagtttgtgattattttttggaataagaggtatgcacatagcattaagaggcacgaaataggtaccacccatatgcaaaggatttattaaagatcagaaaccaaaatgtctacacggtttcagaaatattaaacagctaggataaggtgcactgcagaaaaaatacttcatgttggaaaccaataatttggtaaaaggaggcaagtggccccaagagactcacttgtttttttctctccaaatgacccaaaagaaatacataagaatgacataatgagtttctttcctaatttacatgttctaatatccaaccaattcctagaccatcttctaaccaattctgaagtagaacaagacaaattaagaaggacacaaccttctagtctctgaacatcatagaaggagatggtctggagattcatattcgtgaaatcacaaagggctgcttatgaattactttggagttttggccactggaggctaacaatcttgtataaaaatcgtatgcataatcgagaattgaacttttacgaagaataaatgtctccattagcaattggagtccatgagaatcaggtttcttttgttttctctgtaagaaggattcttgattgtgttttttggtatgcgtatctcctatagacattctgtaaacttcaaacaaaaaagttatatagttgaagtgtgtagtgtgtacgtggagaacaataaatgtgaaagcagatttatcaattctgttggctctgttcaggctgggtcctttttctttttaatttctattaagtcaactgaattaaaacccatttcaattatatccataatttagttaaataattatgtgatggttttacatctttcttttcaacaataagatcggtcagtttctccactgatactaatgggtgttttaagaaaagatggtacgtgaaaacattattgaaacattatttatatgtagtttctcctgaaagtgtcacaaggcttattgaaatggttgcatttgaatttctgaaagatttttatttcaaaaaataatttctgaaagatttaatgatttagggccttcttattcattttcatgtttatagttggcaatcctgatgccctgctaaaattggaatatgtataaaggttttatatggacttctgaggataaatcattgagaatttaattttccgtgaaggtgacttgtattatcccctggttttttcttggtgatgaataagtgcacgagatcgatttcaaaaattagacttattgtgtaacttcatttgttgttcatgtggcatttcatataatattgaattttgtacatatttttgtatcatggaaactgtaagttgatggatagaagttttggagattattctcagtgacgaattaagatgtagatgctaactgaaattagattgattaattctgctgaaattcaaattttaatgaatttaagctctcaaaaaaacgttctcttcaaaggaaattattgtaggtgacatactgtcacttagttttaattttatgttagtcttaacatggacaattacacataatttttgtgtttcagttgttagaaccccatcttgattctttttttaatggtggaaattcaattctatgtttcaaggtgagaattaaattttccaccatccaaggatttaagatatagatggtggtagctcaaacacagcaaattatgtattgattatgggtgcgaagcctgatatgaaaattataattgagtaggaattgaatggaaaatgaagtgcatcgtattggtaacttgccaactgcccatacttcaataacagaaactttgctgtaaatattccatttgaatttcgtgtttaaaaagagaagttgctgggttaggttattaattgcaaaaataacaaaaatataatttcaagcttccgttgtaatgattgcagtctgtattctttgcagtc

SEQ ID NO: 8593 - DNA, 2041 bp, Carica papaya
  Intron number 2 from transcript evm.model.supercontig_92.9 0 (locus evm.TU.supercontig_92.90) derived from phytozome v7.0 (chr-ID supercontig_92; pos 748023 to 750063 reverse strand)
tgctggacaagaacgttttaggacaattacaacaggtaaactactattttttctggtaaccttggggttttttgcgatgcaactaaataatgttcttgttgaatttgtgtggtaactattttttacaagaaaagaagaaattgtattttgaacagcaccaatacgagtaactcaagtacaacttactttaagccaaaaagtcagtgaactctaaaagttactttgcatacgcaatagaactgtccattgactccaagttaagtatatcacctgtctttataaacggaattgttaactccttcaaggacgtctatattccttttcttcttgacatccaagtatagatatggaattacagaatttcctctcctttgctttttggaggcactcgaattcttaatacctgtatttcttttacacctaattgccataaaccatccaaggccaaaatattgaacgtgttgtcttccatatccaattcaaattggtagttcatgccattcattccttggcatgccaaagtacacttttatcattctagaattgaagatataagtggagttgattcaattacgcatcaaatacataacttgtcatttgattgtgcagaatagatatttttgtttattaattagtttgatctatggaaagggggaagaatattgtaattgtttttttttttttttgtgttcattgcctatctgtgcacatagcggaaaaacacctgcaagatgtttgcgtatgcagacaattctatacttctttttgaggtggagtcacaatccactgcaattggcctgtaatagattttttttttgaaatagtgtgaaatgtatattactataggcatcaacggggtgccacccatatacaaaaaatttacatgtcaatcaaattatctacaaggttggttaattcttccattaaacaaagaggctgacctcgtaacaaaaaaccaaaagtctgaaatcatttaatcttaagtatatcaagaccattagcatcctcaaccccatcaaaagctttcttattcctctcctcgcacaccacccaaaatatggttagagggataatctccacctatttccttcgaccagtgatgcccctccaagcccaaattttgaccctcactgaacctgccgtgacccgattgattccaagcagaccataaaccatagtccatgacttgtgaattactaggcatcaaagcaaaagatgattgcaagtctcctctgccctcttgcctaaattacatgcattgaccagtatctttcccctcttctcagattatcaatattcaaataacattctctaattgcctcccaagcaaaaagcgaaacttggggaggtattctaggcttccacatcgcaattgggctgtaatatgctaaagatgactttcttccgggaatctgcttagagtggtaaattgtctaaatcctatttatccagtggtcgaaaatgcataatatctgaatttgcttttagatcagttggtgataccatttatatgtatattttcttaaagttatcttgggtggctgttcatgtacactgtgtaaaaaaatgagtaaaagaatagaaatgaaaggaagaaaatattttcaaaagaaatgaagggaaatgcatgttcttacttgtcagtactttattaataaaatgacaagttacaaataaggataagatatggaattaaccattaaaagttctaagtatatttcttcccctttcttttctcccaatatgaggaaattaaaaaattgaattttgaagaggaagaaagagaagcaagagatagtcacaatcgtttctttacctttgctagattttttcttaagaaatattttatccagaccataggaaacgatggtggatggtaccttatctcctttcagttccccttacttttctcaatccaaacctagtgatagggacttgctggatgatcatagttgatgcctatatagctcaagtttttttttaagtgctctctctctcatgtattgtctccttttcttttgtagcttattacaggggagcc

SEQ ID NO: 8594 - DNA, 1183 bp, Carica papaya
  Intron number 1 from transcript evm.model.supercontig_46.1 25 (locus evm.TU.supercontig_46.125) derived from phytozom e v7.0 (chr-ID supercontig_46; pos 1169257 to 1170439 reve rse strand)
gagcttcaagacaacagacccgtctactcaaactggtgagtttctcattctttacactgaatttctacagattgttgggtattctttgaagtttttgaaggtttattggtttgttgtgtttctgtttttatgtacattgacgtttgtagatgaggaaaatacatgtatagaaatcatacatgttacttatcattacgattcagtttttgttaatgaacttgttaaggtatgtttcctcaggttaagtagctggaatttttcctgaattcatatagttttgtacaataatttgtgttgatttttgtttatgtttgtcttcttcttcttccttttctaaaaggagattgttcagactttagaggatgccttatactcattactgtaactcttctttttctgatctttaataatacttctttcttatcaaaaacaaaaacaaaaaagaaaaagaaatttgcagcattaagaagaatattcttgttcttctttttcttctggaaaaaagagagatttctagccgatagaatcttcaaactggtcagttttgtacacaaagttcagtttgaatctctaccaaactttgatagatgccaatgcttaactatatcaatggcagaaccaaatacagctcttggactgtactgacatgcgtagtaatgtgggttatatttcataattgggttacagtgccatgttttctgtgggttgcttgcttagacatatgggttacatttgataatgttggttatattgccatattctctgtgggttgcttgggtttagaggttactttgggagtaagtcctaactttccagtagagaattagaccagtacatagcatccaggatccacccagtttcatatatgagaagggtttttctccaataagactgtgaaagagagagatgatgagaccttgtcttatatcacagatggtatttcacatacaaaagatgttttttgggctttctttctcattgcctgtaacttggtctgtatttagcattttctcgcctagcactcttgttttcatatggatcttgatatttggtttgaccgatcaaattctgtgttcttggatattgggtttgattgattgaactacatgttctttttcttttgcctttaaaattttctaatttggtttttctggtcttgttggatgtctcttgatcaataaag

SEQ ID NO: 8595 - DNA, 5638 bp, Carica papaya
  Intron number 7 from transcript evm.model.supercontig_99.1 3 (locus evm.TU.supercontig_99.13) derived from phytozome v7.0 (chr-ID supercontig_99; pos 156447 to 162084 reverse strand)
aagaggtagattttttagtattccttattacatcatatcatgtctgtttagggagttaaaatagtgtatctgtaccatgctatgaagaaggcatattattttcctcattacatttgtgatattctattatatgtttgcatcatgtcatgtctgtttagggagctaaatagtgtatctgtaccacttacttcccacagtactaatgattatgagactctcttccatacactctcttttgttacaattaacaggagcaacgaccaaccaatttatagacttaatactagagggtctttcttggttaggtccttatataattatttgattaaaaatgatgacacaaatgccagtatttcttttcggcaaatctgcaaggttactgctccacccaaagttgctttctttgcatgggaagcaagtgacgggtgtatctttactattgacaagctgatgagaaggtggagaatgttggtgaatgaatgttttctatgcaagagggagggtgagtcttgtaatcatatctttctttggtgcccacttgtgtataaattttggactatgacttatgggttactgggatcagttgggtgatagctagttccgtgagggaagaaatttgggcctggaaggatattaatagagcgaagaaacatgtgagtcccattcctcttgctattttttgaatagtgtgaaaagagatgaacaagagaggttttcatgaggtggaagatgactttgatagggtcaaaaatagatggtttcaaactttgggttttttggttatgggtcattttctttacataatggaagattttgggagaatttattgatattttaattgatatataaatatttattatacataggccggtaaccatttaatgattgtgatttagtagattatatcatatttttatatctaaaaaaaacatcttaaatatccataaactagacatctagaactatactttaggagaagtaatcaatcaaaaaggtcaccggaaaacagaaattcaaatcatgcaattttggcatctatgaagagtttatgatgtctaagttatagttatataggttttgtggccgaacaactggccagaaaaattgaaaacactttcggaagcccattgccacggggttcatattttttctaagatcctaaatcttcaaaaattcataacgtatttgattttcatgcaaataatacattcttagtgtctacagaaaacataggatgattagattataaataaaattgtttagtggacaaacgattgctagaaaaattgaaaacatggctagaacacactatcacacggttcacactctacgcagcccttaactttcaaaaattcataagttgctcaattctaatctaaatcatgaaatcttggtggatatggaaagtttatgatatgcagattataaataaaatagtttcgtagtcaaaagttggctacagctgagatctcagtatcgtgctatttgcattttctctgaaatcctcaacttcagatattcataacttcatcaattttaattcaacttatcaaccttagtgtttatagaaagtttagaataagtagagtataaataaaatttgttgcagaagattgacaaaaaaaaataaaaaaaacatggctagaacgctactgctacaacaattcttgtcttcttacatatgtataggtgcttcttttagcttttatgtctaggtatcatgtaacagagttctaatttagaatttaggagatttaccttgttgcaaacatgttcttcttctcctctctttttcttttcttctcttctattcttaaggttttatagccttttaattaattttttaaaaaaaaataaaaataatgtatattatgtataaggcaccaagaggtgtccctcatatacaaaatatttacaattcagttagtgcatcaataatcttcccaaaatcatcccatccatagagatcatgatccagcattagagttccaaaagcatgtatccacctatctctaattctagataaatccctcacatacccatcaaatgttttgttgttcctctttttccaaattactcaaaaaatggttaagaggtataagatttacaatttttgatttcttacatatctcaccccaagtcccaagtttctctctaaccgaccatgcaattatctgttgatgccaagaagactattttttttttagataaaaagtatagtatttatattaaagaggtaccaaaacgggggtaccgcccatgtacatgccaagaagactataaaccatagtccaaatattgtacgccactggacaccatagaagtaagtggttgcaagattctgccgtctgcatagacatataagaagcattagccatgatattacccattctcatcagcttctcaagagttaaaatacattaccgactcgcttcccaagcaaaaaaagcaattcttggaggagttttcgttctccatataagttgagctaccggaaaattaacattctctccactgcccttggctaagtgattgtagtaggagttgaccgtgaacatcccattgttcttcagtttccaaaccagcttatcctgtttatcattcaaatgcatggtagataataactgaagaagcgccacaaactcatcgatctccaagtcgttaagtttaataataaactttaatagagagtgtctctccacctcttagtgaaaccttaatatgtttttcttttctctttattgttagtttagaataattatattatcatttctttttttatttttgggaacagagtattacaggtagatacccaatttcattcctatcaagcttgtctaggtacatgccttccaaattttttcattacaagatcatatcccattaataacattggctattatttcaaatttcattcatgggaactgttatatatggcatcataatatccaactcctctctatggtctcatatttgttcaatgggcagcattaattgtattggcaatgaagacttgggtaatctatgagttacttaattcatccttgaggacaaggatgcctcaatggggagggtaatgttaggactaaaatctaatattggttaggttttaaaaaataattagttgagttgcctgtattagtggaaattagttaggaattagttgtaatttttgatttactgttatagagaaactaatgtaaaagagaaggaaatggagattatgtgagacatttttcgtaaacagaaatcctttgaattgaatcaagaactacactctttctcctttgatttcttatttcttcatcttttaatctctaaatcttctgttcttctttcttattctcctcaatcttttcttcttcttccttcgtatacttccaaattcttctttaattcttctagatcaagacaggttcctaacaaaaggtttacttgtctatgtttagcaagttcatatacatcaaaattcaaattttcactatttgaccctttgaacaaagaaagaaatataactttaagaaccaaaaaagaaggatgtccgagtctttagctatggagccaaattttgtccacagtggagttagattgttcaaagagaagagaaagagataaatccaggtacttccaagaagtacaacctgtcatttatcttagcatgtctaatcatcatccttgactcatggtcctgaaatacacatcgagaaatgttactttgaaattcatatcatgaggtaacttatttattggcacaagattagtggaaagttttctaacatgaagtactttgaaagactaatcttaacatctctggtccttgctatagtgattagtgaaccatttgaagtagctattttggtgtagggcaaagggcatatgtgctaaagttatgtgaggaatgtgtcatatgatctgtgactcctgaattaataattagagtttgcaaagaatttacctgagatttttaaaccatgtgaaagaaggaacttacttgaatgtgccaatgaacttgtacctatgggtttttctagagttacaaggagattcttttagcctcttaatcttcttctgacggaattatctactggactgtgaagttaattggacgtggcagtaaatagcgtaggtacggtgtagtccgggaaaccagaagcaaaagagaacaggacaactaactcgaacaaactgtgtagtaggggctggttggtgctgctttttgcagcttggtggcagctatgaaggctggttgtggctatgaaggccggtcggaaagtggctgcagcatgctggtgaagtaaggcgtgcagcattgtaggatgcagctagaggcaggatgcttggtggaggctggataacagagtatctttagctgcaacagagtggaaaaacagagcagaataggtcagaaacagagcaaaactaactgcatacgaaagcagagcgccaaaaacagagcagagctgcgcaaaaacagaataggacagagcaccaaaaaagaggtggctgtttgcagctgaaaacagagtttgtttgagaggagttccgctatggaggtaaggtttatgtttagggtttattccggcaatgtactccagtttagagtttgaaaatgaaatagaattttttctcttacagctttgatatacatggaagaatagaatgtgatgtttattattgaataatttgaccctatatatacacaatttaggtgtaagaaaaggaaaccctaaaattaattacataggtttgtttttactaatatactctactacaaaatcataactaacatacagtatctgtcaccattttttctttcgttacacattctccctctatcctttaatgagactttcaccagtgcttactgtagagctgaaattccctttagtgttaaggtctcttgtggaagactgctctgaacagactaaatagtattgacttgttacaaatccgcagacctgaccatcctctttgtaatcagatcggcatattaaattatttgagctgaacagaataatcgtattcagcctacttaaagaaaaaaatgaaaaccaagcatcttcttttctggttttggtgcaagagaggatttcactattgttaatctcaagaaaggaagggaaggttttcgtgaagctatatgtgctagagggtggctgagaaaccgagtcaccttttctggtatccattacccttttgttttgtgcgtattgcttttgaattttctggattgagtttggtgacttggtcttttttgttttggattttagcattggcagggtgttttttgtttaataaaaagagaaaagaattctctctcttagctcctgacttacatgtggcttatctagaaagacaggaaggaacatgaggccctttgatagatggctcaggacactttgttatttatttaagggtagtcctcttacttctgataaagatctagggaatttcatgacatcatgacaaatttgcaacttcttaaataggtagcaatcccttgttggcttgtttttgtgattgtttttttctctcaacagaagttttcaattattttaactcttctacaagattcactgatgaagatgattatgttttgatagttttggaggggtactctgggggaagccaaagaagc

SEQ ID NO: 8596 - DNA, 1647 bp, Carica papaya
  Intron number 2 from transcript evm.model.supercontig_3.35 1 (locus evm.TU.supercontig_3.351) derived from phytozome v7.0 (chr-ID supercontig_3; pos 2413442 to 2415088)
ctcaaggtaattattcatttctttctttgttacttattctatttttagctttcacaattatctatcttacccatatggtaaattacaggaagcgataatctgcaaacaccacatttgttaatctgatggatttggaaaggtctaaagccattaatggctagttagaattgcttacatccaccctccaaaagcttatttggtgataaatttaaatgtctcaaaatagtaattggtactacttgaaagaacaagcaacaggcttcgtgatgctatgtgaaaactttgttagaacttttggcagtattagattattaatccatttacattcaatcctctgttctggattttgttatgttgatgatacaggagttggtaatacgtgtgtctcacttgtgatacatttatctgatgcttaacccattttctgcatcatcttttttctttttccttttctgtttttcatttgttatacatttaaatgtgcgttgcaagttgttgctgcttcatttaacaacttactggttatattcaaatgtttgttctttgcatagaagtcatgaagaatgatgcagatcatgttgtataactggttaattctatcaaattaaactttgcaataaatgtttacttgactaaattactttagaaaacgtcagcataagcagtctagcctctcctctaccatattagtcacctgtttgttggctaaaattgcgcttttttagtaaaatcttgcttgtgtctgaatttatatcctaatgcatgcacgtgtccaacatgttagaacgtaaataatgatagaggcagataatttctatctacttgagctttcgtataacaactaccaagcacaatcttctcgtatgtcagagaacatgggttgagtttaaactttggcaatctcaccccctattattactattcgcatcgatttgcctatgttgtgctcatgagcctcatccactattttatttttatccatttttggactttaaaccattgtgtaaagccttcactttttcattctatccattttggcctttgaaccattgtgtaagacttcactttttcactctatccattctatcattgtgtaaagctatcaatgtccttttggcttgcactctgttgtttaatatgaggctgttctctctccttgaagttgagtccacgtattaagtattggttaatactcctgttcctcaaaattaaacttccacacatcatttgggttgatatcacttgttaagctcaatatcctgcttggaggtgattggctatgagtctatattttaagcattaacttgcatttcttttttttcattatcaattttttataactttgttgcttgtggccatctttagctcaatatccaacttgaatgtgaggggatgcctttatctactttgccaagggattgaatcattattttgtcttaaggcattttgctttcatctttgcattttttaggttttcttttcttgtggttgaagtatattttctactatccttctcattcatccctttctctttaataaagattcttttattcccaaaagaagatgatgaagttgggtgattttttatatgttgtaagtttttgagttttaaaatttgactttctttttgcctctttcagctggcca

SEQ ID NO: 8597 - DNA, 7783 bp, Carica papaya
  Intron number 3 from transcript evm.TU.contig_26180.1 (loc us evm.TU.contig_26180) derived from phytozome v7.0 (chr-I D contig_26180; pos 7494 to 15276)
cagagtgggaagtagatctaaaacggagggaaaaggttatccaaatagaataggaagtctatttctagctaatctaaatattatctcttatggctaagattaggactcaatactattagggttttatttaatccaggaatttgattatttagggtttaatgtttgttttctttagcagtaatatttcctgagtatgttggtatgttactcttagttttgagaggattctagttttttaataaatagttctttagaaaattttcaatctttctgattgtgtgctgcaatcaaattgtgacaagactttttttttgaaataagtgactgttaagaattattaggtgtgatatctaagaaacccctaggtgtgatatgtaggtttaaattttatctcaaaaaaaaaagtgatatgtaggtttaaatccccaaatactgaagttgcaatttaccgcttatttcttgaatatcaactttcatactgattttttttttttgttttgaataaaactttcatactaaatcttgttttggatttattctttagtctcttttctaaatgaacctaattcaaataggaaataaacatcttaaactgaaggcacttatctctctttctcttgtctttttctttaaactaaaggcacttctctctctttttctttaaattaaaggcacttctctctctttctcgtctttttctttcatgttggccagttgacctctttggccatgctttttctttcactaaggaaactcttggtgatggtaaggaaaagatttgatattgtctgagaagttcaattctagatattctcagattttttgagaatgggtgagagccaatttgctcttttgattgtgaaatatcgcttttttgattttttgggttataagccacaagactctgagatgggtttgttgggataagatcaatttctgtcaattcggttggcagaaatagatggatgcagttcttggagttgagggaaaggaataaagaaggatcccaaaagtgttcatcccacagggcacttaagttgatgggtacgtggaattccttcttgctgttgtgcaggtttgtgatccaagtgtggaaaaatggaagaaagagatcaagacgatcccttctgatttgaagatgatgtccaattgattgggtgagcagcaatgcactcccattttagtgggtctaaaaggagttttcttttgtcctaagtgcgaccatcagatgactcttaatgttcaaatcttcaggaggtatggttaatgacaactttcaagaagtcctcgtttgtacctttgcaaatttagtcaataaaggctggacatggaaaaggtatttttgatttgcaaagaggggaaagtcgcccttgcttgtggtaaatttgggcatgcaggttatggctcatgaccatctcaaaggttgggtccttgggtaaaggctcaaaatctgagttttctaagcttgttttgttggagaaaggtaaaaaggttgctaaccccaatgtcctttaataggcaagcccggagcactcttaaggagttaccgcctttaaagagggagctgattttgctttctcttcatcaacctcttcggatgttttgccatttgccttccatgagagttgacactgtttgggcgaatctagtacgaaggaagagagatctttattgctagcagggtttagtagtccaatggcctcaagtcttctaagtaagttgcacaccatcccctatggatcctcttcttctttgtctaaatatggttcttgtcttagtcaaggaatcctttttctaaacaagcctgctgaatggtggtctcttgttgcgttgggggaagggctttcaaagggagaagcttgtggtggttttgaaggaaacctttgctcactcgttttctatgcattccttatgtagaagtgacatattggattctatttgaactgatgttttgaacttccatagatttattgggttaggctttgcaggctttgaagctcaagctcttgagttacttagtgcaattgaagcacgtaccgatagaggggagcatgctagtacttatgctgagagtcatgagaggagctagaatggagccaatgaagaattaagaaggcttgattatgccggttaactatgagaaaaggtcagtttgaaagacatgttgatacaaaaccaacagtagaaaataaacattttgggaagttttacactaaaaagaataggaaaattttattttctttttattctaaaaggagtaggaaaatttaatttcctttcccaatagacataatagtttctaaagttacaacaaaggaaaataagaaatcataagaaagatttcctattttcctaattcttgctatttaacttattttcctattttttagattttctaactttcctaattttgttgtattttggtacctataaataagatatcctaacttagttattaagtagaccattcatgattattatttatatactgagatatttctttaatattgagatccaagatcttcatattttgattcttaataacattttcataagttttgttttcaggctctctgtcatatatcacatgcaagagaataaatctttatctctagtggttttcaatgttaagtagaatgatctcatggaatgtgaagggtctaaatgataggagcaagagaacaattgttaaagtcgggagagaacttgtttgactgcgtgaaactaagttgttgattgggggggagggggggtgtcacgagctttggcacagtggaggtagttattgggttgattttccttgcttggggacattccaaggtattttgattctttgagatgccgtctccatctctttttaagctctacaaggaggaaagcatagactactttggaatgacttgaagatggttaaggacttgtcttctctcctctggggcattggaggggatttcaagatggtgcttccatgtataccttgcaagtttattccgttgaattcaaggatatgttgatagaatgaatctcatcgatctaccccttattgaatggccactgaaattggtccaatatgagagaaagagcatctttctccttcatttcaggttctttgtctcctttaattttaagaacttgtttttgtatcaaattcaaaatattcttctagtggttgttttgaatcaccatcaaatctgtttggagctcaatgatcttagttgggcctctatccccttctagtttgaaaattgatggtttaaggtggaaggcttccatctcttggtccggtcatggtggggtgagttagaagttaaggaccttgctagcttcagattggccaacaatttggttcatggcgagcctcatagtaaggggtggagctctgttgtacttgttaaagaagttgcctttaggaataatctcgctcatgtaattgtcaagcttgactaaaaggaggcagctgagagcttatttgagcaggatagagaaaggagacaagtagtaggaaggaaattgttaagtttttacttatggaagaggtagcttagccatagaaatctaaaatcatttgtttaaaaaacggggaatggaacaataaattcttccataagatgggcaactatcaccatagagagaattacatgactaaggttgtggtggatggagtatatgagttgggccttggtttaatggagttgttaaggatttctattagagattgtatgaataaaaggtatcttggaggtctaatcttgatagtatcgagtttgatagaagtgatgaaagagtttggtcagaggaacccttagtcatggaagagttccttagtgctctaagtctgcaatggcactaaagttctgggttttggtagttttcccatgtgtctttggcaacataattggggtgttatagagatgattgtttcatctcttttttgcaagcttcgctatgttggaaatacgttgcctctttgaactctactttcattgttttgattcataaggtggaagttgctgtagaggtgaaagattcgatcaattagccttttgagtaacattcaattggaaaggtcctcgctatctgctgaagccaggcccatagccatgtggtggggaagaggcacacttttgtggaagcttggttgtgatggatggagtggattatgagttgggcctttgtttaatgggagttgttaaggatttctattggagattgtataaataaaaggtatcttagaggtctaatcttgatggtatcgagtttgataaaagtggtgaaagagtttggtcagagggaacccttagccatggaagagatccttgatgatctttggtcctacaatggcactaaagttccgggattgggcggttttcccatgtattttggcaatagagttggaatattatagagatgatgtttcatctcttttttgcaagtttttctacgttggaaatttgttgcctctttgagctctacgttcattgttttgattcctaaggtggaaggtgctgcagaggtgaaagagttttgatcaattagccttttgagtaacatttaattgggaaggtcctcaccaactacttaagccaggcccatagccatgtggtcaggaagaggcacacttttgtggaagtttggttgtggtggatggagtggattgcgagttgggccttggtttaatgggagttgttaaggatttctattggagattgtataaataaaaaggtatcttacaggtctaatcttgatggtatcgagtttgataaaagtggtgaaacagtttggtcagagggaaccttagccatggaggagatccttgatgatctttagtcctgcagtggcactaaactttcgggattgggtggttttcccatgtatttttggcaatagagttgaagtgttatagagatgatgtttcatatcttttttgcaagttttgccacattggaaatttgttgcctctttgagctttactttcattgttttgattcctaaggtggaaggtgctgcagaggtgaaagatttttgatcaattagccttttgagtaacattttaattggaaaggtcctcgccaactgcttaagccaggcccatagccgtgtggtcgggaagaggcacacttttttggaagcttggtgggttctagacaattctcccattgctagttgttttttcttacttgcttgagagggtgaaaattttgatcatgtctcccatctcctaagttgttttttcttgcttgcttgagaggatgaaaaatttgatcatgtctcccgtctcgttttttttacttgcttgagagcatgaaaattttgagaaaagtggcacacttggatcaagagatgattccagaggcttgagacaaggggacctcactttcgcctttttttttcattcttgtcatggaagccattcaccaaatgatctagatggctaggatgggcaatttgatccaaggtttgactgcgggtaatggtccttctaaggagattactcacctcttgtttgcagaggatacttatttttttgttatcttgaaaatgagcatatggtgaacatcaaaagtattttgatttgctttgaggcagtcttgaggctcaaaatcaacttggacggatctgaattggttttttgaaggcgcttgttctagttggtgagctacctaatatttagggatggcaaaatgatacgaaaatatgctaaaactgtttgccccgatagaaactgttgcaggttttaactgaaaccgagcaggattggggcgggtcggagtggttttcaatttgtctaaccggggcggtgcaggtttgtgtttgcgttgtaaaaacctgcctgaaccacccgtcactgtttattaattaaaaaaataaaatatatataaaataaaaaacatataaagtaaataaaacctaaaacattccgcttcctcctgtccacacctcatcttcttcttcatcttcatcttcatcttcatcttcatcttcatcttcctcttctttcttcatcttcatcttcatcttcatcttcatcttcatcttcatcttcatcttcctcttctttcttcatcttcatcttcatcttcatcttcatcttcatcttcatcttcatcttcatcttcctcttctttcttcatcttcatcttcatcttcatcttcatcttcctcttctttcttcatcttcatcttcatcttcatcttcatcttcatcttcatcttcatcttcctcttctttcttcatcttcatcttcatcttcatcttcatcttcatcttcatcttcatcttcttcctttgtggcttcaaacttagatccactcaatgtatgttcagcttcctaaattgtagactgtcgatagggcggagcagtactgatttcactgtaaaccagcacaatgacagcaaaaaaatgtttttgtttttattaaataagctgcctggttacggggcagtacattctgtactggggaaggttttggctttggtaaaacttgctccgaatctgctctgttaccgtccctactgtatctaggctagagagctaccatcaaacctattaatgatcttggcttacctttgggtgctaagtttaaggatctcagtgtgtggggtcctgtcatcttgaagatggaaaagcagttgtccacttggaaaagtaagtatctgtgacctatctattagagggagactaactttaattaatgtcaccatttcagttagcctatctacttttgctctttcccatccctttctaaggtggtgagaaggatttcatctatctcaattctgggttttttctcctaatcgtctcttccttcagtgcttgaagtctagatgattatgagattttgctcttagcctctccaacctctcttgggtggtcatttgtttgatggcagaggaattctggtttgggaggcatcttttttgcaaggataagaagaagctcatttgctttcatcctttgggctgtttttgcggctaatttagaaggaaatgagtagggatggtaacctagcgggtgtgaggtgggttttaccgaacttgaattcgacctgcctatatgaaaaacaaatccaaacttggtccgaattcggggtatgttttttctgtagatttttttggtctgtgtgtgatttacgacttatttgagctgaatctgatccggtcatttaattttattaatattattatatttatattaataaaagattacaaacatgtttattaatatataataatatatactaaatttataaatataactgtatttattaatataatataatataatatatttgttaatataaatataactatattattgattgtaatatattatattttataaatataattataaatacatttgtaataataaaaattaaaataaatatacatagtggactataggttttggaaggtcaaacctgaacctttggaccgacactttaacaaaatgaaaaagaaaaaccatactggattggatttagccgagttggattaaactgattgaggtgcaaaatgccattcctaaaaaggagctatggatcttttgaggacgctgtttcttgttttgctagatattggagactgcaggttttgaatcctaagttcttgtttagaagtcttctgtctgtctggattcttgattttttgtgttcctctggatggttttgggtttctttttttccttcgtggtatagcaccctcttggtgcctatatatatatatatatatatatctttttaacaaaactttctcttttccaggacataaagcgaagagaag

SEQ ID NO: 8598 - DNA, 9970 bp, Carica papaya
  Intron number 5 from transcript evm.model.supercontig_122. 39 (locus evm.TU.supercontig_122.39) derived from phytozom e v7.0 (chr-ID supercontig_122; pos 855333 to 865302)
aacgacattataaggaggcagctgcacagctggaggtatgttgtttattagtaaactattcattttttttcttctcagagttatgttaagtttccttcaatgtttttgtggaacataaatttcgattgagatcacgtaatcatgtactctgttgttagtataattgacagcttctaagtatcaaatgtcgggatcttttttctgtcttaaaaaatgtcttttgggagaaaccaaaccagtttttattcttatatatgtctatcaacactttaaatcaacaatgagagtgtaagtgatttgttgagaaattatatcatcaccatcatccctctctactgctcctaaacctccatttcaagctggcccgacctttaaaagcaaaaaactaagaaattaacaagacaatcaagccatcagccaggtcatcctttgtgaaccgagatcctataaaaccctaatgagaaaagccaaccatactaaaattaaattaatggattaccaggtaccataaaatcaacaaaacaccaacataaggtatccccaagagaaaatcagaatagatatgaagaggcaaatctaccttttctggtattgggttccttcgcaaaatcaacgagcattgtctggataggttctggtgctcgccacagttgtagcagttcccgccaccacctccacctccacctccacctccgcttccatatctcccaccgccacctctgccataacttcctccaccttgaaagcactctatcaccatatgccctgtgtcaccaaacttgaaacaaccaccgcggctgttgatccctcctccgtagccatctcttcctctgccccctttccactgtgtccaccacctcctctatggccaccaccaccatcatcttctctctcttcccccccgcccgccccccaccaaccccccaaatatccactggtacacctgccacctcattgccctcttccatagctaccgcctctgcagctactgcttccttggacgatgctgtcattaggaccagtgacatctacggccatggtttgtccattgacaatctcgatgatgaacttgacctgttctccctcaccaggctcttgaaactctcgtcgtggatggaggactttgaccttcctactttgttttcaaaaatgttgtcattcttcttttgaaaatggaagaaatgaggctttttgattgattgaaacttctccctaattgagtttgaaaatttcttattgtagtaaagtgaaatgatgaggattgtgactcatcatcaactattctttgccagaaagcatcttatagtctcagttatagtttgtctggattagttagtattgtttatcattttaggtgagttgaatgaaatcttttgatttgtctatggagaataagaacatcaatcttatctataaacgcgagcccgggaatataatcatttcaaatactcaaaatccaagtcattttaaatcatttagagaagaatggggtgaaatagctgaaaactcttctctctatactatcttaccaagaaaaagaataccaaccagttaactgagagggtggtagatactgtttgccgaagattcatcaaaatgctaatgtcaacaactgtccttgttagaatatgctggagggatgaagaggaatggtttatttgtcctttagggagggttagaactggaatgaggattctagaaggagtttcggctgagtatgctgagagatgtacgagagccaagatgcatgaagagagacttggaaaagccatgattgtttttttgaaataaaaagtgtaaatatatatatattaacaaggtaccaaaaaaacagggtgtaccactcattacaaaagatttacaaagtacttactatgtcagtgacatttccaaaattctcatcactaatgatgtcatagccttcttccctcataaaattatttggaactctctcgccccacccaagatttctgtctttgcttgaaaagctgcaatagataacatttttacacttgataacctcatgaaaaggggctttgtcttggctaactggtgtgttatgtgcaagcagaatgctgaatcttgtaaccatcttctcctctggtgccccgtctcctataatctgtggtctatgatttacaagctgattggtttttcttgggttattgctggctctgtaaaagaggagttacttgcctgggaaggcatcaatttcttcaacagatgacacaaaattattcctcttactatcctctggatcatttggaaggaaagaaactactgaacttttgaaaacagagacactaacattacttctattaaggacaagtggttgcacttttttggttccattgttcttggtcataaccttgtctcttttaatgatcttggttatattgtagatattcttactgacctataaatttcttttgtacacgggttcgtccccttggcgtctctttaatatatcttcttacttttatctaaaaaaaaaaaaattaatgatgtcatagcctaacaaaataaatccaaaataatgcatccatttatcttttaatctgtacaaatcaacatctttaccctcaaaagctttagaatttctcccttttcaaagaacccaaaaaatggtcaatagaatcaatttagtttaacttactatctaattgcttaccatcccaagtccataattcctctccaagagaccccgccacaatccaattgataccaagaagataataaatgagacttcaaagctcaactgccacaggacactacagcaatgctcgattcttctgctttcttacacaaatagcacctgttgggaatgaacatacctgttgcttttaatttatcagtagtcagtatacattccctgcaggcttcccatgcaaaaaacgcaattcttggtggtgctttagttttccatatctgtctcatagggaaattttgtagctgaacaagatctgtcctggttaactgactgtagtaggactttactgaaaatttaccactttttccaggttccaaacaacccggtgaagcaagcaattgcaacaaattttcatactttttgacttcccaatcttgcaaatttcttgagacattaatccaccaatccacacaaccattattgattctgtaagcatcctggacaaacagatttttcgtctgtgcaatggcaaaaattctgggatatttgcttttcaagctttcattcccaatccaaacatcactccagaacagatcttgctaaattgattccatgatgactggagagaaagtagcgagggatgcttatgatctgggaggtagtggagtaaattatgggaaggtcttttcagttctcaaagaggttgaaagtaagcttaaaaataaggtttggctcaattgtctttgatccagacagcacctagttggaagataaataaggctcatcactacctcttgacaacatagggtgtgtcgataggaaggaaggttcaatggccaagcagggaattaaagatgactttaacaagtcgttaggtgtgtcagtctcttaagaggttgagagcttggttctaggggataaacaaggagctgataaggaagtggagctcaaaagggacgatgcttttgttgtggaagaagaagaagaagaagaagaagaagaagaagaggcaattagaagacataataagtctttttggtgaagggtagcaagggtttgcagttttcttatcttaaatttggtttaagaccataagggggttgtggtaattggcgattttgattttgaagattatcttatcttatccatgtcttcgtttgatatggcagatctcatacatgaagacaacttgttgggaggataataggaagaatgagaaatggatttatagaattagaatatgaacatggcgcaaacagaggaagatagtaactttgtgagtttgggctctttgaagagcaaagtccttctgggcaatgattaagttgagattatgagaaaactgcaatgtattgttgggtgtaccattggaatgatgctactgcaagaactgtgactttataagggagtacttccttttgaccatattttgtttaatccttactctacttgccagataatattatgaatgaatctagtcttaacatggcaacttttgtagtggggtttgaaatataaatatggacaaaggaattctaccattcttaggtggaggatacacaaggcaaatgagatacatcaagatccaaacctttttatctagtcaattgagacagatgtttagatcccagtaatatccttcaagaaactggacttctgattggtggactcatgttggaaggaagtgatggtgtgggtttctctgatggcttatgtcagaaagaaggggcaagaccaacactaagattaagagactggcttctgtttctcgatacggaggatcctaaggttcggaggggtaaaggcaatgtgatattttgttattttaatagggccaaattttttgttattgaacctctattactgcaaagtgtttgggatactagttttaaggattggtcttttagccccttgtagagatgataagaggcaggtacgggtgtgtatatccactctgctacctgcctacttaggaaagtcccatacgggtgtgtatatccacatgtttctttattcaccaccaacaaactgggtaaaattttctacttaccaccagctctaattatccataggcacttgtttgttcacctacccacccaaccctgaaaacctacgctatttgcccattttttatcctaaaaactcttataaaaatattgaagaaaaaattaaaacttaattaaacaatctaaagtattaattaaaataaaatataattttaaataatattgaaacataatctactcaataataaatataaaatagcattacaaaagtgcgactaacattttaactaattagaaaactaaagcatttcaattacaacatatttttgaatattaagcataaaagatacaaaatatttatacatttattaacttgctcaattaatcatgtagatcacttttttgagataatatattttttgggttgtttggaaagaaaggaatttgagagcttttgagggtttagaggttgatagatataagctaagagataggtggttcaaatattttgtgtcttttattaacttgctcaattaatcatatagatcacttttttgagataatatattttttggtttatttggaaagaaaggaatttgagagcttttgagggtttagaggttgatagaaataagctaagagataggtggttcaaatattttgggtgttttattttagaatatgacatcattagagatgaaagttttgggaatgtcattgataccctcacaaccttgtaaactcttgtgtatacgggcgataccccctttggtacaatactaatgcatttttaactttttctttcaaaacaatttttttttgggataaattaatcatatacatcataatatgtaagtatttggatttgtaagtaaaaatatttggaccaaatatttatttggttaaaaacattgatttatatatcaaaattggttattatttaaaaaaaatatataaaaaatgtttaggcattatattttattggagtaaataattaattttacaaaatttatttaaaatttatatttagtttaattagaagagaataaaattattttatgaaatgataatgataagcttgcttttaaagagagctaatttaagtagaattacgaataaaattaaaagtttattaatcatatatatatatggtaggttggggtagggccggacgttataggtatatcatttaatccttcctccctttacctgtttcatattttgaaacccacggtctagtaactttttaattacatattttatttgtcctcattaactcgttaattaccagtttttgcgcttcacggatggtagggctagtgggtatctcacccttatgccccatctctagcttcttgacaggggccctctggaggtgtttgcctaatgtcgtataatagagtggcttcttacattgattacgttgaaggttccttctccctgttggttcttttgaatattaggggtgaaggattatggcaacttacttgtgtttgtggccctaatagtgtttttcactatgttggagaggaattctcttatgtaagtggtctatgtagtcctttctgctgacttggtgggaactttcatatatgtagatatctgtctaagaagtgggaaggtaacaaattgatagttattatgggggctttaatgatttcacccagaattgtgagcctagggaacccttttcaatgcatagtttacctagctggttaatacgacagagtggtttcgtctcatactgattgcttttttgtctccacttgctgggagatacattccaggatttagtctaggaggtccttcctcgtgttgtttcgaatcatttccctatttttgtttttagtttgaccaggtaggttttggtcccactccattctatttccaaaacatgtgcttgacccactatagttttgtggaaagtattaggcattggtggagggagtgtaatacagaaaggtgggaggatcttagattcatgaggaagttgcaatttcttaagggaaaattgaaggtttagaataaggatgtttttggtgacccaagaattaggaagaattttattcttcaagagatatctgctcttgatagagttttcatagataataatatcactaaggatcaaataacttggttatcttcatttaagatgattctgaagaagtgtttattaaagaggacttcagttggtatttaaaaaaaaaaaagaggattttagtggagaaagaataaggtgaaataaattagagacggcgatgctaattctagattcttttatcaaattgttaatgataagagaaggaacagctatatcaaggagttaggattggatgatggcataattgaacggatcaagggatgatagggacgatgattactgagtttataagaaactttatgtaggagattacattcattgttctttcattaaggggcttgattggttgctgattggtgtggatagagctaagtagtctgaaagacctttctaggaatttgaaattaagcaggctgtgtatctcagtgctaatacagtgcttcgtctagatggtttaactaattatttttttcaacggtgtggggacattatcaaagataacatgttaaaggtttttgatgaattttatctcagtagaaagattggcattagtacgagtcctacttttattactttgatgcctaagaatgattagtctatcaaggtctctgatttctgccttgtaagtctaatcgtcaggacgtacaagattatttccaaagttctctcttaaagaatgaacaaggttttggagggagctatatctatttatcagagtgcttttatttggatagacaaactttagcgcattccttatcgccaatgaagtggtggaagatgttaggaggtataaatctacttggttagttcttaagttgttttcgtagaaggcttatgatcgtgtaaattgagattttcctagaacaatttttggagaggaaaggatttgtatacaaatggagagggtggttcatgtggtgtcttttctctgctatgtttgcaattctaggtagggcttgggattggttccctgtgttgcatgattgaggcaaggaaaccttttatcttaagagtctgtttatgattgttatcaatgtttgagtcggatgctttcttgagggtcagagagaggtatgctagagtgaggcttcccaccttcaatttactggggatacaattttcttcttccctgatgatctacggaaaattttaaaatgggattaccatttagcaccattttagtttatttcaggtttaaaaactaatctcactaagagtggtccgataagttttaacattgagaaccatctagtgagacaaatagccaattatggaggtttatgaagtgttggactggccttcttatcttggtgttcctttagtggaatcctagggtttcattcctattgtgtgcaagagtccatatgtagggagctggaaggctgcactttttaaattatttcaggtttaatagttaatctcactatgagtggtctaacaagtattagcattgaaaaccatctagtgagacatatagccaactgtgtgcactttgaagtgttggattggtcttctgcttatcttgatgttcctttcgggaaatgctagggttgcatccctgtctcctacaagagtctaaactcgtggaggcctggaaggctgccctttattctcttatgggaaaggtcattctcattcaatcttgcctgtctagtattcccttttatttcttatcactcttcaagatttctagaggtgtggctgatagaattgagaaggtgatgaaatcttttcttttgttgggttcgcgggagcctaagagacatgatttagttagctgggagaagtgttgtacaagtaaagagaatgctggtcttagcattgggaactttttttgtgaaaatctatctcgtttaactaaatagttatgagatttgctctagaaccgggttttttgcagcaaaagggcattaagtcaataagagtaagtttggccctcactgaaatgggtgggattccaaagccaatggtttctgtgcttgcaagagcatacttcttttctacatctacttcagatgaaggtaggggatggttatcacttccttatttctgggaggctcttgtactgataatgtctctcttgcatcctgtttccatagattgtgtagagtctccagaaactagcactctttgattttttcctttctgatcttgtggtacccattgttagtatttctttttcagaatcttaatgacagggagactgtgtactttactgatattcttaacttgttggactctgtagtcttttctaataactgtcattgtagaatctagtcttcggattcttccagtatttttcctgtaaatcatatctacaatttttgattcacaacaatgccatttagaacgtcttcgtttctaaattcctttggaagacaaagtcttttaaggtaaacatttttttttcttgattacgattttgcacaggcttaataataatgacatgcttttggttcacagattgaattgagccttgtatcaggggttcatgtgatatgttttggagctgctgagactcataaccacatatatttgcattgtcatgtggcttgaacgaattggaattttgtttttgaagtctttggtttctcttgggttgttcctcagagtattgagttttttctatcttctggaatcacaattctagtaaagaagagggaggttaatgttatttgggttagagctatgattgccctgttgtgaatgatctagttggagtgggattctagaatttgttgagaccagtcacttatgatgattatatgggatgaagtttgctttaatggcctctgcttgggctaaggccaatggttgctttaagaatatttctttttcatttccgtgtggagattaagtgatcattctttctctattttctttttgtttttctctcttttcttaagaaattacctaatcctcttgtgttgtactctttcgttcttaattatgtttattcttttcctatacacagtggttttttccccaattttttcacagttctaatttattctggcaaaagaaactagagccaactttaagttcttttccttcacatttataaaaaaaattcttttttttcaatccaaaaattggaactctctcattatctggaagtgcttacaagattctttgggcaaatttattgttcttcagaaattgaattcttttactcatggtgggtaatgatatatttcaggctgttaaccagtt

SEQ ID NO: 8599 - DNA, 7543 bp, Carica papaya
  Intron number 2 from transcript evm.model.supercontig_7.8 (locus evm.TU.supercontig_7.8) derived from phytozome v7.0 (chr-ID supercontig_7; pos 196916 to 204458)
gaggatattgaaagccccagagaggtatggcactgttgttttcatagttatgcttttttttatctttatgtctgcatcgccttaccacgtaatggtgtatacacttttaaaatcacaacactaatagaccaagataatgggcaacactgtacacaaaattttttgaaagaaaagaaatgagaaggggaagaaagaacttaaagtaaaggtgggggaaagaagaaagagagagggaaaagtgggacaaagggaaaggaaaagcgtagaaaggactagaaaccaaaattttaaggagttagaaacataataatcatcataatctcttttgcattatgatgagtgtcttatatagcaaaactaagtggccgaaagaactaatagaagtttatttgaatgagtcatgcatttgaaatttggaactcaataattgattgagtccaaaattttcttctctctctttctttctagtgccgctatgcccatcttttcacctaagaagtttatggtgattgagaagaaatcatttgatgtagtttgagaagaaaataatggagatattttcagaatcacttagaatgaggtcgagttaacgccatcatttttttctcttcaactaggatatccaatggttctttaagtctttgtgtgaatcctgttggttagaggtcataagtgctggagaaagggttttgaagggagttgatctttccatcttcaccaagctgggtaggaataagagaggtggattcatggatctcaaggagaagaatgcaggggggttactgatgattgttcatccctgaaggaaccaaagctaatgggtgatggaggatagttttgttggttagtttaatcaataatttggctctcgttgaaggaagaaagtaacaggtccttgctagtcagatggccaggcaataaatttacgaaggggtgaagttgatactcagttggagaaggctacagttggtctagcgaagaaggaaactatggtaactatggcgaccaattgctctctcagtggcgtatgttaacattgagagtgtcctctcctacctatgttgcaattgaaaatcagtcatcaatctgttagtgaaggagaagtttgttacttttttggtatcccaaccgcctcttgtacattttaatagtggaagatctaaaattcaaaacaggatgggaaccttatgtgtgtttcttgcaggctgaagtggggctggttcgggccttgcttaccaagccccatgaccaaaacctcattttttggaaagggcaaatgggttccttaggcccgtcagttggcttctcccttgcttacccaagccccataggccctaaatctgaaactaatattttcctaaatagcctaggtaacatgaaattatatggatgtactaaaatcaaataaatattataaatattttttaacactaaaaacattaaatcttggcttattcctgtcctgcgtcatcatgatatcatatttgaatgtctgtcatgccaatgataattgatgctgaagtcaaggagattttttaaaaaagaaggctgtggaggagtgtcatcgaggcgagttggggtggcttggattaatgtggagatgtaggacagaaaagaagggtcatgggttaggtctgtggaagaaaatattgttgggctggcctagatttaaagaatgctctatatggaagctgggtagaggagataaaatcagattttggctgaagagttgatttccaaggatctttgcaatagcacaatcaagaaatttgctgattgaggaggcgggtcagtaaatgttaatagtaaatgattgggaagtcagagaatatgaagaattgctgcctcttatttctgaaaaacatatcacatcagagctggaccaattcctatggaagctaaatcaaaagggggaattctctgtcaaatccttctatacgcacattgtagaaatgtatatatgtagaaatgtaaatataatatggggtaaattagtattttactaggttgttatgatagctggaaaatgtccactaccattgcaccccgttagattgttagaatatttttcataacctttttttttgtttgttttggccgaatgcctataaattggcatctttgtgcccaataataataacagaggattcttctcttctctcaaactctcaatctttttcatggtattagagccagtctgatccacatttatcatccaaatcaaaccaaatggtcacggatgagtaaacctcttttccacctgaagttcttttaggatcctatcttccaatgccagtcaacaactctcacgttgatcaggcaccctcgtttgttactggacataggttgaatggaagcaactatctccagtggtcttcctttgttttgatgttcattcgcggaaagggaagagatgagtacctgactggagagatcattccacctccagcaaacgacctgaacgctcgtacgtggaaagtcgaaaataatctcgtaatgtcatggctggtgaattccatgacaacagaaattggagaaaattttctgctttatgagaccgcgcacgatatttgtgttgctactcgtgagttctattccagccgcgataacacttcagcaatcttcgaaatcgaaagccaccttcatgacctgcgacaaggggagctctctgtcgcttaatactatagcgccctcacccgtaattggcaacaggtcgatgcctttgaagaacatcaatggagttgtcccgacgattctaaaattttcaaaaccatcactgaacgaaaaagggtcttcaaatttctgatggatctcaacaaaaaccttgatgaaattcgtggatgcgttctgagcaccaaaccgttgctgagtctcagagaagctttcttggaaatccgttgagaaaagagtaggaagaaaatcatgatgggagagtttggcctgaacaccatggaaatgggttttgcccttgctgctaagaagaaattctctctaggtgaatcccagaacagtgctcttgtctccgagtacacctctgcctttctggtcgcatttcggaagctggaggaagaaaggggagaccgcgatgtgagttttgcaaaaaatctggtcatacccccgagaaatgctggaaattacatggcaaaccagctgagaaaaagcattcaagggatgaggacaatatgttaatttccgaggaattatcctccgccctcacatccacagaaacaactcccttcaatccagctcagatggagactatcttgcaaatgttttctcagaagggcctatttggtaatgtttcagttgctcagaaaagtaattgcttattcagtttatctgcatattctgtgaaaaggcaaatatggattattgattcaggggcatccgaccatatgactggggatattacactccttcactagtacagtaagtgtaaggaaattttctctattaaaattgctgacggaacaagttctaaagtggcaggaattggctcaacctatatatcaccgaatttggttctacattccgtcctctacgtaccaaatttggactacaatctactatctgtaaacaaattatgtaaagacttaaactgtgtagttaaatttgacaaaagaatacgtgtgtttcaagacttggactcggggaagatgattgacagtgttaagaaggaatcagaactttattttctaccaatcacaacatcatctccaaatggacaaactacaagtgtagtatgtgttaattctgtatctgtaggatgttctagtattgaacactctattatattatgatactatagattaggacatccaaactttatgtatttgaaacaattatttcctgctttattcagaaataaaaatttaagttcatttcaatgtgaagtgtgtcagttttttaaacatattcgcaattcatatccaattattacttataaaacttcaaaaccctttgcattgatccatagtgatgtatggggatcgtcttaggtgaaaaacattattggtacaaaatgattttctccttcattgatgatcacactagaataatctgggtctatctaatgaaagaaaaatttaaaattagttaaatctttaaaaaattcaacattatgattcaaactcaatttcaaataaaatacaagtgttaaaaactgacaatgcttatgaatactttacatccaacccctcaataaaacggtgtagcagaaaaaaaaaaaatacatatacttgaagtgtctcgttcactcatgtttactacaaatgtttctaaatttcttcgggaactggctattctcattggtacataactgatcaataggatgccctcccgtattcttaaattcaaaacactttatgactcccttgttcaagcatttccagagtctcaaattcttcacacaattccctttaaaatttttggctgctctccttatgttaacattcacactcattatagagggaaactagatcctagagcccttgagtgtatctttgtcaggtattccttctctcagaaaggttacaaatgtttttgtctagtcacccaccggttctataacactatggatatcactttttttaagaacaaacttttttatcccactctcaatattcaggaggagacatctggtactcaggaatatcaattgtgggatgtgaacatatctctattacatgttctattaacaacattagaaaaagaatccgtctctcaaactaccaaaaaacctgaacctgaacccatcacagagactgataacgcattacttgcagtaagtaagttgtgtgtctataacaggaggaacaaaactcaaagtaaagataaagtacctgagtcaactatgtactgtcatgattcaactcctggactaaacactcagaataacacaagtaatgagatctctgactcaattgatgatattggtttacctattgcattacgaaaaagtgttcgctcttgtacaatgcatcccatacaggattatgtctcatatggcaaactattttcaaaatatcatgcttttatgagtaagtttgacagtatcccatcagaactgagaacggttcatgaaactctcaaaattcctgagtggaatgttactatccaagaagaaattcagctcttgagaaaaacggaacatgggagttatttgatctaccttcaggaaaaactctagtaggatacaagtggatcttcactactaaatacaatcctgatggtagtgtgaattgctacaaagcacaacttgttgctaaagagttcacccagtcatatggaattgattatcaagagacgtttgctcttgttgctaagcataacacaattcaagtactgttctctttagcttctaatcttgattggccttttttccagcttgatgtgaagaatgctttccttaatggtgatctagaacaagaagtatatatggaagtcctacctagactcgagataaatccacaaaaagtgtgcaaattaaaaaagacactgtatggtcttaaatagtcaccgagggcatggtttgacagattcaccagagcagtgaagcatatgggatatgaacagtgtcaatctgatcacactctattcatcaagcactgtatcacaggaaagagagcagtactaatcgtttatatcgatgacattatactgacaggtgatcataatgaagaaatctagaaattgaaagactttctagccaaagaatttgaaatcaaagaccttgaaatacttaagtattttcttgtaatagaaatcgctcgatccaagaaggaaatttctatatctcagcagaaatacatcttagatcttctgaatgagacatgtatgtttggttgtaaacctacagagactcctatagaatcaaatgctaagcttggctccaaaaataatagcaaatatgttgataaagagatgtatcagcgacatgttggaaaactcatatacttggctcccatgagacctgacatttgttttgcagtaagcactgtgagtcagttcatatctcaacctactgcggagcatatgagtgctgtctatcgcatcttgaggtacctaaagatgatacctggataaagattattttttcagaagattatggtcagagatattgaaatctacactgatgctgattgggctggttcagtaactgataggaaatctacatctagttactgttcttatgtatgaggcaatttagtcacttgacgaactaagaaacaaattgttgtgtcaagaagcagtgctgaagttgaattacgatctcttgcccatggaatatgtgaaggagtatgactgaaaaagatcttatttaaattaaggttttcggctcccattactatgaggatttggtgtgacaatctatcaactataagtatagccaagaatcctgtgtacaacaacaaaactaaacatatgaaaattgatcaacacttcatcagggaaaaaattgaaagcaaggacatatcactacaatacatcctaataagttagcaaactgcagacattctcacaaaagtactaccaaaaagagaatttaataatcttgtatccaatttaaaattacttaatatttatgtatcctacattgagagagagtgtagaaatgtatatatgtataaatataaatacattagggagtaaattagtattttactagattgttatgatagctgggaaatgcccattaccgttgcaccctgttaggctgttacaatatttttcataaccttttttttgtttgttatggccgaatgcctataaattgacatctttttgtccaataataataacagaggattctcatcttctcccgaactctcaatattcttcacacattgtgagggaggatcatgctaatgcatataagttcccatttatccagatctggaaattgaaggtaccactcagaattgcttttttttttttgtttgtttgggaggctagtagagaaaacattttgactattgataaactggtagctagaggtcatatcttggctaataggtgttatttgtgtaagcaagcggtggaatcatgcaatcatattctgctttggtgccctgttgtctatgacttgtggtgcatgatttatgatcttataggagtcaactcggtgatgacgggaactgtaaaagaggagatttgggcttggggaggctaggtgcaaagaaagacattgaaattgtaaaattaatcctattgaccattttctggatcatatggaaagtaaaggaatttaagagcttttgatggtaaagaggttggagctataggttgagagatagatggtataattattttggatctttttcttggggtatgacattattagggatgagaattttgagaatgtccttgacatcctaacacacttgtaaatctttgaatatgggtggtaccctcttgatgtagtgttaatacatatctcacaatttctatttaaaaaaataatgataattgatgctgataggttcagttctctatgcattttgtataagcaggttcctgcatctttcacccttagctcatcgag

SEQ ID NO: 8600 - DNA, 2994 bp, Carica papaya
  Intron number 17 from transcript evm.model.supercontig_2.7 4 (locus evm.TU.supercontig_2.74) derived from phytozome v 7.0 (chr-ID supercontig_2; pos 1301748 to 1304741)
aaaggtaaaccgtgaagccatttaagtactattaaacaaacttgaggcattttttggtaatgactttgtgatgtaggacaaataggattaatttgtccaattagggatttagggataaaaacctagatgtcacagctaggattttgtattcattggatttaagtcttaagcatcatatttaaaggtttagttgcatcacacaaccagaaatttgagaaactcttaaaatattattgaacagctgaaggttccaataaatgaaattataagccatctataatctctaagcaactttcttaaatagagttataataagaaataataaatgagtagaattaggagtactaatttaaataaggataagaacctaatactaataagaataggaagtactaattctaataagaataagaaactaatattaataatattaggaatactgatcctaatacaataggaaaatactaataagaacaaaaaaatcctaagttattaaaactataataatactcttcaataatatagtctcctaaatgatataatagttctacatttgaaaaattataacctcaaatctatttaggtatagctcattttgcatcattataccctggttgaagagaattcagccacgagttttgaagtggtgaacactgaaaaacctcgctgtttgagcttccttatggaaatttaacaaactctgtgcacaatcattttctttaatagcaaacataatagaaagacttgattgttgatgagtgtgaaattctagtgggagaatgaagtcaaaatagtgaccagtttggacttgtacttcatcttggagctcagcatcattactctcatttattggctttggttcctctttaaactaaactttcacaggactctccataggtagtaaaagatctcgaataacctcagtatctttagtcgtagaaagacacgacagttcctttcatttctcaacttcaactggctccttctctttttctttttcactgactgtaaatgttttttgacgtctatatttattcatcccttctattagttgaatactttaaacctatatcttttacatcatgcacaaaatgataagtgttgttatattgagcatttcaatcataaagccaaggttgacttagaagaatatttttgaatatcatagaaattacatcatacaagattggatcgctagaggtaccctgaagaatacaaataagactttgttgagttactaaatgctcagtttatccatccatgttagtctgtatggttggagatgcggttgcgtccaaagattgagtcattcaacagtagatattgaaataaaatttctgcaacattccttgtgaatgacaagtttcttatacttactttcacaggggcctatagttcaaaaaattggagaatactttggattttttctatgttaattgcttaattgtgcttaactatagtcgggaaagactcgtcaatcctaatatctttgagtgaaaactcattctcttcctcataattctacatgcttcaagctttttcaatcacagttttgcagaagacactgcaaaataagaagaatagataatattctttgagctgttgaaaaccaatctaagaggggataaaccagtctagatgaaccaatctggcaaacccaatccaaaaagtcaaaatagagcacgatacaaaaaggtccattcatgggtgcgcacacatggggtccacgcgctggctgtcagttactagatgacggtgtctgtttggcagttggctcaaccagaggtgttggtctcatattggaggccaattaggaagcaacagcttagaaatctggattcgcgaaaggcagtggctgtgtgagcttgcccgggcaagtgtggctgtttccagcacagcgtcatgggttggtcgagtgggaccttttagagctggtgctggtagcagtgtcaaccactcccagtaggtggttggtgaacggtgatggaggctgttttaggttttttctcttttttcttttgcgattgttttttccatatgggtttgaggctatttgggtgtcgaacttttagaatttgagagtaggattcttttagctccattaccaaattgatgtaggacaaatataattgatttgtccaattaggatttagggataacaaactagacttcatagatagagtttcttagatatcacatttaagaaatcttaaacattacacttaagaatttgatggcatcatacaatcagaaaactgaggaactcttaatatagagtaactgaatgctccaataaataaaattacaaactacttataatctctaagcaatttttcctgaatagaattactaatgagaatagaaaactagtaaatgaaaaatactaatcctaataataaaaaaaagtaatcctaaaaatattagaaatattgatcttaatataaataaaaaaatactaataagaataaaaattttaagttactaaaactataataatgctcttaaataatataaactcctaaataatataatattttaacatttgaaagaattataacttacagtctatttaggcataataacccattctgtatcactttgttgtaattctttttgcttctggaataacaaaaaaaagagcgcactgcttgatttcaaattaaaaactattttagttttgctttccatgctgggtgttaaagtgtcaaatcctaatgctaagatttgtggcaatccactgtctttgatgcctgaattgttaaaacaactttttggatgttgaccgtggagtactcctttaagaggcaatctttcgtttcctaaatttctagattcagtcaggatagatatacctacatatgacattttggtggttagattcacatcaatttgtttaagatttgaatattgaagctagacttttgtctgaaggccattgatgtctacatgctttttcctttttcaggctacctgcttttgcatattgtgagactg

SEQ ID NO: 8601 - DNA, 2151 bp, Carica papaya
  Intron number 1 from transcript evm.model.supercontig_2935 .1 (locus evm.TU.supercontig_2935.1) derived from phytozom e v7.0 (chr-ID supercontig_2935; pos 5254 to 7404 reverse strand)
tgttacaactactattgctaaaatttctacaacaagtactactgctacaactaccactgctattattcctaccactgttactatttctactactgctcctactgctactaccactgttactattattactgctaatactattattcttcggtttaatgggtgtcttcctctcctcatctatctgtactagcatttcacaaggaatggttgagtaataattcattctttgatgttttttagggtttttgtgtaaggaatggtttcgaaaaacacagctcttataccaactgtaatggcccagaacttgaaaagaaaatgaattataaattgaatgcggaagcgaaataataatgttaaggattacattccttacacaataatttagaatatccaatagggctacgggaatgacctttctaaaagaacaacgaataattaaggaaataaatagaaagtaaacaactgaacatcctattcgcaactctcttgtggatcaagatctggatcttagtcttcttgatctgaaatggttaatgaaagagtgagctacactagctcagcaagaatgtcacactaatcaccgatacagaaatgaaggttggtaaaaatcatgaaaaaaactaatggagctcttaattgaagtaaatttatttatcatgagtaaaatcatttattgtacacttaccgtagcgaaattttcaaaactggcctatagaggcaatagcacaaacaatatcataatctcatattcaattaaccagaataataactttttgtttatctacctactagtatccattggggtccataaggatgtccccactacacgtgaacccttatttaacattttcaagtaactggccgtctccatactccgttcggtatgagcaccaaaaatactatcgctcaataccttgtccgatatgagggtaaaacgggccatctccatatcctgttgggtatgagcgccaaaatatcaatcctcgatacgccattcgttatgaggcaatgttactggtagggttccctatgcatccagtccgtccaccatctctcaggatatccattaaggctaccattcaataattcacttaatcaaacaattctccatttacatttaattttcagtttcacaatttaactgtaaatcacgtagaacaaacaattcatgcatcaaggaaacactactaaatcaacataccaactttagtgtaatattatacatttgaaacaataaaatcaatcaaaaaagatcaacagtaataaataaccaattccgactccattagtaatctatttttaattaacgagattttttagattgtataaaatactacattatttataattaaacttcaaatccaaaacaaggaatcgggtgagggattggaatcgatgtccgaagtgaggtatttatattcgtctggttcttcttctccggcgggggactggcggctagggttaggtttagggtttggtgtgaagtgaggtatttatatttgtctccttttaatttggaccgtccatcgcgtttcatctggaccgtccgatcgcgtttaaataagaaatgaatatggaccatacgattgcatttaaagagggaacgaatctggaccgttcatcgcatttaatcgcaaccgtccgatcgcccctgaggagagaacgaatctggaccgtccacacacacaggaacaaattcggaccatccgatcgcaggcacatggattgccagcgtggcctcctacgtggcactgcgtcagcgtgccttaccacgtggcacgctccagttcgtcggggctgttgactggcggttctacgtggcacattttttaaaattgtattttgacccccagtttttaatttttcttttaaaaacactcccagaacccaaaatttcacccatttttcccaaaattattttcaatttcatcctccacctgtttttcttaatttctacattaaataaaaatttataaatatataaattgtattttatacattaattttaaatattttaaaattaattttcgatatttcataagagagatgaattgaaaaactcaacttttgatttgtagttgatgctaaaagccttcaagtacatgggtatttataggtactactactactaatactactaccacaaatcct

SEQ ID NO: 8602 - DNA, 2733 bp, Carica papaya
  Intron number 3 from transcript evm.model.supercontig_117. 16 (locus evm.TU.supercontig_117.16) derived from phytozom e v7.0 (chr-ID supercontig_117; pos 214630 to 217362 rever se strand)
acaggtccacttctatacttgctttcttaccaattgtaagtcagattgtttgtttgcattattaagtgaattaggctaggttgctataggagaaaacatttaatttttatttttgtaagtgttaaaagaggaagaaaatcataatattaaagagtaagtaaagcaaggtattaaagaggaagaaaatcatggtattaaagagtaagtaaattaaggtattaatgagaaagaaatcatggtattaaagagaaagaaatcatggtattaaagaagaagagaatcatggtattaaagagtaagtaaatcaaggtattaaagaagaagaaaatcatggtattaaagagtaagtaaatcgagatattaaaggcgaagaaaaccatcctattaaagagaatgtaaatcaagctgataaaaggaaagaaatcatgatattaaagaagaagaaaatcaaaagtgttaaaaagagaaaataaatcaagatattagaaaggaagcaaattaaattagtattaaatcatatcgtttgtagtaattgtaatcaattgtttatttcctttttcgttctgtaaaacctatatatataaacttgaacattcagtgtaatacacatcaataaaaccattcttaacagaaagtttatatgtatattattcataaagagatgtaagataacaatgcgagagaatgtagtaaagatgatgatagatattgaaagttttttatgcaaaacagaaagattctaaaataaacatattccaatagtcagagatatgatccaaaactgataaaagaaaataaaggttttgaaaaattttagacttgaaaaaagaaaggaagaatcaatttgttaagtattctcctagttctttgtatttagcttatttttctatttactaaattttgtagatttccagtttaactatatttggtgcctatagataaggtatccgatcttagatcatgattattattcaaatattaatgtattgttttgattgttgaaatccaacctctctaaatttggttttcaataaatttttctctaagttttgtgagatattgttttaactgttgaaatccaatatctccaagtttggttttcaataattttttcctctaaattttgtgagatattgctgattactaaattccaatatctccaagtttggttctcaatgaatttttctctaaattttgtgagatattgttttgattattgaaatccaatgtctctaagtttggttttcaataaacttttcattttcaataaatttttctctaaattttgtgagatattgttttgattattgaaatccagtatctccaagtttgattttcaataatttttttctctaaattttgtgagacattgttttgattgttgaaatccaacatcttctagtttggttttcaataaattttctctaaattttgtcttcaaagagatattggatatcaataatcaaaataatatcccaatatttgaatgacaatcatgaatagtttacttagtaattaagattggataccttatatataagctccaaatacaattaaaactagaaatctataaaatgtagtaaataagaaaataagctaaatacaaagaactatgagaaagaaaaaggaaattaaagtcttcctattcccctttattgtaaaacttttcaagacctttatatatacaagaaaagtaaattaaatcatcctatttgttctgtatcatatctcttagtattgaaatatgttcactttaggattattggaatatatccactttacaattattaaaatctttcaaaactcttatttatactagaaaggaaactaaatcttcctattgcttttagtgtaagacttacgaaaatgtttattttcttttgttggttctgtatcataactcttattattgaaaaaaacccacttttggattttcttgttctgtatcacttttgttaacaaggatatgtataaacaagaatgagcgcagaaaatgagaagtatatgcataaacaagaatgaatgtagaaaatgaaaacaacaaatctttttctaagtccttaatctttgagatccccgaagggacttatcataagcatatatcctgttttctaaccatccttctgttaacttgaagaggcaagttgaggggattatctctggtattctaattcatatttatgaaaactcataacctttcattcttgactcttaactcttatccaccagtgtgaaatggatggttcagttgtaatgctaagtggagaagattaacaatcttagagtagatattatcttcatgaatatctcatgtaacaattttcaagtgaaaatctggattcaaatatgatataactgtgattctttcataaaataaaagttgttttgattcttctaaaaaaatgtaagaagaggttgatttttttcaactggtagattcctttttctttagtagcatttttctaagacagggcagaggaatatgttcgatagagatatatccagatgtacgtacgtagaatagtctttgcacacatataaactcactcaaatagagatgtagaagcttatctccagtctttatatatatgcaagaaattaaaaaatggagatacgatggaccatcttttgcaacgttcttctgtttcttggctagtttatgacacatgttagttcacccttcacatttaataccttaacttgcagctttctttagttgcatttcctaaactc

SEQ ID NO: 8603 - DNA, 2754 bp, Carica papaya
  Intron number 5 from transcript evm.model.supercontig_128. 50 (locus evm.TU.supercontig_128.50) derived from phytozom e v7.0 (chr-ID supercontig_128; pos 354629 to 357382)
gtccctcaggtgattacttcatctttccaggcatttactacgaaacatatttttatgtttaattacttgaggtggttgtcacttgaaattgcgagtttttcttctaagctgttgcctttagtgcatttcactcgtatacctcattacctctctctttttgtggtaatttcttgacaagcaatattattattccatctttgtttcagttctagtggtgaactgatacggttctgtgttaagtactagaaattttatattctgttaccttatattttttattcaaattcagtgttattgaaaagaatagtaagcataggggagagtattcggtcagtttggttaaaaaatttcaaaaactgaagaatttgactgaagtgccataaacgatcgagccaaccaaattatctgtaccaatcaaaactgaaccaaccaaataaactcggtcggtttggttaataactgaataaccaaaaatgagttaacaaaatttattttttttgaattttatcaacatattaattaagaaccttaattaagcatatatgtacgaatattaaacgatatatatatatatatgtataattattaatttaatatatgtaattattaatttttaaaaaaaattgtagtaatttaatacttatttattaatttaaaataattaaaaaccttaatcagcttttcagtcggttcagcttacaatttttgccgaaaccaaaccaagtaagagataagttttgtggcttctaaccgattcaaccaaaaaatccaaatgaactgaatctttctccccaatcggtttgattcattcagttttttcttttggttccgtttttactcattttgtggtttgtcttaagtaatataatcaacttactattctaaaagcttaaatctatagaggaaaagacaatatagtgtctatgttaatatactccttcatgtaaagtccattaggttaaaagtgtgaatgaagcaccaaacttccatatcttgtgctgaatttattttcttttttcaattcaaatttgtggcagtaatcatgatttgaattctagatttctagctttggtacagttttaaataataaattgaagtgattctgttaaatacttaagctgataggaaatatcgattagtagcaaaaaaaatgttagacaactctctaagaaatggaaaggaaggatcactatgcaaacttgatatagagaaggtttatgatcgtatattatggagtttcctcttgtacattcgaaaaaaggttgggttctggacctaagtgacgctcatggatgaagtcttgcattaccactacctcttttacagttatggttaatggtggaccctcaggtttcttcaatgcatctagaggtctcatatatttagattctctaaccttacattttataattgtaaggttctgaaagattgattagcaaagccaaagaaaatcagtttgaggtctaccagctgaggaaaataaagaagaactgaaaatgattcatttgtttcttgtgaatgatacactactttttttttttaacccgtcacataggagatgttaaaaataagaagtgttcttctttgttttcaaccagtatctagactcaagatcagtatagccaagattgaattggtactgattggagaagggaaaaatgtagatcttcttgctgacattttgggttgtaaaagtggcttctctacctataaagtattgggtctgtgatgtagggcaagtaatgatagaaaccataatacttccttcaaaatagagacataaagagaaaatatagggaagagaattgaacgctagatagacagagagaaaaaaggaatcaaggtggagaatttagaagaaaaatagaagaaaattaggcagacatgaaaaataagagactgaaggagatcttggatctcaaggatcaaattagtgactcaatttttacataataatcatgaatagtctctaaatatacaaagatctggtatcttatttataagcatcaaaatacaatcaaaataggagttcaataatctatctaggaattctgtaaaataggaaaataaactaattaattgaaataacttatagtagaaaataactaaataagatctcagtcaattcttcacttaggcttttttttttctttttttttttcacatgggaggcgacaagaggttctatgtttactttcgatgatcttaccgaaaggggaataggtttggtgaacaggtactagttgtgtaagaatgatgcgggaacaggaaactatcttcttatatgtgcccttttgcatctcagctttggtctatcgcatatagcttaatagagttaattgggtaatggctggtttggttagaaaagagatttggactctgattattgggaggaaagaaacagaagggcgtttaaagacagaatttttttttatagagtaaatgatacttggtttcagactaaggttttttattaagaggctttctctttacactagtgaggatttaggggatttggttgacatattaatagacttgtaaagtttttgttgcgcctcttggtgccttttaatctatactttttattttaaaaaatttatttgaacatgtatttgttttgacttggaaattgttaagactagtgatctgtatgtgcttggtagctttgccatgatttatacctgccatctatacataatttgttttattttcctaacaggtactgctattaaccaagaggtcaaaactggttca

SEQ ID NO: 8604 - DNA, 931 bp, Carica papaya
  Intron number 3 from transcript evm.model.supercontig_508. 5 (locus evm.TU.supercontig_508.5) derived from phytozome v7.0 (chr-ID supercontig_508; pos 20576 to 21506 reverse s trand)
cttttcgccaatcttgtcaattacgggactgcaaagtaagttgattctctcaaaacaccgtttccaaattcttttattcgcttccacccacaacaaaacaaacaacgctattttaataaccagtaatgaaaccattttttcaaagtgattattatttttacggatatttaagtttaattgtttaatatgtacgtcagtataattgttgctgattttcagtctgaccgtacacgtgccgtgcggctacattatatcaccttagttaataggtttatgtgccaactattttatttatttattacaatttatatccatttattttttgagaggtaattggtagtccgtattgacttatttattcttttgtttattcaacggctgcgtgtttgacttatttattattgttatacctgacgatgcggatatatatataatctggacagccgaatattagatttataaataatttaataaaatactttattctatcaaaacatgataatatatcaggctcttatttactaaataaaatcattcttatagaaagtccaacatctcgtaattcattataaaaaagataaatatcaaaagaataagatttttaacatggagattggtttcaccttgggcacggtggaagaggcccaagggccggtattaagtgttctttactaattgtcaggcctttgtttatgtggtaaaaagccaatatatatatatatatatatatatatatatatagattgttcctttttggtgtctgaaagtttgccttctagtgtgaatatttcatcatttttgtagcccatgtatgcaaagttgggagaagattaatattttattgccctgtaccagtaatgaagactgatataacattggtttgggttatgccacaggattgagggagggtggggttggagagtatcattgg

SEQ ID NO: 8605 - DNA, 1552 bp, Carica papaya
  Intron number 1 from transcript evm.model.supercontig_30.1 28 (locus evm.TU.supercontig_30.128) derived from phytozom e v7.0 (chr-ID supercontig_30; pos 1685976 to 1687527 reve rse strand)
gttagaagtaagatgagtttatccctttttcctcgttatggattcattgttcgtctgggtttcctttattttttagtgtctgtcatcttccatgttcttcaatttgtttagcttcgattttatgcttgttaatgtttatgcgtatgaatgttcaattttgatgctttttatctaatagattaatgttgttgtccagatttaagatgggtattttctgtgtgtggttaggaagaattgtaatttatacatgaacagtaggtagatggggagactgggggaacctggattggggaatcaaaccttagacgtcttgctgtgagaatagttctgtaactgacattttgtttaaggagttagtaccggcaagaacaatggtcttttggagtaagagatacatattcaagtaatatttatgattatgatcgatcggataaaagattattcatgtttcattttggtcttatattcatttcatacttttatttattttaaagcgtctatggtcaggtgtctgacgctgtgtgtttggattctaattttgaagacactaatgggtaatgaagagatatgttacatgatgtatacactgtacttgaacttagctgccttagcaacctcttccattaagaaatttgtcttcattttggtttatgatgatataaatccaagtttaagctgccattgcagtgttagaatattgcatcagttcacttggcatgaaagggtgccataatgaaatttttttttttttttgctaatggtaaattctgtttacttgattatatattacgaatgcagaaacattcttgaaattttttatattgagtccatttaattaggatgaaatatctatacataaaactgatttgtccaatctgagttgggtccctcaaaaaaagactcaactgagtaagtgaaggtgaaaaatgttaaggtcagtaatcattatatttatcttgccttcaagaagacaagattgtttcaagttctggaaggaccaaaaatacctttagtttcgaagagaggaggaatattcatttgtgtttaatttagttgtcaaaggcaaactaaaagctaggctgcagtcactttttacagattttgctgcattcaggaaaaggaagggtgaatttggaggtctttacgttgataggtgcaggtccagaaatgtgttttgaatgtcagtgagttcattctattatatgaacttaagcatttgggtctggtaaccaaatcaattatagtctggtaactttgaaatataatatcattttttttgtctgttcttgaatatagattctgctgcaaaacttgtggggtgtatccactgtttgctgggatgaaattgtaatagcgtcagacattaccaagggagaaaaatagcctggagaaattatttacttcaatatatgatagaaaccacaaaagtataattcaattaaaattatttcccattttgggtttgggagagagagagttgcatccttatttaaagattttgttttgaaaatttgctcttctatttgttctacagatctaccatatttgacgg

SEQ ID NO: 8606 - DNA, 614 bp, Carica papaya
  Intron number 21 from transcript evm.model.supercontig_150 .41 (locus evm.TU.supercontig_150.41) derived from phytozo me v7.0 (chr-ID supercontig_150; pos 407102 to 407715)
agttgagaaagaaagctcagttgcaggtgatttcttaatttctatggattttgtagtaggttttggaattgcatgctacatggaatcataggtttcagctgttcaccaattcgtgaattctgcaaatgttaataatctgcactgtggaaaatccattaaaggttttggaagatgaatctgaacctgctctggttgtctaatacacgtgcttcttgaaagatattgacttttatgttttagtttagaattttcattttgttatttatgcatctataattgcttcccagagtgaatttttgttttccttgcttaaaattttgtaatgacccatgcaaacatgcatgctcagtttacacaaagttggaagttgttcttgccttgtcatccaaatccacgagattctcggcattaccatactcagtaatgagaatagctggtagttcctcatgcataaatgttgtatcatgactgaattttaagctttttgagtgaagatattctttcaggaatgttttcaaaaccaaagagagttttatatgtcaagttttctctgttttactgtgctttaacttctcaactaaactaaagtttgtttttatgccaggagattgaaa

SEQ ID NO: 8607 - DNA, 2429 bp, Carica papaya
  Intron number 7 from transcript evm.model.supercontig_74.6 (locus evm.TU.supercontig_74.6) derived from phytozome v7 .0 (chr-ID supercontig_74; pos 56431 to 58859 reverse stra nd)
ggtttgcaaacttgcttggttgctttattgtcaaggtatagtcaaatgcttcctatcaagatttgtctttcagcagacaattaaaaattttctttgagatgcataattaatcacgtacccacttttaagctgtttgtataaactcatgcctgtacttggaagggtggaagtgcttatgttatgtggcatttaggtgtacatggtaaacaagctggctgcaattgcaaggctcatcttaggaatatacattcacaagagtatatgtgtaggaagatggacacatataggtgttttatgggcttaaagatgccaaaagacttagtgctgttgagttgtgaattatgaaataagatccgccaatcttcacaagtcttatattttgaaactcatttacccatgttaaatgtcagtcttaagtcatagaatcgctatgcaagagtatctaaccttcagaataataaacttctaattaaaagcttaaaatccgtggaaggagctgagaagtgtacgctagtgcacgtttggtaagaataaaagggcttggaagggtgcatggaagaagggggtaaactaaaaccttgatatcttcgcatagaaattattctccatttatgtcctctaatatttttttcttcaccaggttggttcttttatgcattaaagtagtaattttctcttttgctacccatggtgtagtcttaatgtttagacagtttggcttcgggcaaactgaaccaaattgttgtacaaataaggatctatctggctttcttggtgcttgtactgtgaggtactaaaaagtactgtgggaatgatattcagtgaaaatagtatagtgtttggttaaacttgttgtaagaattgatgtctatataaaatgtaaggttctcttttgtggtaaaattaagaataaatgttgaaatggtaaaaaaatatataataataaaaaagttaattgttaaagttattcaaataacttaaatatttttttatgatttctttaataattagattatttttgaaaaattattgcttaattatcttatctttttattcaatataactattaatttgaaataagtatgatttaatttttcaaattaaattatttaaataatttataataaatatgaaattattaatatatttctattttaaaaatattaatgctaattagtgaaacataaaattaatatactttttaaaaatattattcaattgttttaaataagttgtatttgaaaagtattctttttaagtatttatttcagtttttaattttatcgttacaactagattcttcttttaactaaaaatacttctgtttttggcatttggctaggtttctatttccatctagcaaaaaacaagtagaagactgtggccaagcatgcactaactcagtttatgttgaggatactaaagaacaaaagcaaggctgataagattgttgaatgaattgatgattgatgagaataatgtggcctttcatcaagtatctagcagaggataatatttcaatgatgacatatgaacattttgagaacaaaaacttgagttttggtacctgagtgtgtgttggccagagtttgatcttccctttcaatccactgaaaatatgcaatcttatctcctagtgaaattagttgacattctcacccattcaacaattcgtgttaagttggttattatacttccagttctgagctcaacggatcccagagagaatattatgatccaaaactagggagaattttacattcttatcacttcttttccttcttggaaataggaccctgaaagggagatcagtcagtaaaaaacagaatattaagagaacttgatggttgaccatatacaccaaataaaaaattgagcttcaaggagaagactgttatagagaaatatgatacattacaaaatgatgaatatagaaatctatgaataataaaatgccacgtttttggggtgaattaaatgtttactgcaatggccactatgcatgtttccattttgccatatttgaatggaaatggatggtgaagtccctgattcatgtaaatacatcatgcttatctgcattaagtttaaggaagcattcagaaatttatatgctattacatgtttctatttgtggtcttgtaccacaggtttctctattcagtgtatggagatgtttcaagcatttcattaaattttaatgaatttgtagtagcttacttgttaaatttcagattgtttctatgttaaataaatatatgcagctaaacagtaacatctcatatgaataagtaatattaggttgtatttttttttaaaaaaagtaatattaagcgtggctggttgcacagtcattcctatagatgtaagtctgatgtagacatactatttcaggtggttcaaacgttccggacggtcatacattaaag

SEQ ID NO: 8608 - DNA, 2005 bp, Carica papaya
  Intron number 1 from transcript evm.model.supercontig_113. 28 (locus evm.TU.supercontig_113.28) derived from phytozom e v7.0 (chr-ID supercontig_113; pos 371000 to 373004 rever se strand)
cacaggtcttcttctatcccaacagatcgtgaaaggtgattttctatccgtgtatacacttttgggctggagcttgtctatattaccctatgttatatatgttatgattattgattgagtagtatttgatttatccgatgattgatgctttgaagtttgatcgtttccttgttttgggtttctgctgtgtggtttcaagtgtgttttgatttcattttttttcctttttcctcttaacctcagttgaggggatggtgatggtgggcttttaggctttttttcctgggcgttgtttctagcttttgttatttatttttaactctgcaggaaatgaaatcaggctagaaaggtaggcatcaaaatatctttgttcattccagtttctctttctatgaaaggtgaaacaaactttgttttctgggtgtttcaacttgttgtgaagtctgccaggaaatctggctacaaaggtaggcatcaaattgtctttgttcgttccagtttctgtctggataaaaatgaaacaaactttttttaattttgttctgggtgtttgaatttgttgtgaagtctgcaagcagcatgtcattggagttggaaccaaacactctttttacttggatgataagtaaactgtagtagaatcaattttgactcagaggcaagtgcttaagccttggaatacacagcttataacccaatcctcaaatttgcatgaatgtctttgtagtctggttccgttgtctaaggggcagtgttctttccaaaaagaaaaaggatattaactggaaatgtaactaagtactagttttgctttcttgatgataagtcgttctaaaaggaaagcgatttctgctctataggaaaatgcaccaactcagaaatgcacattctgaccctcaatttgttcagtgttgtaaagtatgcttctgatgggagaatctgaattcgcttataagaaaatgaataaacttgaaaatacatacttcgccttgtttgcacaaacatttggatccagtctaatataataaaatcatgctactttatactgttttacaaggttccaaaagatttacgattgccaataaaagttatgttatattcatgaatctttgattatttaaacaatctggagaatttaattggcattgactgggattcctgcttgatgggaattctggtgcatgttttgtcttagatgtgagaattaacactatatgagtgctattatagaaatgttagcatttgagatcagatgtcatttttttaaagccagaaaaaattattaagattggcttttggtaacattaaactaactgtttaaaggaaattctgttgagcaatatcttctggaggattaaagctcactgaaacttctgctgatagacaattgcaagtattccataactcaagcatatagtggttcctgcggttgcatttaggtttctatgtcccctgtagtcgatgtattgttgcttgccattaagacatgaatattgagtcagtggggcaatctcaattctcattttctttggaaatacttttgaaaatataacttagctccttcattttccctggatatgaacatttgataaataaaaatgtcatatcggctttctctctttttttttttttacttctgaggaaacagaggaagcattatgtaagacattttagtttcccttgttctttttcatttctaaatattaacaatatcaacttaaggaagggaggatgagcaaaaaaattaaaaatctgtaagaaagaaaagaaataattttatctacctgtggttgtacggtagacatgacttagtagttgcagtttaaaagtatcattgactaaaatgcattcttatatacagcatgacttatatttagagcataaaaaatcgtagattctttgcctctgacagaaatgatgttatcggattctgggcttttaatgtgatttaactgggtgtgaagtggcagatacttgacggaattattggcagagaggcaaaagt

SEQ ID NO: 8609 - DNA, 2807 bp, Carica papaya
  Intron number 10 from transcript evm.model.supercontig_104 .95 (locus evm.TU.supercontig_104.95) derived from phytozo me v7.0 (chr-ID supercontig_104; pos 612803 to 615609 reve rse strand)
ataaactttttgaggctcacaggtttccactaactcctacactggccacatttagttttagtttgttgtcaaaatgtattttcatgcatcgtatacatcttctacataaaatgctgcagaattattaaatcaaaccttataagaggtgcttgttcctacctcgccattacgatctcttcttggataatgttgtatgcgtgatagcatatgatccttaataaccaccagcctctctatttatggaagatgaaagattgctattggacactcatatgcttgacattgcttgtgtgtgcatgtggccatgcttgtgtttggtgcccatgcacatgttctgttctgtacaaattgtggatctgccaatctcaggattatagtttagatgaacgctgtgtgtgtttcaactcaagttttgtctgtatttatcaatattccctgtcagttctcccatatcttcttcctgatgtccttgagatttatatgacaccacagttacaggtattttttctttgaattttttcttttcactgatagcatattccaaagtactcagttaaccatggtggttaacttatttccttgcattgtttcttcaacatgctcatgcaccagtatctttaaaattttaacataagtatattttctttccaacatgttgcaatttcttcaaaactagaatctctattaattttattatagcttttttgcaatcaaaaagcagttccagaattatgtttaatttattaaaaatctatttttaaaatgagttttgagttgttggagaattcgtcattcttgtattatagaaaatttcctcactttcattctgcacgaggatgatagtattggctctttcgatgctttttgaactttgtatttctgatgcgttgaataaagacctttcttaacctgcagaagctgaaattctctttttccccctttttggtttattttcgttttacttttttcaccaaaaagaattttgggctctggtcagtgatgcttttggtgaaaatgccttttttttttggggttgaagaatcaaatgtgttcatttctttaaatcgatctttttgttttatacatttgtaattagtagtatgttataagttccatttactgattttttttgaaactaaaagattaagtatattcaaaaagcacgagagagtgcaactcatatataatacttagaaatctatcaggatgtctattaggtctctgacatctttgctagaataaggccggtaactccttaacaaaaaattgagggtgtggaatcaggaatccttaaatctatcaaaattagattcgatgcctgaaaagtgcttttgttcctctctttccatatgacccaaaaggtagacagtgggataagtcttaagctcttattcccatgaatatctatccaagaacatacctccttcacagaaccagttattacctaattcgacccgaaacaccatgagcaacaaattccacagctaatgtgtgggtgtgcaccacgaaagaatattattacaattctgcttctgtcttgcacaagtagcaaccattcattagaactttttccttccttataagcttgcccaaagttggagtgcattccttaatagcttcgcaagtgaagaaagctatccttggggttgcttttattttctaactcagcctagcaggaaaatcatcacccttcaccccaccacaattcagatagccgtaataggacttcaaagagaaaacacctggagaattcaacttcaaacattgcttatccaacagagtcatcctttttgtgaatgaaagcatttctattaaattcataaactcagagatctcccaatatttaagtttctgttcaactctatccaccataccttgttgtgcgctagcccaccagggattcctttacaatagtatgcttcttgcatgcaactgtgtaaatattagaaaattgatgacataaatctccatcttgcatccaacaaccctccaactctctctcttttccctgacatcacacttcaccaaatgtacttctgaaagttgtcctctacatattgattctcttccacaaccccaccccttgcggaaccctaggaatttcagagaaccatctttgaccatccaacccacgtctcacctattaccctccataaactcccttgctctatcatgaatcttcagaaccacttcccttggagagctctattaaaatccgccagagatctcaagcctaatcagccctctgtagaggttgcttcactctgtcctaggccactagtgatatcttcttttctccacattgtcaccccataggaagttgcatttgattttctccaatcttttgggtagtgtggagagaaagaaatagacgagcttttgaaggagtggaagagaatttcgatagggttatagctaaagggttaaaaacctgggtttttttggtcataagtcacctttgtactctatggaggattttggtaaccttattgacttcctggttgacatgtaaatatcttttgtacatgggttgacatgtaaatatcttttgtacatgggttgacaccctcttagtgcctgtgattaatgatacatactaggttttttatttaaaaagaagagacatcatatgaataggaatgatggctaatgtgctttttattacgctggctagtctactgttttatgatatggaattatggatcagcagttcaactttcgtagattaaatatttcttgaacttcagttttaagtaggcttttttgcgactgaattgtgtgcatgcagggactggggcaggcgcttc

SEQ ID NO: 8610 - DNA, 1815 bp, Carica papaya
  Intron number 7 from transcript evm.model.supercontig_21.7 8 (locus evm.TU.supercontig_21.78) derived from phytozome v7.0 (chr-ID supercontig_21; pos 955501 to 957315 reverse strand)
caacattttcgaagcattgaaaaagcggtaggcaattttataatttgttaatttttcttcttaagcctttttcttctattcttttggtggagaaataattttgagtgttttatttttttttattcctttttttaatctcaactaattatgaaaatagtaaaatgttaatttgtcagttctagtatttttctctttgatactttgagaggtggaagcataggctttgatggagttcccacatggaggaaaagtagatttcaatgctcattgtcttgtgtgccaaaacatctgtcttttattcagtagctaagagaatcgagaaactagcctaaacataaaaattgaagatagtctttttcctatttatttagggggtttggggactcgtaatttgctagtttcagtcaagttttgccagggaaacacttagaggcttgctaatgtgaaagacagcttttggaggacatggtggcatttgctaactatgtgcaggatcaagtcggttagactattgtgaattaggagctctgacagatagtcttttgaatcatttttgaaatcaaatgggtaatttgtgaagcatgatgttcttcatggttcttgcctccttttggtattttgactagctataaatttcttttgtacgtggcagcaaacccttggtatctcgttgggctctgggccttttttcccctcttggaaaaaaaaaaagagacgcaggtgttttcttatataggtttacttcctgcaacgaaaataagggagaatctgcagaagattactcggaacttactataaatattactttttatttggcattttaatgatttaggattaaatactatatacatttatcatttattggatgtgggaatcacgaagagaacatgatataatttgttttataagaataattttgtgtaaaaaatctctagtttttcttttttggtagttcatttttttctggtttaacatatttggaaagcagttactccaaaaatttttttggttaattaatctctgtgtcagctctctgcttgcatggtatctcttgggttgtgttcagttcagtagtaatgaataaggggtttgactggggatttattagctaagtagaccaaagaactaagttgatttgtctgtaattttcgattatgtagaatgagagaaatatgaaagtttctcatagtaagaaaactcatatctgattgatggatggtacacttttacagtcagtttaaaatagatattagcatagacttttgttgacttggtagagttccttgtagagaatttgtattgggtactaaccatttgatgcctataaaaggggaaagattatgagcttatgcgacatgcatatagttaacaagaacatggttgactaattgttaattcattttctggaaatcgttcgttttatttgtgaacatggttgattattaagggaatgttgagaagactgtgcacttgaaggtagtcaacttttttggttggaagactactgttctgcttcatgtggactaattgaagtgaacaaaacagaatagcttttgatggaaggaattatatgacaatactatcaaagttctgtgatgtgtcctattttacgttctccctgatgaccaatcacgagtccttttcagctccttagacacatttacttgcttaggtcatcatgtcatgaataattcagttccccacagaatatgtcagggtggagccaagttggagctctctgttctctctttctattgttagttttaactggtgaaactggatggcaagattaatttgtgaaagtccgcagattga

SEQ ID NO: 8611 - DNA, 1467 bp, Carica papaya
  Intron number 2 from transcript evm.model.supercontig_55.8 1 (locus evm.TU.supercontig_55.81) derived from phytozome v7.0 (chr-ID supercontig_55; pos 505164 to 506630)
accagaagctgtaagattcttttttctattttctttgattgttttgtgtgttaagagttaccaaatctgttcatattatgtaagtttgtaatgcatatagtgttaggcttgtttgcagagcgcgaataggtttcgagaaattctcatgaacactggcccgctggccctctttatttagggtttgattggatggttttaggaaataaaagcaaacgcgtaaccttcggcactatcatgcttcatccccttgccattttagttactgaagaagagttgaataaaaccatttggtttaaccgagggaaggtgctaatggttatttgtctttctttgtgtactttacttctaagcatgatttagctatctgtggtagattattgggtcagagaacgaggcaagtaaagatatcctcattgcacattatgtgaaataatcaatggagttacctttattcactcaagacaataagtccaacagctcttatagtcttatcaaattaccttttggacctgcttctcctctttacaagtcttcatagtagtctttctgaggttattctagcttcgtagttttcatgtagtaaatacagaccatcttatagaaagggatggtagccttaaggggctccactgagtaccatcctttagaaatcaagaaggcagaaggattttgttcattgaaatccagtatcattcactttacttatcgggacagttgaattggaatttcaattagaatggcccctggtacaagattgagtacataggaagatagttcaaaagaagagtgtattcttcaaccctaccaggatatctcctgttttctatttagttaatgaggatgaatcttattttattgttattggggttttcctcagtctgctactatttgatctaatattttcattgaatatgatgctttatgcttatgacttttacaattcaatttaagttgcacttgtgcaggtttcagatgtcttgtgctcaatgtctttttttccatataattcttgaaaacagaaaaccctgatagacaaaatgcattgattgaattgaggaaatattgaacttgttatcacgtttagtctggcttgatttctaatttcattgaataggaatagaaatataatacaattgtggtacaaatttgaatgacgatagctgtctaattcaattagttgtttttggtttgaaccaaatgtaatgtcagggtattccatggtcaggaatatgatagaacatatgttcttccttgtgatttaattttacggattcttgttgtgaggtagaactataatttttaatttggaagaatgtgtatgagttataaatttcacttaaatatgttctccatctttatttctattatcccaatactacccaagtggtggtctggaaggaaaaagaagtttaatttcaaaatgattatgcagtcgggcattttttgacaagaggatctcacaagaag

SEQ ID NO: 8612 - DNA, 4451 bp, Carica papaya
  Intron number 5 from transcript evm.model.supercontig_176. 21 (locus evm.TU.supercontig_176.21) derived from phytozom e v7.0 (chr-ID supercontig_176; pos 288566 to 293016 rever se strand)
aaggttactgattgtatgtcctcactttgtcttttcatgaattttttctgttgtactattacaaaacttgatttcacatgtccatgatttgttggtatcattttatggtttaaacattggaacctttaacagcattggttggttggtttctcgtatcaagtccagaatgctaaaaagtgcacaaacattagtataacatgcttcctgtttgagtagactatgccatttcccaagagcctagcaaaagtaggcatgcatattaaagtttaaaaacttggaagagttctctagtttttaataccgtaggatgcagactcccttctgttggttaatgccaatataagaaatgtttttgtttgtatttcaaaaaagcaaagaaatgtttttgtttgtaagaattacaaacacccagtttatcaaatttagaactatagctgtaatgagaaaataaaggctttaaatttctagaatctttttagataaaaaggtctgaatgtgatttgcttttcaatactagatctaggacctcagagattgcgtggtaatatcactatatttcgctttccataatgggaatgaacatgttcattattctttagcgagaaatgaagcattattagaaaggaggccaaaagagatacattacaggtggactaggtgtccaccaaaaggaaacaaataaaaataaaccaaagctagataaatggctgaaactactaaagttcaacaaagaataatggactagtctgtatgcagaatagacagcgaaatattcttgttgattggatgtcttatccttttgttttttgttactctcttccctaatgatgatcttttatcattagaaaaaaaaaaacggcaagcagatatgtggtgcagaaattccaaaatctctagtcccttgatgccatatgggccttcagaaaaaatctagattaagaaattcaattgcagggaactggagggtttgttagggcagggggaaagggagaggagttgttttgaaaaaagaaattactgccaatttgaatatggaagctatctcttggaggcaaaaggctagggaaaaatgactaaaggagggagatagaaacaccaaatacctccatagtttggccaattttagaaggaaaaacaattatgtggaggagatgttttctgatgaggagccggtgaaggggaatgctgctttgagggagagagctatgatttacttccagcatctttataaagatgaggagagaagacctaggctggatgagttgtccttcaaacagcttacggccgacaacagggagagtctggaggccccttttactgaggaaaaggtatggggctgtttgggggaatgtaatggggacaaggccccgaggcccgacggcttcaacatgaagttctatcaagagttttgaaacgtcattaaggatgatgttatggctgtttttcatgaatttcacagaactggagcttttgtgcaacccataaactctagtttcttggtggtcatttctaaggttgttggggccaaaaatatcaaagcttgtaggctataagccttgtgggtagcttgtataaactggtctccaaggttttggctaaaagaatgtccaaggtaatgggggaagttattggagagaaccaaaacgcttttgttgaaagtaggcaaattcttgatgtggttatggtagtgaatgaagtagtggacgacctggtggggcagaaaaaaagggtatcatttgcaaaattgatatggagaaggcttacgatagggtgtgttgggatttttttctatgtatgttggagagcatgggtttcgggagtaggtggaggaaatgaatgaagatttgcatctcaataacttcttttgccgtgatggtgaatggtggcccttcatctttctttaaggcctctagaggtcttcgtcaaagggaccctttatcgcccttgctacttctcatggttatggaagtctttagtacacttatggaaagggccggtgaactgaatgtgataaagagcctctcggttggggttggggagttcgcggtgaaggtatcccatttattttttactgataatgcgttaagtttttgtgaaccggacctatcctcgcttattcacttgaggtgccttctcaattgcttccaaatggtgtcgggtttgaggataaatttgagaaagactgaaatggttagaattggtgataagggggatgagagggagatggtcagagtgttgggatgcaatattaccacgttgtcaatcaaatactttgggctcccattaggggcgaaatttgaagataccaaaacttgggatcccctagtggatatgtgaaaaaggcttgcggggtggaataagaactttctttctaaaggtgggaggcttatattgatcaaaagtacctcaacaaatttaccaatctactacctttcaatagtaactatcccggctaacattgctactaaacttgaaaggatacaatgtagatttctttggggtgatgatgagggacatggaaaatatcatttagtaaagtgggaggaggtgaagaaacccgtttacaagggaggacttgggttaagatccattttggagttgaattctgcattgcatggtaaatggctttggaggttcgtgaatgacggtaggaacttgtggagaaaggtggtggagactagatggggtgactgggagagggatggggggagaagagggaagtataggtgtcatggggcaagtctgtggaagaagatcagggataacagcagcagattcttggactgcatcagttggcagttggtcaatgacagtgacattaatttctggaaggatgagtgggttggtgacttcaagctgaaagacaaatttcctaggatctatgaaatagcttgtgagaggaatagtggaaaaggcgtaggagaagggagatgggggaaatgggtggtgtattaaagtcagaagaaacttgaaggaagatgaagaggcagaatactgcaatctgcttctctgccttgctgatattatggtggggaatcagagggataggaggatatggaaaccagaaaagaacaggagtttttctgtgaaatcttattacaattacattgtcaaaaacgatgatgaaaatgtcttggcagcacccttcaagaaaatttggaggtcaaaagctccacctagaatggttttctttacatgggaagtggtaaaagaaagaatcttgaccattgacatgtgcaaagctgatcgtgcaaccacttgttactttggtgtctgccggtgcacagcatttgggagtatatgttcggtattatggggatgacttgggtcatggtgggtagtttaggtaaagaattgtgggcatgggttggtttatgtaaaaagaaaaaacaattgctattaattccggttaccattttttgggttgtgtgtagggagatgaatgcaagggcttttgagggaattgaaattgatattataaacattagggatagatagactaagacttttgatgctattttgttaggtcatgacaaaatagattgggaagatattgggatagttattgaccacttgattgatatataattattttgtatagggacggtatccttttgtacctttgtgcataataacacttttcacttttatctcaaaaaaaaaaaagaaattcaattgcatgattttgttatcattatggtgaaaaagatcattatttaaaaaaaaaaatcattatggtgaaaaagaaaatgctttatctaattgaaaatttgactgggggaacttgttttaatttaggcattcatggatagggatgcagaattagagtatcctaaaatgtgtgtattttactattatgagatattgatatgattgtttttttgataaaagaagaagactttattgagaaagagagaatgaaattacagcgaagaaaaataagttatcctccaaaatgaggcaaagaaaatacagccaaaaaaaacccaactgtgaggagagagagggaaagagaaacaaaaaacagtgcttttaataaaaacgtcccattttcagtggagaacggatgcgctttgagcataaggcagccaaaaaagtaaccctctgccaaagttcagtgtatctgctgttgaaggttgtagatttacgagcaagccgaatcagcatagaccttcgaagaggacaccttgaccatagagccaaatgcaccatttgtgtgattgtgatctttatgtattattagagatatgtagcttatttcagaaatactaaaataggcctgtcattggtttaaaaatcttatttcttatttaaagtcatattggctaacaacatgtgattgtgtaattatgcgtacatacatctgttttcttaatatgcacttttagcttctctaactctcaagctcggatgttgattgttacttctagtgcctcttctccttgttggat

SEQ ID NO: 8613 - DNA, 531 bp, Carica papaya
  Intron number 1 from transcript evm.model.supercontig_129. 47 (locus evm.TU.supercontig_129.47) derived from phytozom e v7.0 (chr-ID supercontig_129; pos 402477 to 403007)
aggttttgcttcttctgcccatcacgacgaagctggtatttctctctctttgtgtacaaatgttaattttgatttcgatctcacgcggactagggttttagtttatcctcttgtttctgatattattagggcggatttatggttgatattggcgttccctgaatgtttttgcttttagattcgtagttctttgttattttccattgttgcaccggatgaaacatggttggagagaagagaattagttattctttgattgaggatctatctactttttgactagatttacggttaatgtgtttgcttttagattcgtagttctttgttgtttttcagtgttgcgccggatgaaatatggtcggaggtaagagaattaggatttctttgattgaagatctatctatttctttggctagattatagaagcatttcttttttacttttttggcttctgatttccatgtaattgatttggtcttttgatttgttttttaagctgaggcttcaaagtgggagaagataacttatttg

SEQ ID NO: 8614 - DNA, 13118 bp, Carica papaya
  Intron number 5 from transcript evm.model.supercontig_17.1 66 (locus evm.TU.supercontig_17.166) derived from phytozom e v7.0 (chr-ID supercontig_17; pos 2062451 to 2075568 reve rse strand)
ggagaaaggtgaggaagctattttctatgaaaaaagtctttaatagtttagctagcattttcattggaatctacgtttctaaattatggttgtatttaactgaaaacaaaaagaatcttgatggtatatcttggaatctgttcgtgattttattgaagcaagaattttttttttctttcttttttttttttcatagaagaagaagttttattaagagaaaagaaaatagtacaaacaatagagggtaagacatcctcctagtcaaaacaagctataatgagcaaaacaatatagagaggtataatacataaaaatctgatcctaagtgcccaaaataataatctttcaattccagtagaggttggaaatagttatatctgagaattttccgtgcaccttaacctgtaattttgccaaaaaattcattctttcccataactcatagtacaacataactaatccttgaaaattttccgagccaaaaactccatagacctgaaaaaaattttccatgccacaatggtgaaatctcactccatcacctctaatgtatacacccaaggggctctcaattttcggagaacacaccctctaataccgaaaagacaacatttttgtccaagttttccaagctgtcttgcaatgaagaaataaatgagaatgtatttctctttctctaaggtacataacggaggtgttcggagttaactcataatgtgtaacggccccggaaataaaaggaaatgtatatatttattctaagtatgcaagcgaaataaaatagattatgattaacatttcttacacaataaacaaaacgaattaacgtatgaaaaaataaactaatttaaagaaaatactatgaatgaatgctataaggaaaactaataaattctttggcttctactcgccatctttctgcagaacggactcgggaaccaagtcctcttaatctgaaatggttaagtaaggaatgagttacactaactcagtaaggacatcacactatctcactgtcacagaagtaaaggttggtaaaaaataaaaacgaccaatggagcataatttataacaaactcatttatcaataataaaaatctttactgtccacttatctcagtgagattcataaaaatgatctatagaaacaataacatcataaatatcatgaattcatacataatctgtattatagtacatgtcatacttttgtatttcaatcatcaggcagtctattagtatccatggggatccataggggtctccgctacacgtgaaccattcatcttaattctaaggccgtccccatacctcgtctagtatgagcgccaaaaccataaacctcaatacttcgtccggtatgagggtgaagcgggccgtctccataccccgtccggtatgagcgccaaaacatttaaagtctccataccccgtccgatatgagagaccacgttcccggtagggttctctataaatccggtccgtccaccatctctcaggatatctagtgaggctgtcgacttatccatttataaattcacataccctttttatttttcttagtctcaattacccaatcaacataaatacgtaaaccagcaacgcacaccaaacaagacaacacaacatcaagtccacaataattcaaagcataatggattaaacagttattcatgcatatgaaaccacagaataaacaatcaaatactatactgcatttagactgtaaaatacatcaaacaggaacagaccgacaaatacatcaggttcgggccccattggcaatctttaattaattatacatatctattaattcataaaatattgtttaatcatatattaagctttaataccatgataggaaatagggtgagggatccttacttgtttcggagtctgaaatcgagttctcactgcacctacgagcagttcttagattccctgaatttttctccggaaactgaaacacacttctggtacctgcacatatccccaaaaaatcccaaatcagacccaggtccctttcgaccaatttaggaattccggcacggcggctccgccatgcttcagtgacggcgccaccgcccacggcggcaatccgcctcgggttaaccgttttcggctgaattcggctaaacttgcattggttcctgtgataaaacacccctagggccctcggtgggccaaaaaattccagaaaatcgagactcaccggcggcgaagctcttgggtgcggcggctcctccggcgcgagttgcgattcggtgtttttctccggtcaacttgtagagaaaagaactgtagtcacagtggtataaaaattacatcgaacgggaaatgagaagggcttcatcggaggcaaaaatcgaagaaactcgctgcggcgccgctggacttcggcggtgctttccggctaatcggctggtggtttggctccgatttggccacagggaggttcggcatcgaaaaacgagccaagagaagaaattttacctcatttggtggccggaaggtcctcaagtgcggcggcgggtggtggcggccggttcctccggtggctgggtcctcttctccggcgagggttctcgcggttagggttagggtttggggttgggagtggatgcgattatttataaccctccccttttaatctgagccgtccatcatgatttaatatgggccgtcggatcgcgattaaattagaaataaatctagaccgttcgtgcatgaccaaatctggaccgtccgcaagcgtgagatatgggccatccacgcgcgcctttgatctgagccgtccgtgcgtgttggaatggatctgggccgtccgatcgcgcgcacgcggatcgcccacgtgtctccgtcccgcgtggcttcctgcgtcagtgtccctaccacacggtgtgtcctaattggccggggctgctgacttggctgctgactcggctgctgacgtgacactatttttctaaattgcgttttgacccccagttttcgattttcttttaaaaaatactccaataatccaaaatttcaccaatttttcccaaaatcaatttcaattaaatccaaaaaataattttaccctattttattattattattatttttatttctattaaattaaattaaaaccttataaattaaaaattaaaatagaataaaagtaaataaaattctaataaaaaataaaataaaaaaatcaaaataaaataataaaggaaaattttgggtgttacaactctcccccccttaaagaaatttggttccccaaatttgcttcttactcttggtcgaacaaatggggatagtgggctctaaagtctgattctaactcctggatagccttccttggcgagtggttctgccacactacctgtacaaataatatttcccggttgcggagtattctgctctttcggtccgtgatattgactgatacttcctcataagataagttctcttaaagtggaagtggttcatgagccaagacatgagaggggtccaggttgtacttacgtagtatggatatatggaacacattgtggaccttggagagctctggaggcagtgctagtctgtaggcgacagtaccaatcctgtctaagacttcatatggtccaataaatcggaggtttagttttcccctcctaccgaacctactaattcctttaaaaggagtgaccataaggaacacccggtcgccttattcaaacgttaaatctcttcttcgggtgtctgcataactcttctgcctgcactgagccgtctgaatgttctttctgattttaactattttagacatggtctcctctaccaactccgggccgaacaattttctatcgcccacttcttcccaacaaatcggtgatctgtataggcgcccatataacgcctcatacagagccacgccaatgctcgcttggtaactgttgttgtaggcaaattctatcaggggtagatggttgtcccaacggccccagagtcaagaacacaagctcggagcatattctcaagtgtacggattgccctttttgattgtccatccgtctgaggatggaatgcagtactgagagacagctttgttcccatggcctgctgaaagctactccaaaaccgagaagtgaacctggggtccctgtcggataccactgtcactggaactctatacaatctgactatttctcgaatatacattcttgccaacttgttcaagggatcggtcatcctgatggctaagaagtgggaagacttggtaagccggtcaacaattatccagatggcgtcatgtcttgaacgtgccttgggtaatcccgttacgacatccatgacgatatgttcccactttcactccgggatcggtaagagctgaagtaacccgtctgagcgttgatgctctgctttgacctgctgacataccaagcatttagatacaaagtcagctatgtccctcttcatctcattccaccatgattctttaactgtctggacccataggctatgaccttcccatgctgtatcagaacacaacccaaacctagataggaggcatcactataaactgtatatccccccgatgcactcggtaaagtcagtacgggtgcagtggtcagccgctcctttaattctgaaaaacttctcttacagttctcattccactcaaacttggcattcttctttgtgagccaggttaggggagccgttagaatagagaattctttgacgaacctgcggtaataacctgcaattcccaggaagctacggatctccttaactgatgttaactttttccagccaagtaccgcttcaaccttttcgggatttactgatactcattcttttgatatgatgtgtcctaggaaggtggtctgctcaaggcagaatccacacttactcaactttgcatatatcttcttctttctgaggatctgcaaaacttgagatagatggtgagcatgctcttctctgctttttgagtagactaagatatcatcgatgaacacaataacaaattgatccaagaattctctgaagaccctgttcattagatcataaagatggctggggcgttggttagcccaaatggtatgatcaagaactcatagtacccgtacctgattcaaaaggccgttttggggatgtcttctgttcttattttcacctgatggtaacctgatcgcaggtctattttggagaagacctgcgtaccctgcagctgatcgaagaggtcttcaattttgggaagggggtatttgttctttattgtgaccttgttcaatcttctgtaatcaatacacagtctcaacattccatctccctttctggcaaacgtgactccgacaccccaaggagacacattgtgtctaataaaaccactgtcttgcaattcagtaatttgtttcatcagcttttctatcttaacgcggctcatgcggtaaggagcaaccgaaaagggctgggtgccaggttgtaggtctatagtgaactcaacttccttgtccactggcagttcgggcagttcgtccggaaacacatctggaaagtctcggactaccggaatctcttggatacaaattttcttcttgggcttgccctttaccacgtctgggtcagcgtcggcattctgctgtgtgaggttgtaaaccctgccctgaaaaggaggtattccttggttctggttcctcgggcattctcttgcatagtgctgggcactaccacatatgcgacaggtattgttgaggcgatagcatggttggtccctgtgatccctgccgcagtgctgacagatcttgccatgtgctgcccctagagcctgagggggagcctagatcgccggtctgggccttttattttgttggacaggcgcagtaggtgctggtctgcggggttgagctgagggtgtgtgactccctgatgattgggaaagagtgttgaaactcctctccacgatctgcgccttttctagaacagctagcccaagttttgcaggttctcaaaaagaaggtatatacaaagttgagtaaatgtcgattctagtttgatcagagccgcgttcctcggacctgtcccttacataataatacttagaggaattccaaactgagaattattactcaaccattccttgtgaaatacaagtgcagagagatgaggagagggagacccccactaaaccgagcagcctgggatgattcacttcgggaggatgttgacagaatatttgagatgctcgaaaggatcattgctgctcaacaaggtcgagaggagacaagggaattacccgaccctcccccactaccatagtttgagccaccgctgcagtgagcggatcccgagccaccccgacaagagcctgctcctccacagtaccacccggcaccactaccgcaatataatccggtgtctcagccacaatattgcccggcaccgccacagtatgatccggtgcccccactataccaacaggtgccaccacagggcccccccagtctatcctcagcttggcccagtccctcttctacgggacctagctccttccacttttgcaggggagtattctttcgaaaatgcccagtactggttggcggagacagagaaggctttcaagaccttaggagtggttccggagcagagggttactcttgcttcctacatgctggtgggggaagcagatcgttggtgggagctcaagcagaccaccctgcctacgccagtcacttgggagcagttcttagcagcctttcatgcggagtaccttcccgagcacatccgacatttaaaggagacggagtttgttcagctagtccaaaaaaatatgacggtgtcggaatatactcgtaagttcctagagctgggccgatactcccctgagacattgatggatgagggcagaaaggccaggaggttccagtggtgtctccgcccagagatcaagcggcacttgttggtgctagagctcaagacatattcagttgttctggcaaaggcgcagatcgtggagaggagtttcaataccctttcccagtcatcagggagtcacagaccctcagctccactccgcagaccttcacctactgcgcctgtccaacaaaataagagactcagaccggcgatccaggctccccctcaggctccaggggcagcacgtggcaagatctgtcagcactgcggcagggatcacggggaccgaccatgatatatcgcctcaacaacacctgtcgcatatgtggtagtgtccagcactatgcgagagagtgcccgaggaaccagaaccaaggaagacctccttttcagggcagggtttacaacctcacacagcaggatgccgacaccgacccagacgtggtacagggtaagcccaagaaggaaatttgtatccaagagattccggtagtccgagactttccagatgtgtttccggacgaactacccggactgccagtggacagggaagttgagttcactgtagacctacaacctggcatccagtctttttcagttgctccttaccacttgagccgcgttgagatggaagagctgaggaaacaaattactgaattgcaagacagtggttttattagacatagcgtgtctccttggggtgcctgagtcacgtttgccagaaagggagatggaacgttgagactgtgtattgattacagaggattgaataaggtcacaatcaagaacaaatacccccttcccagaattgacgacctcttcgatcagctgcagggtgcgcaggtcttctctaaaatagacctgcgatcaggttaccatcaggtaaaaataagaacagaatacatccctaaaacggcctttcgaaccaggtacgggcattatgagttcctagtcatgccatttgggctaaccaatgccccgaccatctttatgcatctgatgaacagggttttcaaagaattcttggatcaatttgttattgtgttcatcgatgacatcttggtctactcaaaaagcagagaagagcatccttaccatctagctcaagttttgcagatcattagatatatgcaaagttgagtaagtgtggattctgccttgagcagaccgccttcgtaggacacattatatcaaaggaaggagtatcagtgaatcccaaaaaggttgaagcggtatttggctgggaaaagttgacatcagttaaggagatccgtagcttcctaggaatggcaggttattaccgtaggttcgtcgaaagattctctagtctagcggctctcctaacccggctcacaaacaagaatgccaagtttgagtggaatgagaactgtgaaagaagtttttcagaattaaaagagcggctgaccactacacccgtactggttttaccgagtgcatcggggggatatacagtttatagtgatgcctcctatttaggcctaggttgtgtcctgatgcagtatgggaaggtcatagcctatgggttcagacagttaaagaatcatgagaagaattaccccacccatgacttggaacttgccgcaatcatacacaccttgaaaacctagtgccattattgatacggaaagaccttccagatctataccgatcataagagtctgaagcaccaaaatgtatcaaaatatgcgaccccggttttggtggaatgagatgaagagggacatagctgactttgtatctaaatgcttggtatgtcagcaggtcaaggcagagcatcaacgctcaggcgggttacttcagcctttatcgatcccggagtggaagtgggaacatatcgccatggacgttgtaacgggattacccaaggcacgttcatgacatgacggcatcgggataattgttgaccggcttaccaagtcttcccacttcttagccatcaggatgatcgatcccttggacaagttggcaagaatgtatatccgagaaatagtcagattgcatggagttccagtgacagtggtatccgacagggatcccaggttcacttctcggttttggagtagctttcagtaggccatgggaacaaagctgtctctcagtactgcattccatcctcagacggatggacaatcagaaagggtaatccgtacacttgaggatatgctccgagcttgtgttcttgactttaggggccattgggacgaccatctacccttgatagaatttgcctacaacaacagttaccaagcaagcattggcatggctccgtgtgaggcgttatatgggcgctcatacagatcaccgatttgttgggaagaagtgggcgacagaaaattgttcggcccggagttggtggaggagaccacgtctaaaagagttaaaatcagaaagaacattcaaacggcttagagcaggcagaagagttatgcggacacccggagaagagatttaacgtttgaacaaggcgactggatgttccttaaggtcacttctttcaaaggaattagtaggttcggtaggaggggaaaactgaacccctgatttattggactatatgaagtcttagacaggattagtactaccgcctacagactagcactgcttccagagctctccaaagtccacaatgtgttacatgtatccatgctacgtaagtacaacccgtacccctctcttgtcttggctcatgaaccgcttccactccaagatgacttatcttatgaggaagtaccagtcggtatcacggaccgaaagagcagaatactccgcaaccagaaaatatcatttgtaaaggtagtgtggcagaaccactcgccaagggaggttacttggagctagaatcagactttagagcccagtatccccatttgttcgaccaagagtaagagacaaatttgggggaccaaatttctttaagggggggagagttgtaacacccaaaattttcttttattattttatttttattattttattttattttattttaatttttattggaattttgtttacttttattctattttaatttttaatttataagattttaatttaatttaatagaaataaaaaaaataataataataaaatggggtaaaattattttttgaatttaattgaaattgattttcgaaaaaaggagtgaaaatttggattatgagggtgtttttgaaaagaaaatcgaaaactgggggtcaaaatgcaatttagaaaaatagcgccacgtcagcagccgcgtcagtaacccggtcagcagccccggccaaccaggacacgccgcgtggcagggacgctgacgcgggaaaccacgtgggacggagacacgtgggcgattcgcgtgcgcgcaatcggacggcccagatccattcccgcgcgcacggatggcccagacaaaggcacacgtggatgacccagatctcacgcgtgtggacagttcagatttattttcaatttaatcgcgatcggacggcccagattaaatcatgatggacggctcagattaaaggggagggttataaataatcgcatccacacccaaccccaaaccctagccgccagaacccttgccggagaagacgacctagccaccggaggaacccgccgccgccacccgccgccgcaccggaggactttctggctgccaaacgaggtaaaatttctccccttagctcgtttttcgatgccgaacctccctgtgccaaatcggagccaaaccaccagccgattagccggaaaataccccgaagtccagcgccgccacgagtttcctcggtttttgcctccgatgaggcccttcccgtttcccgttcgatgtaatttttatactactatgatcactgtccttttctctactggttgaccggaacaaaacactgtatcacaactcgcgttggaggagccgccgcacccgagagcttcaccgcctgtgagtctccattttatggaattttttggcccaccgagggccctagggattttttatcacaggaatcaatgcaagttttgccgaaaacggccaaccagaggcggatcgccgtcgtgggcggtggcgctctcgccggagcacttgtggagccgccatgccgaaattccgaaattggtcgaaagggccctgggtctgatttgggattttttggggatatgtgcaggtaccggaagtgtgttacagtttccggaaaaaaatttagggaatttagggactgcccgtaggcgcagtgagaactcgatttcagactccgaaacaagtaaggatccctcaccttatttcctatcacggcattaaagcttaataaatgattaaacgatattttatgaattaatagatatgtataattaattaaagattaccaatggggcccgaacctgatgtatttgtcggtctgttcctgttttatgtattttacagtctaaatgcagtatagtatttgattgttcattttgtggtttcgtatgcatgaatagctgtttaatccattatggtttgaattatggtggactcgatgttgtgttaccttatttggtgtgcgttgctggtttatgtattcacgtaaattgggtaattgagactaagaaaaataaaaagggtatgtgaatttataaatggataagtcgacagtctcactaaatatcctagaagatggtggacggagcgggtacatagggaaccctatcgggaacgtggtctctcatatcgaacggggtatggagactttaaatgttttggcgttcatatcggacggggtatggggacggcccgcttcaccctcataccggatagggtattgaggtttatggttttggcgctcataccgaacggggtatggggacggccctagaattaaggtgaattgttcacgtgtagtggggacccctatggatccccatagatactagtaagctgataaaagaggaaatttgttgtttgatgattgaaacacaaaagtataacatgtactatgatacagattatgtatgaattcatgatatttatgatattattgtttctataggtcattttcatgaatctcactgaggtaagtagacagtaaaattttttattattgataaatgagtttgttataaattatgctccattggtcgttttttttttaccaacctttacttctgtgacagtgagatagtgtgatgtctttactgggttagtataactcattccttacttaactatttcagataaggaggatttggtttccgaacccgttctgcaggaagatgacgagtagaaaccaaagaatttattagttttacttatagcattcattcataatatttcttttaaattagtttattctttcatacgttaattcgttttatttattgtggaagggatgttaatcataatctattttatttcgattccgtacctaaaataaatatatacatttccttttattcccgaggccgttacataatgagggctcagatttgtagcatctcgctagtgttgacacattgatgtatgatttttcatgtaaacatctttacctttgatggaactaattctttccaagatactttgacaatgtaggattggccggaggtgtgatgttaaatgagatgttcgaaaaaagatttctaggtgtaccgctccaatggatccaaagaataatgaggctgcctattattgtcgattaagtgcatctacttctttcttctgcatgttttataatgttctcgtgattgcatatggtttaaagtcacctccagggagatggtccccccaacccctccccaaaattttgtactgatgtttctatgtttagaaaattatgtttttttctttacaatgacttaaaacattagtggtagtagacaagcttttcacatttggttactttgataagaagttacctcccctctctcatctcaaacttgaacttcttatcaaacctttaaataagtaaaaaatttttttctttttcgtatatttaagtcgatatcactaatcctttatcaactgcagtccttgatagcttcacctgtttcttaatagtagacttttgtttcctatttggtttgctggcttcatatatcactttctgttgttttatccattaccaaatgatctttagtatataatgatatctctagccttcacttatgtactatcacctaatattctaactgatatcaataggtttcaagttacacattttccttgtttggtttgttgccaggta

SEQ ID NO: 8615 - DNA, 1206 bp, Carica papaya
  Intron number 4 from transcript evm.model.supercontig_4.12 4 (locus evm.TU.supercontig_4.124) derived from phytozome v7.0 (chr-ID supercontig_4; pos 2370193 to 2371398 reverse strand)
aaggcaaggtaaattatttattcttcattctgcatatcactttcttgtgtcatgttgcattgttgtttgagctgtcttgagcttctagtgtacctgtagcatatagcaactggattttgtcatctttgcattcgtggaaattcacgttgtattctcatttattgagcttggatcaattttcttcttttcaattgaacagaatgaagagttgtcaatatttttctgtgtttcttcctctttttttctcaagatggaaaagcttagatgttcacattgatgttggaaatgtgaatttttttaaaaggtagttgaaagtaagggatataatgtaaaagttgtttcccaatggggaggttgtgttctgtgaatcaattgaagcatgttaattctgtgcttcttgcactaaatatagtgtgattccccttcacatggtcgatttaagagggaatctaatgggaagcatcaaatattcttttctagttaattatatattttgtttttgaaagtttgatagagaagttctgttgatgcatcaatgattatgcagggtcatgttcttttgccacgcttggttcatgtttgctcttttctagtatagttattagaatgtctgttgatatatagaaacagattcataactttcatgcaaaaattgaaccgtagtttttatgtttgattcatggatcaaatctactgatgcaactcgtactcgtagttcccatttgggttcatgtcttagccaggtcctaattctgatacttttatgtgttggtatccatttataagatgattatttttttcagaaaaaaaatttgtgctgaatagaaaatcaaccaaaagcatcctttaatatgtctttttctagattaatttctctgcgttagtcaagtatgcactaacaacagaaggagaatactattgttttacaatctaatttcgttgatactaactttcaacctctactattgtttgacaatctaattttatttatactagcttttcaccttaaaattgcctttaactttccatgtgaatatcttttgaagacatcatgaaatgatcttgtttagttactgaaaactgctgccaagtttcagtttcccaaatttatataatgtatgtataagaggaggattagcttcggtttcctaattttactctagcgatgatgcatcgtctttttatcgttgcagttgcgggtagaat

SEQ ID NO: 8616 - DNA, 1481 bp, Carica papaya
  Intron number 1 from transcript evm.model.supercontig_107. 103 (locus evm.TU.supercontig_107.103) derived from phytoz ome v7.0 (chr-ID supercontig_107; pos 554986 to 556466)
ttggcctcggtggaatctttcacagcgctgttcaggtttctcctttctctatctctctctctctcgatctctattcctgcatgtatgtactttgtttgtgtatggtgttatgcattcataggtcgatgcactcgtgtggaaattctgtggttgtgaatggatctagggtttctatatgatgaaatgttggcctacttaagtagcacttttcttccgtatattttagatgtttatgggtgtaagtttcgagtgatttcatcagcttctgtttttgtgttttggcttgtgttttttacttgtatctacatgtttaataattttgtagtgagattcaaggctcaatgaagaatatgtttccatttgttttcattttcttatcacttggataaaagtcgcctcgccagtgactttttagctactagttttcaccttcctaccggttgccaaatagttctcgattacacgactgtctctttccatgattgggttcggtgaacagtgtgcttggtcaacattagttaaatctgatgaaatttctagatgatatcttgggaaagtaaggagcatttttcctttctatgtttttacttattaatgattttcctaatgaaacttgattagttttaggctcaggttctcctattgtttcttaattctactctttgaaccatttttcttcaaactagtaatgtataagctaagtgattgtgatgaattttattggaggtcctaaggcatcatattctctcttttcttttttccacaagtcatggattgtagtagcaatgtcccgtacggtacagcgggaatttagtttagttcctgtatgagataactggaagtatgaacattttgacgaactgtttcccacccttttttggaatttagatatattgattttatttcagaattgaagaaatttatcttgtagttcagccaatgtagttgggcagagccttttttaagttaactaaactataatatggtttcttcatgagaaactttgatatgatttctttacgagaaactttaatataattatttgtgttgtttcccttgaagaacaatttctgtttgttgactggaggcttatcacttactattgacatttataagcaatgtatttttcacttaatttatcagcatacttttactaataattttgcctgtgaagtgaagcttctttgtcattgattatttcatagtgaaaatggaatggaaaggtttgctatatgccaaccaacaatacatgcgggggagctttctttaaatgcttgtacttatgtcatgtttcctcttctttacgcaataccttggacatcacagaatatccctatttcttttaattggtataccaattttgatttggcttttctatgcattttacatgctagcaataaaatgcatatatacatatatttaagttaggtagagaaatatggcaggatgaaaaatttgttgcttacgcatttgacaggtat

SEQ ID NO: 8617 - DNA, 711 bp, Carica papaya
  Intron number 1 from transcript evm.model.supercontig_21.1 05 (locus evm.TU.supercontig_21.105) derived from phytozom e v7.0 (chr-ID supercontig_21; pos 1258693 to 1259403 reve rse strand)
cgctaatttacgccgctgctgatttgacatctcaggtgaaaattggggttttaattttaatttcgtttttttaattcattttctggatttatatttgtaagtattttccgtagctatcagattgtgaagagtatctgtgtattcggtgagtgattacactttatatgaagaaattagagattagcgtttgatgttctttacgtttgcatgctgtatccggcaaacctttgtttgaatttttgtttttcgagctgcttttcgtattgcattaaaatcacgaatttaagaataactcttaacacttgactgattcttgcagactaacaccgtgtttaggacaaacgattccacgaaaaaaaatgtggaactcattttgcaaatgtatattttcatgtttagaattattccaaataatagaatacactctgcaattaagtctacttaaaatgggattgacagatacttgaattctattattttttatagaattcgaaaatgaattgcaattttgaaggacaaaaattttgagatgacttttacacacttgttaatgttctcaaaaaacgtagtaatttaattcaattccaaagaattgtctaaaaagttctgaatggattatcagcataaataattacttgtaaatgaacccgttattgattctgttataaataaaatgaaatttgttgtacatttgttcagaagaagccttaa

SEQ ID NO: 8618 - DNA, 527 bp, Carica papaya
  Intron number 1 from transcript evm.model.supercontig_26.2 54 (locus evm.TU.supercontig_26.254) derived from phytozom e v7.0 (chr-ID supercontig_26; pos 1754725 to 1755251 reve rse strand)
ggctcatttccataaactccctactaggtacactcatgctcaaccctagttttttacggtgaactcaaaactagtttggttcatgtcaagagcaaagaaaacaatggaacaagaaatattccatgctatagtttcttgaattgtcagttgagagaattttgacatttacattatattctacttggattttaatttatccaattacttgtataaataatgtgttaatttacgcttattttgtttgtagcttgccagttgcaattatcttgatctcactgtcgttaaatatttctgcctagttaataatcttcttcttctttatttaagtttctgtcaaggaactgttttggacgagattcttttatttcaatccttttctgggtaatgaaatgcaatcattcaaccaaaacatgactggtgactgtcaatattcacaatagtcaaaacggtttggtttcttgaggattttcatgtatggagattcgataagaagccactgagaaaaattctttggggtgaaatttcag

SEQ ID NO: 8619 - DNA, 5820 bp, Carica papaya
  Intron number 7 from transcript evm.model.supercontig_57.1 9 (locus evm.TU.supercontig_57.19) derived from phytozome v7.0 (chr-ID supercontig_57; pos 344411 to 350230 reverse strand)
tagttctcataagaaaggtaactctggcacgtgaatcttctttcttgtgaaaacttcatttccagtgctgttgagatatctgtcgatattagacattcaataaaattaacacctagcagtagaaattcaaagattttgggaaggaataatgcaatggtcatttagtgttagattaaagtggcttctttaacttcctaaactacatctagaaattgtcatctagaccctagtgtgtgtcttgcaccctaagaaaccaaatctataccaaggaaaacacaatatctaatggcttctttaacttcctaaactatatctagaaattgtgatctagaccctagtgtgtgtcttgcactctaagaatccaaatctataccaaggaaaacacaatatctagtggtcaatcttctagtatctacacaaaaatcctacttcacccaatcttgtcttcactatatatagaaattgtgatctagaccctagtatgtgtcttgcactctaagaaaccaaatctatatcaaggaaaacacaatatctagtggctttttttatcttcctaaactatatctagaaattgtgatctagaccctagtgtgtgtcttgcactctaagaaaccaaatctataccaagaaaaacacaatatctaatggtcaatcttctagtatctacacaaaaatcctacttcacccaatcttgttttcaagaagagcctatattagaagataaagatacaaaattcttaatagattttaatttaccacttttggcatacaccttaagaccatcacgacaagaaaacgtatagagctcaccactataagagaatattcaaaatctatcatcttaaaaatatcataccaaaccctagattttattaagtgtatataagagaaaagatgccaatcaaaactgctccaaaaatctgatcttaatcttagaattgaggtaagttttggaaaacttatatagtcctctaataatggtataccaattgcatttcgtaaaggtacaagagaatgcaataaacatcatctgcaccctatctcacaatttgtgtcatttgataaatgtttatcaatataaataaacttcttcataaatttaaataatgataatatctctcacactgtatctgaggcattatcctgcggaaaataaaaaatattatgagtgtacaaatacagacacttgaaaaagaatttgactttgggaaatggtggatctacttttgggaaatggtgaatctactcaaatggaagaaaccagtgggatgtaaatagattttctcaatcagaatccaaccttgatcctggaactgaggtaagttctacaaaacttataaaatcatttgataatgaaacacatattgtactttataaaagtacaagagaatgcactcaataccctctgtatcttatctcccaattttataccatttgataaatgcttatcaaaaaaattttatgacaagtttaattaaggtgtctaactttaacacaatatttgagatattatcctctggaaaatgaaaaactactatgagtatggaaatgcatacagttgaaaagaatcagacctgagaaataatggatttacccaaaagcaagaaacttgtaggatgcaaatgcgtttttcgtataaaatataaagaaaatgggacaatcaagagatataaagagagactgtatgcaaaaagattacacataaatatatgaaatagattattaggagacatttgcaccagtagtcaaaataagtactgtgaatctttttatcattatctactcactttgacttaaaattataataatttgatgtaaaaagtacctatatagaggtttagaagaaaaaatctacatgaacattctaccaaactttgacagagaaataggactaataaagtacgtaaactaagaaaggctctgtgtaaactcaagcaatcgccaagatttagtaagtttgcaatagtgatgatagatcttgaatctaagcatactcaagaaaaccacactgtattcatcaaatacgtaggataggaaaagttacaactctcttagtatacattaatgatattatcgtaacaaaaaattatgagaaggaacaacgactaaaacaatgcatgacaaaaagaataaaattaaaaaactaggcaagttaaagtattttatgagaattgaagttgctcattctctgagtattttatgaagttactcattctaaacaagggactttttttatcaataaaaatacatgcatgacttattaaaagatactaacaagctagtatacaaactaggtagcactttatttgattttaatcataaattagaaatagcagacaagatacactagtaaataaagaaatgtataagagaatagttgagagatttatctacctaacccacaagagactagacacctatgcattaagtgttataagctaattcatgcacaatttaaatgaagtgcacttgctagcatgttacacaatactataatacttgaaagagtcacaaacgaaatgaattttattcaagaagaataatttattactcgtacaatactgtattgatgccaattatacaagattagtagtaaaaagtagatgcaccacaagttactgtatcttttttggggtcgacttagttatctagttgtctgaagaaataagaaataaaatgtagttgcgagatcaagtacagaatcagatttttaaacaatggcataagaggtatgtaaagtattataaataaaaagaattttgaaaaatcttggaatcaagtggagaaattctatgtgtctatactatgacaagtatctcataagcattactgacaatctaataaaatatcaacggaccataacacatcgagcttgacaaacattttatcaaaaaaaaacttgataatgacctaatacccaatacatgtccatcaattttctactaatagatgtattaattaaatctctaaacaagtgaaaattccaaactcttattggcaagtttaggatggacgacattcattcccaacttgaggaggagtgttaaagagagagtaaattacgttgaaggatattagggttcctttgtataattgtttattttattttctatcctagaaaacttatacatataatactgtaatattgaatagaatacacattaaaccatttttaataggttatgacatctgcaagaattctatttttcattttgaccttctttctggtaagatatgtcaatattaggaaacacacttttttttcctattcatttattatcaagaaaaaaagtgtctgtagttcctttaacttagttgcagcatgccatgtgaatagaaattgccttcctacttcctttactaagttacaccaccttggatcaatgattatctttggaccagcaatctttcttgtttctttgtctctctcgatctctatccccaaaattttcttcactctaccaagatctttcatttgaaactcaatttttaaatgctcctttaatacgtttatctatgtcacattttttgctgcaactaatgtcctcaacatacaacagcaagtaaatgaaagccacatttttcaccttcataaaaatactaacttgtcatatggatttctaaaaaatccattaccaatgatataacaatcaaatttttttttactattgtctgagtgtttgtttcaaactattatgattttgtgataatttaatttcacgttgaaaaagtatgtgattgttgaactctattaaaggtttaaactataaattattaataacttgatttagttttttgaagattgatggtttgaaacaaaaaagatgttggctggcgttgttagggctcagaatattataaatggtattaaaataaataccaactttatgactctaaactcgtacaatctttagacattatgaatttttgaattataatttgtgattatgacataagggtttaatatttgtgttatagagattgtgaaacatttcatattggaaaaatatgtaacttctagacttgtatatatataactaaaaattctaggattaggtcaatggcatttaggccttagccattataggttttttcaagaaatacacagtttttctttaatatcaactttaaaccccctcaggctacctcatatacatctcgtcttttaactcactatgtagaaatgtcgatttagaactagctgctcaacttccaagttaaagcacataccatgactagtaaaaccagaatgattcatgcttcactactggagaatatgcttcactacttccaagttagaactttaaacctcctcaggttacctcatatacatctcattttttaactcactatgcagaaatgtcgatttaaaactagctggtcaacttccaagttaaagcacacaccatgactagtaaaaccagaatgatgcatgcttcactactggagaatataccttatagaagtgagagagccaccagccttgctttgaattctgctgattctaatcgtaagattttttttcctttcttgaatatccatttgcattcaacagttttgttatctttggacaatgtcaccttttccctttcctcccatgtctgattttttttccagcgactccacctctcaataccaaccactgagcaaaccacttaacatttactgcatctctatattatgacgactaatcagactccacctctcaatacgtttcaaactacctttaggtgcgttttaatgtaatcattttctccaacggagtggcttctacttaatttctatgtacgtaaatttttagatttcacaaaaataaaagtatatatatatatatatataaaacttttcctcttttgggtgcttgctcctaaagaaatgagctttaatagcagtgatggtgtttgaggcacgaaatttcataaagtttttgttaaactatttttaaactataatttttatgcctcgaataccatcatttagtcaaaaatcatccagaactttgacgtaggttcacaagagatagaaatgtggaacccatgtcttccaaatcacctgctcccttcaacacttcgtatgattgcacattaatcctcgtcccaaaacaaactccactatatctttactaattactggaaaatggtagacagtagacataataatcattatcctaagacttaaaatgtcttgcaataatacttctttttctcggtactaatcattatccttcctggtcaatgttactgattttatcaaaaataaataaataaattgactgccttgctcttgcatgggaaatcaaagattttattgtgttacatatgctaaattttgctgagaagtaccttgaatctggttgggaagggaaagagaagagggaacaaattaatcgttgagtaatttttatttaatatagtttacccaaactgtttttttaatggaataatcaaatgatccttatttctcactcctctctctcccaaatggacccataatttttggttttttttttttttttttttgtaattttgtctgcctgtgaactatatttattagatccttgtgaaaataattgttgttgtaattaaattcaaccacctgctaggagatattcaaccatcattaagcattcttttcctttttttttttttttttccttttcactgagtgatcttctactcttctcagttgtatacctgccaaatggtttttctttttcttccctagaacaatcttttcagtcagactgtttgcatttgccgttatatgaatctttgttgttcctttctgtggcaattggtttcctgggtgttgttgcagggg

SEQ ID NO: 8620 - DNA, 6565 bp, Carica papaya
  Intron number 3 from transcript evm.model.supercontig_7.19 5 (locus evm.TU.supercontig_7.195) derived from phytozome v7.0 (chr-ID supercontig_7; pos 1936406 to 1942970)
agggggatcctgaattacttgtttatattccgtaagtggatatatttctctcatttgttccttgtgagtctttttatttgcaacttgagaagccgatgtttgttaactagatccattacttgtaattctataatttcataaccttccttgatgccttatacttagtatacttgatttttatctctataattacgtaaccttagagaaatgagataatatgaaattctaaatgctaaccaatcaaacatcttttttttggggggggcagggggaagagaagcgatgcagaacaagaagatcctgaagtaaacatattttaattataagatatatttatgtaattgtgatgtttatctattattaatatatttagcttatttaggaattaatatctgcaaacttattattctcttttgaaataaaaagtatggcaagtatcatcaatatacaaacaccaaataggatgtcaatccatgtacaaaaatgttacatgtctactaggatgtcaataaggtccccaaaatctttcatagaataaagaggatgacctgtaactaaaaaatcaagggtctaaaactatctatctttaaccttatcaaaatcatcttccacccctttaaaagctcttatttttatttattttcacaccaacccgaatatagtaagggaaatcatcaaactcacatgtttctttctaccactaatacacttccaaactgaaatctcatcccttattgtaccaaccatctcctaaccaccacatgcctcacatggacatttagacacacatgaaccgaaatattcttgtatcgtgcaataatgaaaattcggaaaaactgaactctgagtgctccccctctaagctaagggtccttctcaaagaactcttatgttgaataccatattttattatttaattatttagtattatgtaattatgattgtatgagaataataatttcatattattagaattctagtagaataagaatttccttactagtaggttaggaattatataaatgttataagtgtaacaacctaaagagtgattttttattatttaattatttagtattatgtaattaagattgtatgagaataataatttcatattattagaattttagtagaataagaatttacttactagtaggttaggaattatataaatattataagtgtaacaacctaaagggtgataaataaaattatttattttttcttaaaaaattaacatggtatcagagccaaataaagttattttagggttcttttcaaaccctaaaatagcacaacatgctaggttgacacccttttatctagatctgctcttatcaccactcaaaacatatttgaacccgctagtgttctgtggtgtttacggtggttttcaccggcgattcaggcaccggtataaagtgcactgcacctagaggcgtcagtaaaaggtgcactgcaccctggaggcgccggtaaaaaagtgcaactgcaccctggaagcgccagtaaaaagctgcagccgcaaatttacaggcaccggtaaaaaagtgcagcagcactttcgcaagctctggtaaaaaggtgtttggaggtgtcggtaaaacgctgcagccgtacatctacagatgtcagtgaaaaaggccgcaccattctatttttatgtgcacgtttagagatctgtccggagaagatgagtcaagttgacttcgaactgttttttgagccgattttaagccattttagagtcgattttgagctattttagagtcaaacctgagccgttttagagctaagctaagcccttttgagcttagtagtacggttttgagccgggtcgagccgttttgaggcagattgagccgttttaagccaggtcgaaccgtaccgagtcaagccgtttgacccaagtcgagcacgcgtacacatttggcaaattgtataatgactcttcagaactaggtttgcgaattgggcatgtgcgatatccctacaccaacttgagagagagtgttgaataccatattttattatttaattagttaattatttaattatttaatattatataattagaattttatgagaataataatatgatattattaaaattctaatagaataagaattttcttattaatagattagggattatataaatgccctaagtgtaacaatctaaagggtaaaaaataaaattatttattttttctctaaaaatcaacagtttactatttcatattaagataggatcttatttagttaacctctattataagtttttttttaaagtagttaacctatattacaagttactccaattaattagcttatgttctcatttggtgcaattcctagatagatttaagaattcatatttttatgatctagcacctagaaataggtttccgagcttagttatttgataaactatttatttgattattgtacaaatattgagttagtgatttgatcattgagatataaaatttccaactttgcttattaaataaatttttttctttatatgcaagatctttttatcctaaattaaatctctttgttgaaggatctattgacgcctcgagttttgtacatgttagtgatcattgaaccaatagaggcagggtgattttggtctctaagcaatgaaacctagaagagaaacacaatgtttaagacacctaaataggtgcactggtttggaatctttcatgagtagaactaatggaaaataccaatttaaatgattaagaagtcactagtagggatgtttttgacgcttcagaggaccctctctctcttgtttcttctttatttggaagaagaacttgaaaatgattacttttttcacttgggtttgacttggaggacaccatggataggaggtgaatagcacgggtgatgctctagatacagataaggatgaatctggtctggtccaggtggaagggcaggatggatgtcttttctcttcaaccaataggtttctggttaggaagataggattgcagttatggagcagattttggaaacaaagatattaaatcctgtatctaaatagaaccttttatcttcggaatgagtggatcttccatttaatcttgacactatatcttcgtgctctaaccctacaataactatgtcactcttaaatcccttagtttaacctttgataattttttatgcggtgaatgtaataatctcagccttaatagattaatagaagatcctttagtctatgggggatttagggacagatggttccagaccctcagtttttttgttattgggtcatgctctttgctttatcaaagatttaggaaacctcattgatattttgggagatatataaacaattgtatatggggtgccccccccttgtgctgttaataaagtacttattaactttgtatttgaaaaaaaaaaaagaaaaaaaacgaaagaatcctttagtactcctactgtggatatgttttaccgtctttctacccttgttgtgagttatcaaatacatgtgaggcccaccacatctgttctttcaattaagcaagggaattataatgaggacatgagcaagattaaggaacttgggtttaggcttgtggatcccttgggaaagacagtgaaagtgaaggtctccctaagacctatatgaggaagaaaaaacacactgacctcgaatgtaataggttagcctctattattcattatgggtatttaaagggtaggcagggtaatttttttctcaatgaatgttataaattggaattttaatgggttggttaatgctcaaatgcgaaaagtttaggaagataattgttggagtgctgtgaatatttttatgttttaagagatcaagagggtattcttgattcaatgggggtttgcagtgtttgggaatctagatttaagagttggtattggaattcttcctgtggggcttcaaacagcaacatgattatgtgggatcctagggaagcatctcttatagattccatcaagggtttctttctactttggtgattttggacattagaggtaagctttcttaatgattctcatgtgtttatggccccaaatatcccaagcttcagaaattagaggttagagcatccttttgatgaggataaattcgaagagcagtatgggggctcagtgtctgtaggactcttggagtggatccttttctatggccttcttatggtgcaccaggatgtaattaaggcagattcagtttaggtttttgagggatttcacctaaatggtaagattggaattagcataagttcttcctttattacctatagtccccaaaagaagctttttgactataggcgcatcagcttgattgctagtgtctataagttaatgaagtgctctctttgagattgaggcaggagcttgatgatactatctccgtgcaccagagttttttttttttttatgtggaggaagacgtattctcaatgctgcattcattgttaattaggtgatggacgaagatagtaggccaagatataaatgtgtacttttaaattggatttagagaagtcttatactgatgaatttggtttcccaaataaggtgttgcatagaaaaggtcttgatgccaggtggagtttcttttgctgttatggtgaagggaaggctagaacttggttttgggggcagtttcattttaggaaaagaatcctctttctctcattctctttatgatgtggttgatgttttgagtcatatgttatcttattccacagacaggtataacgaagggacttaccatggggcctgaaaatgtattataaagtctgtcatctccagtttgttgttgatgacgagatccttttttcattaagcaatcatgaaaattttggtaatgttcttaccattttgcatttgtttgagagtatttcaggcctacatataaacatcagcaagaatggttaggtagcaatcgctgtggaggagtaattggttgttggctaagttggtaggttgtgatctcaggctatttcctaccatgggatctctaagcttcttgaggtgttgagtatgtacaaaatatttacatatcaatcaaaaaaacctagactttggagccaactatctttgacatcctatcatatttcacttccatgccttcgaaagcttctatgtttctttcttttcacgccacccaaaaagtagtaaggggaataagactaacatgcttcttcacaccacttattccttttcatgccaaatttccttcctcaccaagtcagccggcacccaattaatacccaagaggctaaagacaaagggacaccacagtaggatatggttgcatgactccacgtcccttttgcacaaaaacaactatttactagaatcctgcccctcctaattagcttgtctggagttaaactacatcccttagctacctctcgaacaaaaaaagccactctgggcaatgaattcactttccaaatttgcttggattgaaagtcattgccggtagtctctcttttcatcaaatggttgtaggacctaacaaatatctctctagcattgagcctccaaatggggtgatctccggtactatcaagtctaaccttagcaagagcgagaagtaaagcctcatactcccttcccaatcattgaggttccttgtgacttccacaaaccactccccattccccatagtaccaagataagactcttggagcaaagcattcttgtaacaagcaataccatagatataggggaactgggctttgagtgtgccctcctccaaccaggtatcatgccacagactgacctcatcccagtgcccatcctgcagctaatacaattatggaacctccttttatccatgcaaattttcttcaacatcccgttactatggggtctagacaaatcccttgtgaaccatcctctatccacagtaccaagtttcgcttcaatcaccctccaccagatactctcattctcattcatgaatctccaaagtcatttcccttgaagagtcatatcaacttcattcatgttggattggtagaaacataaaatctagcttacatttttttttctctgtcaaaacaaaaaacatttcttgtatgatattttatatgatagcttttgttgtttccttgaaaacagtttttgagcttccccatcaccttaaatagcctcctgatctccctaagatccttcaatttgagttataccaatgagtcaaaggaagctcctggttttggctcaagcttttctcataagtgagggggcaagcatggacctacctgcttcattttaaaggtttaattttaccaaataagaatatgcaggcacttcaaatcaattactttaaatagctactttgagcatccatgaataacatggtcaaacttcaaaatcaagagggaaaagttgagattatgaaaagttgatttgagttgaaattggacaaactttaaagttgtaaggctgaccctgtagtttactgaaaaagcatacttttttacaggaatagttcttttcaagttactaatctcttggaaagatttttgcagattcacctcag

SEQ ID NO: 8621 - DNA, 2965 bp, Carica papaya
  Intron number 5 from transcript evm.model.supercontig_131. 81 (locus evm.TU.supercontig_131.81) derived from phytozom e v7.0 (chr-ID supercontig_131; pos 573754 to 576718)
ctcctatattggccgccttacatcctctaattcaggtaaaataatatatataatttttttatatgaaaggaatgcatgtttattacatttgtgacacattgattaaatctgtgccaagtgcataggaaagtcgagaattgaattaagttgtgattatttaattcataatgcttaaaattgaattactgtttgtacgaggtacaaaaattgagggttgtgacacttgatatgaatgataattgtaaaactactgtagacagtgagatcaggctgcccattttcacgaataagttcagcattttgtatcataaattgagagcatggggttttacagcaccaaatcagatttatatcctctctcctgcaattattttctcctgcaatttctttatacatttgtgctgcactgatgtatgaatcacattggtcatatacacatgctaaaattaacttggtgacaattgaacctaaagatttttttcaaatttaagaatcaaacattgtctaaaagaattccaacttttaatatttgagtcaaatgacactgctttccgtttcctctatcctgtgcttgcgctccctggtacatccacaacaactggttgataattatactaatttatggataatactaatgcatggatagttcaatcatccacttataaaataaagatatttttcaagttgagtatgtcagtatgtagtatgtactactgtctgcttttcgagactatccttttccttgcaaggggaagctgtgaaacctttgcaagttttaaccaaataaacaaggctgaaagtcttaaggtgttttaggcttctcctgaaacttacttcaggttgtcaaaattttttttccttccacatcactgcaatagtagatatctgcaagatttctttaacaccggtggttgcccccaaatctttctagttgattcagttcaagcattgctgatgctttttcatttcttcctgaagagacaaataggcatccaagggtctttctcccaatgacctggagattttttgtttcacatggtttttgtgctgcaaatgttcctcagatgtcagttaatccattttatggcaaggtttatgaaaggttcacttgtggaaagaagaatacgcaagagttttagctaagtgtctaattctatgcattattttatttatttgtttgtgggaagtgtgtcttgtctcatttagtgttgcgtcagttattgttggttattaggcagctttttatgtttgaaaaagtattatgggtctactactcttttgtagttatgatcctaattagtagtaactgtcctaggttaaggccatctattcagagaataaaatatgcagaatattatttaattatttagtcagtactttgaactccaggagccattctggtctcttttaattagtccagacattcaatcaaataaggtcagacaggaaggtaaaaccataaattttttggttcttcatccttaggctttggtatgcaaggattcataactagatccagggcacaggattctaatgttttgtatatgtgcttggttattggtaattttctttttggggtataaaaaggagaaatattgttacaaaaaaaaaaaagagaaatacagaaaggagaagggatcagtcaacggcaacctcaaaactagaaagagtaaggggaaagaaaaaggaaaggaaaatcattcacgatataatctcagttgtctagtcactttgcaaagtaattaagaaatccccagaaatagacctaagactaaacccaaagaagactccaaaagaactagtctgtcccacagcaaggaaaaaaggggattggaatcaatttttgataactttttacattttctccaaccacaacatacacaatccagaaaaagaagcttcagtaacattttttttcatccttgctcacacgacattattctgttgatgatatacatagaagcctttagctgtctactagaaattattaggttaaggcttatcaaccattaattttaggtgccaaatttttcagttaatagtatatctaaaggattttccttgagaattagaactgcaactacttacatatgcagtacactttgaatcattacctctgcatttctcggctttcgaaggagtcgaatctgattttaacatcattaagaataactgatttaactattttggttcttatattttagggcataacgttgattattttgacgatttaggtaaatttgtagatatgctaatcgagatgtaaattctgtatatggggggtgctcccttaacacctttttatattaatactactcttacttttatttcaaaaaaaaaaacctctacatttctcttttttttttttttgaaaaaaacctcatttctcttttatattcccacaaaaaggttccaggaaaacttgggggatgttacttggatgcctttggtattttgagtatgtttaaaattgttggaaaaaatgtatttaaagtaatatgatgctttaaattatttaaattcctatttaaaaaattaacagttgtatctttggataaaatattgatttaaaaaataaaactgatatttttaataaacagttattattaaaggaggataccaagagagtaactatggaaattagttaaataatagataaaaaacctgaaagttaggattagagtgaaagtcgcttttgagaacctaatcaacattctacattttatgctatcaaatagaattctagtacatggtacgcaagcttatgctatcaaatgcagatattagtacatggtacttaaaactgtctatgagcaataaataagcaatctcaaatatgcttatgaatattctgtatgttgtgggtattgtaattcgggtttttgcttgagtaaaaactatcatcctcagattttcctactttgtgccagttattgctaattggaggtcaaatagacagtgcaat

SEQ ID NO: 8622 - DNA, 4151 bp, Carica papaya
  Intron number 5 from transcript evm.model.supercontig_17.1 78 (locus evm.TU.supercontig_17.178) derived from phytozom e v7.0 (chr-ID supercontig_17; pos 2192751 to 2196901 reve rse strand)
ttggacaggtttaaaatcagtttctcttttttcagttaacatattataaatattcaacttatcttgtttactgacaaatttagtccattctatggtattagaattagggccatttacgtgtgataaaaaacttttttttttttctgagatagaaagtagaaaaatatattagagtaggtaccaagggggtgtcacccatgtagaaaagatgataaagaactcttttttttttttgaacaagtcgttgataattacctctatcaactgcaacatcttgtggcagatcactcagcttatggttgaactctatgggcgtgtcaactggcttacatcctagtttacctatatcctttaggagaacaatcacacacttctgttgagatatagaaatcctttactgagagtgtgccacttctatgccaaaaaagtacttcaatttaccaagatctttgatctcaatttttctccaaacatctctttgacttttcaattcctttcatatcatcttcagttactattatgtcatccatataaagcaaataatgttgtaacttcccctgaagctgaatgtctcgtgtacaaggtatgatcgccttgactctgtctgaatccaagacttagcttgactttggtgaaccttccaaaccaagctcacgaagattgtttgagtccatataatgtctttttcaacttggatgctactccttcttcatttatagcaccgaatcctggaggaactttcatatagatttttcttcaagattgtcatgtaagaagtcatttttgacatcaaattgctgcaatctccatccaaatttggctactaatgacaataacacccttaccatgttatttacaactagagcaaatgtcttaagataatctaggtcatgagtctgtgtataacttttggtaaccaatttcgccttatacatctacactcaactattcttttttttccttacggcaatttcaccaaatcctatggcttgtttgttattgagccttcatcctccttccccccctccacttctcatggcattcctcaaattctcatctcttagtgtcttggatagtgttttaggagtagcagtgctattaaggctggtaagaaaggccctatgattataggatagcttcttataggacatgaaaaggtaaaaggggtgttaggtgaaagtcctagttccttttctaaaggctacggggatttcatgatcattttcttttcggatatatggaatattagaattgggagaagtggttggagtacttagctcaacagtaaaaggttttggccacaccagttgagagaatggtcatttctttcttgaatgaaccttagcaaaatactcgagatgagtgtggtttactttctggctatgggggtggaagatagatcactttctgctgaaactgtagggattacataattggactggaccaaatttacggatgggacagacttggactggacaggaatggatgaggatggcttaggcacagttaacccaagaaggacaagattttgtatccatatctttcatgaatggcatcttctcctcaagataaggattgtgaaaatattggttgtcctcaatgaaagtgatagtggccgacatgaattttcatgtgagaggatgatagcacttataactcttttgaatagataagtaatcaacaagtacacatttgaaagcttttggatcaagcttacccctatgtagagaatggacatgaacaaatgcaacaaaaagaaatatttttggaacaagatttttaggaacattgaaattggggtagaacttcacaaaaacttgtgtgcaactctgaaaaccaagcatccccatgggaagtctatttatgacgtgaactgcagttaacatggcttctccccaattttttttggaacttgtttttggaaaagaaaggcttggataacttgcaaaaaacatggatattttttcgttctactattccattttatcaagaagtgctaatataagataactcctgaatgatatcgtgttcttcaaagaatggacagagggtttgactgaaatgatccttgacattgtcaaatcggaaacatctaaatcccactccaaattatatcgtgatcatattgaaatacttttcaaacacaagactcacatccgatttattttttaaaagaaaaatccacatcatatgagtgcaattctcaataaaccaatgagtcccagaaatttaggtacagtagaatactcccaaatgtttctataaataagagtaaatagaataaatgttcttttattgcttattggaaaaacagaaagtttgagcttagtgagttcacacacgttactataatgaccaatgaaggaaacaaaatttttagaaaattaaatgacagattatgaagactaagataatgaagccagatcttatctttattggatttaaatgactcggtaaggaataacaaagtgaactggtccccaactctgcattgttcacttggttcttcaaatagtagaggccatctctcttctagcacgtacaatcatcttccttataccctattccagcaatacaaaatgagagggataaaaaatatcccactgcaattagcatgtatgatcactttttggatagacacaaggaccatgaccaatttcgggccatggatgacattttccagtgtaagtggattactaataaaaatatctccttgaccggcaacaatagtgacagaaccatcagctttagacgatcttcttattactatgacagggtgtgtacgagataaattttatggaggaaaagatcgtgtaagaaggatatgatatacctgaaaaagctagattacaagtacttgctgaagatgaatgcttttctagtgaccccaagaagttcttcaatctctcaatctcatttctgttgaattcaagtggtatatctgagttgttgttatctttggttgactgcactctgaccatatgagcttgaacctgtcctcttccttgtccgctcctccgtgttccatttttatttgttccatttttatttgggatttgtggccttccgtgaagctttaaatacttatcttttgtatgaccattggtgcactcaaaattgtatctgttaaaaggttgtgactaacctggctgcttactttctccagtggatgattactctaacacagtactctttccttatgtgaaaggcccatgaccacccttacatctcttatcaaaattagactctgatagtacttgatgtaagacaagtataatttgaaaaaccaacttattagaagttagggacaaaaatagagaatcagagaaaattatgtgagaaatagaggaataactgagacttagaaataaggggattaaggtaatattattgagagcaatatactacatagataggtagaaaaaacatgaatcacaggaaagaacaaagaagagataaaacgcagaataaaacccttgcgaaaattctcagttcaacattatttgcagttctctaggttagtagctttcaagtacgcataaattacaaccttaattaccacaactactactatcttaaatagaaaaattttccaatttaagatctaacgatgcagcacgtgagaattaaaattttctcatgtggctagaactcgaggatttttgtcctctgctttgcaccaatataggtattttttggtaggctttgtaggtattatttgatagactttcttggtagcaattagtataacattgacacagtaaaaaaggtactgttctgtactttgttcggtgcacaaaaaacagtactaataatatgcactatttaggttaccaaagtttgtcttaagctttaggaagtgcaagttttttctggtacagcatataatctgttgaatactaagttttaaaactacaacataatagtggctagtactaaggtaacttgtattataccagctaaacaaaaactactttggttctcgcttattgttctgtctgtgttcagttagtagcttgatttttcaatttagatgcattttgtaagcataataaatttctgggtttcaatatggtaaagaacgattttatcagtttgtggattttgaacatgataagcactttttatcatcatgatataacaggacctat

SEQ ID NO: 8623 - DNA, 1953 bp, Carica papaya
  Intron number 2 from transcript evm.model.supercontig_659. 1 (locus evm.TU.supercontig_659.1) derived from phytozome v7.0 (chr-ID supercontig_659; pos 1300 to 3252 reverse str and)
tttcaacttctacggagacaagcatcaataacaaggtttgttgtcaatcaacttatcctctctaaatccattctgctagtgagtagtaaaggctaatagatgcaggactgaaacagaaaataaagagagtttaaatacgtagtttggaaataaataaaatttaggtcagaaacagaaaataaaatcggccatagaaaattagaaatcaacataaaaaaatataaaaaaagactaggcttaaagagagagtttagacagaacatctgaataatgaacacaatgaaaaataataaggaactgatcctaacaaaaaaaaattttattcatcatcgtctattctcttttttatggcagctactagtctttagtaaaaattaactaaaactaataaaaaatttataaactaaaaatttttaaatattctaattcttataatatttaagatcaacataagcagaaaaataaaatatcatgatgcccaaataaatctaaataaatttcaaatacaaaaataataataattattacaaaaagaaatctttcattggaaacttattttaatattattttgttctttaccattttattctacttagtgaaaacttgatcttgagtcttttgaagtgacaaagcatcaagataataaaggctccaacatgcttttcaaaatcttcagaaagccgaggttttctatagtttccctagaaaaattaaaagttaacaaaaattattgtttcctttggatcttcttggccaccttatggttttgctcactggaaatattcagatctagtgatcttccagcttcatcaaaactgggaggttatatttcgctcccataggtggttttggtttcttgttgattttttttcctattgtatattattcttctatacatattgttttctctccttttctaataatattctttttctaattgaaaaaaaaaactgctttaaaattaacgcttcattaagcataggcaaagcttggcgcagtagaagtaatgggtgcctgcttatataagattagttaaaaactgttatatgagaaaatgaggaaaataaacatatcaagtatgagaagacaccaaaaaagatggtctaaaatgccatctaaaatcttgacatttctttagtagataaataggtatactatagtcatgacactgcaagtgccacccatatattaaaagaataatttcatgttaatcaagaatgtctagaatgtcatctaaatcctctgccttacaaggatgatgacactttttataagacggtgacccttaacacatctaaatcctctggcactaatgattttttgtcttaaatttggatatattcaatgcttcatattctttgaggattaagagaaactttttggctacctgttccatgttcagttgattttcttatatctagttattttatttatgtcttgcatgttttacaagatgtaaattatcccgtacttgctgataatacgtaatttttcagtatcatgaataatcagtaagtgggagggatagatttgctgctgagaaactagtttaatatacattttctgcaattgagaaaaatgaaaatctttttagagtctttttccgtttattttggtaaattttagccgtatcttatttgagagaatctattgaagaatccatttggatcctttatctggcatatgttgcccaaggcatttcacaaggtccctttattattacaaaatctcccaccaatcaacatgtctcattgtggagtggctaccattttatgtttttaatacatgcactatgtttgtattgatttaaacagattccggaatggaactgcattttttccctgttggaagcccttcttactatgatcggtggtgtatttttaatccgttcaccatgagtttgtggctgatatctaagcttaattttgtatttaggtgcgtttactgaggaca

SEQ ID NO: 8624 - DNA, 909 bp, Carica papaya
  Intron number 2 from transcript evm.model.supercontig_32.9 9 (locus evm.TU.supercontig_32.99) derived from phytozome v7.0 (chr-ID supercontig_32; pos 1262906 to 1263814)
gccaaggccgttgtcaaccaggtattaataaatgtttaatgtagattgcagtgtgcatcttgtggtcggcgggtgaactttacttccacattcccaaataaacgtcagaagaatttgtttttgttagaatgttagcattttcaccgtggtagtaaccgcttatttccagtgaagtgtagttttccattcttgttgggtatttgctctggcttatttttattgtgttgttgggtttgacttcagttatcagagactcataactctgatttttagaacctgaattgtgaatacagttaccactttggcctatttaggttagatggaaagccgggtaaggaattgactgataaactgcatggttgtgagaattgtttgtggacaaccattagttttatctttttgttatattctcttatattataagccaaatttgtagattgcaatattggttctgaaggataagtggcatttatcaccaggcaattgctttgtcttctgaaaagtggtcaatgcattacatgtagggccaacttggactggggtttcaaatgatatctacttgttattccttgtgtgattacgggctaacttgggctggggcttcaaatgatatgtacttgttattcctggcttttgtggtccattcttaactaaggagtattcttcgctttgaaaaatatttttaggattttctggttctcatgccaaccatgtttattgagcattttgttcttgtctatgttttaagaatttagctaaagcagttaaagaagcttgaacattgatagtatatcttatccataggtagaggagtttggagtttggttatataactataagtcttggttaatttctctttgtaaaataatttcaggttgcagataactactacaggccagatttaaagaa

SEQ ID NO: 8625 - DNA, 1330 bp, Carica papaya
  Intron number 7 from transcript evm.model.supercontig_94.2 6 (locus evm.TU.supercontig_94.26) derived from phytozome v7.0 (chr-ID supercontig_94; pos 481290 to 482619 reverse strand)
atctgttgaggtaagtacgaattctctgttgtttttacatgtgtttttatttgattgcgaatacataatattttatgtgcttcacatttagtgaagaatgttctcgaacttggtcttcctatcacatgtaatggtacatgttgaattcatgcattgccattgcagagttatcctaacacgtagattgatctgtcttttaactgggcacaacatagaatgagtcatgagatgggaccctttctcatcttctgctcatattggtctagtcttttgttgataggggcacctattgcccttggttcagttttcatttgattcttatcttagtacatagttactattatatctttgatgtgtaaaattggatgatattttaacatttaaatcaatctctctttttgaattccttagaggtggattccagttactacttgagaaagtaagaactagaaatctgtttataaaggagttagggtagagtagagttgatttaaacaggaaatttatgatgtaattctacctactaagaatatttaataattaattaaattaacagaataagaattgaatcaaacaggcttatgacttttctgcctggcaaactgaatacttacgttattccaaacatccaaacaggctgtgagtcttctgcttgctgaactaggttcttggttaatcaagttttcgaatatactctatatgttgtgtaattatgttatatcccaagcagactataattctgtgccccggtgtcttggttaaacaagtcttcaaatatgctccttatatggtttgtaattatgttattcaacagaccactatatcactgacaagcaactacaagccttgtgcaatttatgcttgtttaattttttcttttgaaagaggctagtgacagtaatgttaagtagtctgtaactaagaaactcatgttaaaaagatgaatggtgctaagaaaaattttaatctttgtaatagttgactgaaaaagacaattacaggaatttcttaacaccgttttcttaagcctgctaatattgttagtttaaggggtcagggcatgttatctctgaatccctgtgattatttgaattatttggcctgtttggcttttttgacttgcattatttggattttgttttttagacctattcttctctcttttattttgtgtatttgtggttgctgctgtaactaatcattaacaattgttgtgtgcttgtattgatacgaaatgttggatcccgaccttatacctacatgtttgtttttaattcttcctgcttgttgcgcagagtggacaaaagggcctcaatcctagacttgagag

SEQ ID NO: 8626 - DNA, 321 bp, Carica papaya
  Intron number 1 from transcript evm.model.supercontig_62.1 05 (locus evm.TU.supercontig_62.105) derived from phytozom e v7.0 (chr-ID supercontig_62; pos 674102 to 674422 revers e strand)
gctcttggtatgttggtcttttgcactttcaaataatttattcatttgtgactaatttatgaaaagctgttgcaatttggtagattggatagtaactagaagctcttaaaattttaagaaaatcacattttcttcttgatttgatgtgaacggtgactaggatctctgaagatttaatgagttaggatgaattgctgacctgagaaatgccattccaggggcactagttgtattctattttagcttggatgttccagaatctaagctcttactcttttggcttcaggtacggtgattgatcaaggtgaggcccctgaattc

SEQ ID NO: 8627 - DNA, 7631 bp, Carica papaya
  Intron number 4 from transcript evm.model.supercontig_13.2 21 (locus evm.TU.supercontig_13.221) derived from phytozom e v7.0 (chr-ID supercontig_13; pos 1948008 to 1955638)
cgcccaggtaatttaaagctcaagctgagttgttaaatgttatgcttaagcaaactcttgggctcttgcttctgtagaaatttcaaaggagatatgaactaagatggtagtaaaaggatttggaaagtcattctgccttactttaaactcctggttctgctatattgtcgttctaatgcaactttcgatgatttttttttgcccccttggcttattgctattttaccattttgcatgtgatttttgcttctggatatcctttcctctcaataaacaaatgttcttattgatgcagcacactttttcttgttcgattctaagtgttattcctacttcaattctaagtgtttttattttattatttttggttttttctaattcaagtccgaaatttattttagtttctagtttcttactatttcctatttctaattagattctttgtttcttagaatttcctatttttgattgggttcttcttacaaaccttataaaaggacttatttgtaacagttttagatataacttgatacaattcaacgttttcctttaaaattttagcctatcatgtgattaatctaagtactctacctttgatcttttcaaacaaaccatccgctgcacaaaattggtattagagcaggtattagagcaaggattttcaccttaatctgatgaccaaggatggttctagtgaacaaaggttcaaaaatatcgagtagagatttaatggaattgatgaaactctttggcatataacgtagatgttagttgcgttatctacccaagatagatgcaaacttgaacaccaacgaccatatctgcatgatgaatgacacaaatctaatgactttgatttcaacaatagtgagacagaagatggccgcaaacaggttctcgtgaaaccctaggaaaacagatcatgcggatcttcctcctggggcactattgtacgttgacccaattaggggtgattgatggatagcctccaacagtgacattgattgttgctggtcgcaaaatcagttggaaaccgacacaacctaacatcattgcagaaatcgtgaaccaaattgtgtcttccgcgattggcgagatccacctcctctacggggttactagtgatgacaacagggcaaataggggcaacttgaggtggatggtcaccagtgagtcccctcggcagctggcaacggtgtttctagacctagacaagattttccagaagcgggtttttgaattttgcccgaaattttgaaaatctatatgggcatttcctacctttacgtgacagagacagtctacgatatcagcaacctcgaaacctctgttaaagacagtcgtggggtttggactactcattgggtgaagacgatgattttcgtttcaagtatcaagctaatgaacaacatctaataactatgaatttaagatgaagatggattttgtccaacttcaatgaatggttaaatattgaagattttatcgattgcattcatacggttgaaaatttctttggttatttgaatattgcagaggaaaatcaattaaaagctcgtggtatataaactgaaaggttatgcctctgcttggtgggaacaacttcaatttaatcgtcaacaccaaagaaaacaacgtgttcgtaccttgcccaagatgaaatggttatttcaaaggcaatttttaactccagactacgagcaatttttataccaacaatatcaaagttgtaggcaacctactcgtattgtgaacgaatacacgaagaacttttattgtttaaatgctcgtgttaatttataagagacaggattaattcattgcttgctatattggaggcttaaagcttgtgattcaagatcgttttgctcttcaaggtgtttggaccatgtcaaatgcagttgatttgaaaacaaaggtggaaaattagattaataagtgtttggcgtgtcctcatgacaggtttagacgaccaagtcaagaaaaattttccggctcaaggggtttagtggcttttggcagcagttattgcgctatgaaagatgtcttttcagactagggttcgacacaaactcgaggcaaaacttctttcaccatgttgtccactagccggggtagaaatcaacagcaacaacgaatcaataatgatcctaatgcacggcctaatcttgggaaatccttctgttacaaccaaccaagtcatctctcgaacaattgcccaaataggcgagctgttaactttgctgaagaaggcggtggtacagaagaacaaatgttcgaagaaggtatttaaaatgggtgctgaaaataaggagggaaatgttggggaagaagtgacatgcattattcaacaaatgttacttgttcccaaaaaggcagataattctcaatgacacaaaatattctgaaccacgtatactatttagaatgaagtgtgtaatttgattattgacagtgggagtagtgagaatgtgttttctaaatttttggtgaaagctttaaacttggcaatcaagaaacatccatctctgtacaagatagcatgaattaagaaaggaccaaaagttcgagtggtgaaaatttgtgaagtttttttttgtcgatagagaaatactataaggatgaaattgctgttacgtggtagatacagacacctgtcatattctcttaagaagaccatgacaatatgtttttgatgttacctataaaggatgagataatacttttataatttggtggcatgatagtaagatcattttagtactgcaatctccatcaagggatggtaaaatttgcgaagtttttttttgtcaatagggaaatactataaggatgaaattgctgttacgtggtagatacagacacctgtcatattctcttaagaagaccatgacaatatgtttttgatgttacctataaaggctgagataatacttttatcatttggtggcatgatagtaagatcattttagtactgcaatcttcatcaagggatggtaaaatttgcgaagtttttttttgtcgatagggaaatactataaggatgaaattgctgttacgtggtagatacagacacctgtcatattctcttaagaagaccatgacaatatgtttttgatgttacctataaaggatgagataatacttttatcatttggtggcatgatagtaagatcattttagtactgcaatctccatcaagggatggtaaaatttgcgaagtttttttttgtcgatagggaaatactataaggatgaaattgctgttacgtggtagatacagacacctgtcatattctcttaagaagaccatgacaatatgtttttgatgttacctataaaggatgagataatacttttatcatttggtggcatgatagtaagatcattttagaactgcaatgtccatcaagggatggtaatcctgccacaaaagaggatagctcatttttcactactattgtaggtttggagttctttgagcaggtcaaggagccaaattttgtggtagcattagttttcaatagtcaaccagacacaatggaagaaattccaatcagagtctaggaattaatttttgattttgctgatttatcttctagcaagttaacttaatgaattgcctcctaccagatacctggagcaagcttacctcattcgccacactatgtatgtgttacctggagcaagcttcctttgtttggttgctcattgaagttttcttctgattcttgatcggtttgtctgtgaactcaaacactgcaaccagtagtttctgccatcctctcccctccgctccatttggtaagaaaattctcttcaactaacggtctcaatgtaccgtcagagccaaatactccccctgactattcttttcaaacgaaaaccacagctcgtagtttttcttcactagatgctttgcccaaactctcggctttcttctccaccaaaactcatcaagtgcgtcaagaagccacgcgtattcatatttgtctagatagatcaatcgacagaaacctcgtccgttttcgctaatttgtagacaatccactttcctacattcacaaaccaaatcaaatgatttgctttcaatggctataaatcttcgatcgtaagatttcattgggaatcctttggtttcgtcggccgtaggacgagacgaacagaaagttagagagaaattttagagagaaagaatatcaatgaaaggcttctgtcttttaagcatgaagaattgtagagataattaaatgagtgtcagaagtctttgacatggttgtctgatttgaagcaaatgaagaagaaaagatgaagaagaaaaggagaagaagaagaagagaagaccgaagtccagaagagaaatagatagttaattttattactttttctgttccttacaagccatgaaagcaagccctttataggctttaaagcaataaagcaagcaatatcagcggccggaatcaagcgaccgttaagcgcgcagcagcagccgcaggatgagatggtggctgcgaaaaaagagatgattagggttaattacccctaaccctaaatgttacataaaagattaatttaccattctcttttgttatttctcttttttaccattaataacctgacagtgagttgctagataacttcatgaaggtatgaatccctgtgctgtttctatattattaactcctaagaaagatgataattagcaaatgtgtgtagacaattgtatcatcaacaaaataaagatcaagtatcacatccctattctatgccttaatgatacgtttgacaggttagaaagtgtttttagtattcactaaacttgatttaagaagtgaatatcactagatccgtagtcatcctagcgatgagtaaaagatggatttcaagagcaaacatggcctctatgaatgactagtaatgtcgtttggggttatctaactcgctgagtacatttatgtggctcatgaataaggttttttgctcatttattagcaaaattgtcatagtttgtttcgatgatatccttacttataataaagatgcggatgagcatttggagcatatcagggaagtccttactgcctttcaggctaataaattgtatatgaatcttaagaagagctttatgactgatcatctctcgttgcttggatttattgtgggaaaagatggtattcaggtggatgagggcaagtgaaggccattcaagaatagccagcccctaaaacagtgagagatgtgcaaagtttccatggcttggctaccttttatagactttttattataggttttagcactaccatgacagctatcaccgattgtttggaaaaatgccagtttcagtaggtaaaggctcaagaagacgatttgctttgatcaagcaaagttgtgtaatggacctgtattggcactttcaagttttgagaaggtgtttcaagttgattgtgatgcatcagaattggaaattggagctattttgtctcaagaaggccacccagtggaatacttcagtgaaaagattagcgaattccgtcaaaagtggacaacctacgaacttgagttttatgcaatagttcgagctctaaagcattggaacactatttgatccaacgagagtttgttttgttcatggatcattatgttttaaagttcattaaatcttagacaacagtgaataggatgcatgctggttgggttactttcttgcagaaatttacttctgttattaggcataagtctggtcaacagaataaaatagctgatgcataaagccaacgaccctcttcactagctacagttagtacttagatcgtgggtttcaattatttgaaggatattgaagattttgataacatctgggcgtgatgcaataatggagagtttgttgttgatttcatgattcaagatggatttttattcaaagttatgctgttatgtattcctcacttttctttgtgtgaacatttagtttgggaattgcatgtcagaggcttaggaggggatgcgtgcacaggtgaaacaattaattaggtagaagaaagattctagtggcctcaacttaaaagtgatgtagggcattacgtttaatgttgtcctatctatcaataggccataggacaagctgaaaatagtggtctttatatgcctctacctgtttctaagagaatatggcaagatttgactatagattttgttcttgacttgctacagactcaacgaggtgttgattcagtatttgtcatagttcatcgtttctcaaaactagttcacttgtaagaaaatttcagatgcttcttatgtggacttgttcttctggaaaattatttgtttgcttggtgttccccattccattacttctgaacaagatgcgaaatttctaagtcatttttgttggactttgtgggagattatttaacgtttctttgaagtatagtagtactagtcatctgtagactgatggacaaattgaagtgggtaataccgagaactccttttgaagttgtctacatacaccaatgctccaaaatatacggttgatttgagtcatcttcatctctctactgatgtcattcctagtgtagagaaacttgcagagcgtgtacaacagatcaccaagaaatcagaatttggaagatgcaaatttacattataagacagctgccgatcgacatagacatcttaagatattcaaagaaggtgatttagtgattcttcatctttgtaaacatcattttccagtaggttcttacaataagctgaaggacaaaaatattcgtcccttttggattcttcaatcttcttgcctatataaatatctccaatactttcgatattgctgatatttttaagtgctattttcctgatgagtttgtaaaccataaaactcgggaatgagttttcttcaaaaggaggggattgatgcagctaactttttctcagttcgattcaaagtgttattcctaattcaattctaagtgttattattttattattttggtcttttctagttcaagtttaagatttattttagttttctagttttcttaggattttctctttctatttaaattcttagtttcttaggatttttatttctagtcaagttcttgttataaacagtataaaaagactcatttataacagttttagatataatttaatagaattcaacgatattatttagagcttttgttgtgagtaatctaagtactctacgtttgatcttttgttttaatagaattcaacgatattatttagagcttttgttgtgagtaatctaagtactctacgtttgatcttttcaaacaaaactacgttgtaccacttatcagctgtgctatatgattatgttagtgagtagtgattgagaaatatgcatatatttcgcacttacgtgatttgatagaaagatactttctcattcaaataaataaaaatcaaaattataaggaaaatatctaaatgttcagatcctggacaaaacaaatgcaaaataccctaaaagatttaagaacaaagtttctttattcactttggtatttttccatattgccgcaccttaccaaacaatagaactttatcatttacatcttttttttctattttatggattgaacttatttcaggtt

SEQ ID NO: 8628 - DNA, 6997 bp, Carica papaya
  Intron number 2 from transcript evm.model.supercontig_35.2 9 (locus evm.TU.supercontig_35.29) derived from phytozome v7.0 (chr-ID supercontig_35; pos 637423 to 644419)
ttggtacgcaatatctgcatcaatcctgaagtcaggtacttatctctatccgcatagtatatacgtatatgttgctttctatatgtatctcactggattatacatctaccatatgtattgctcacggatttgttaaatctgcctatttagttgttcaatatgtttcctttcaatcagtcaaacatgtaattaaattaggagttatttggttcacctgtagaatgaagttgtaataaaatagttattcagtattggataatttgatagacatgtaaattcttttgtacatggctggcaccccttagtgcctatagtaatatacatcactgtttatattttaaaaaaacagctattcaataaaaatggaataaaattattcatatagatttttagcccttaagtcatattattaataaaaattttcctaaaagaaattttcttgatataacaagtgtagtattatcattaagtattatttgaaaaaaagactactagaattaaatataggcatcaaggggatgcggcctatattcaaaattatttataattaagtaactacatcaataaattctgcaaaaaatttcatagaaagcattatacttaaaaatttcctaagagatttaaattcttaaatttattaaaatacttcgaaaaaaaccagtaaaattagaaaaaattaatattattctttggaaattaaatttgtaaatttgaatgtatattagatattttctaatagaaatttattgtataattgattgaaatgaataaatggaattcatgctgcaatgatgattcactatcccccgagtgtgaatccttgataacaaaagattttgtaattttaattttatggaattatgattcagttaaccaagtaacataatactcatgtaattgtaattttgttcctaccttattatagcatgattcaatgaaccaaacggcatgttaatagtttatcttttgttttacccttaattgtctaccttatcattctgttaataaaacatatcatttgcaactttcttatgattaattctttatgtggaagaatgaatattgtatttattattgattaattggatcctatatatacacaactttgagtatagagaagcaaaccctaaaatcaattacgtacgagtatttttactattatacttctatacataaattatattatactttttaacactctctaagttggtgaacaaacattgttcattcccaacttgatgataattttctgaacagttggattattcaagccctaagtaagcacatctgtgagttggagtcgctaggcatataaaatttgtagatcaaattactatctaatttctttttgattaaatgtaagtcaacttcaatatgcgtcatcttgtcatgtcatgccgtattatgcgtgatgccgattgctgatttgttacgatagagtcttatcagttattccatttgattcttaggttttccaaaatcattttcaatcatactaactcacagattccttgccctattgtttggaattttgattttgcattggattttgtcaccctatttgtttctttcttctccacatgaccaaattttcttcaagagaagtacaataacctctacataatttttatccactattgatctagtataatcaacatcagtataggcttctaggagtaagatgttattctttcaaagcacaatatccttttttggtgttcctttctcacactcggtatgctacatataaatgcacttctttggatttgtgcataaattgacatattatacttactgcataagtaatgtttggggtcttgtgtgtgacagatagattagtattccaactagcctctagtatatttccttgttgactactgcacattcttatgttagtcccagtctatggttgtaatcaatcttgtgctattaggtttgcatgccaacttgcctttattctttagaagattactaatgtactttcttttttagatgaaaattttagcttttaaattggtcacctttaatccaagaaaatttgttagtcccccagttctttaattttgaattctttggttaagttgtttgagtaccaatatctttttttcatcattacctgtcacaataatgtcatcaacatatacaagtagaactttaactctctctgaatttgaatgcttgatgagcaaagtatggtttttctaaatttatttacatcttgttgccaacaccatttttgcaaatcttcaaaaaccatacctttgatgactgtttgagttcataaagagtcctttttaatctacaaactttatttgctcttgtatttttttatgaattctaatggaattttcatgtaaattttctcctggaggtctccatgtaggaaatattcttcacatcaaactattgaattgtcaaccaaagttggcagctaaaagataatagaactcgagttgtgtccatcttgacaacaggtgaaaaagtctcttgatagtttattccataggtttgggtatatcccttgcctctcagtgttgctttgtatatatattataccatcagttttgtactttatagcgaaaactcatttacatcctatgtgtctttttctcttagataggtcaaccacctctcaagtctagtttttgtccagtgctgatatttttctattttcacaaaataatgactcaaaaaatgtattaaaattaattttaactcataaggaacttcttgtagatgttgaacatttgtcaaacgacataaaatttgaaattggatagagtgaatatttagtacatcttctggttccgtttagaattgcaataggtatatcaatgttaggatgcaaaagattctcaaaagttctcattgttagaacttgactctaatgtttgaacatgctttagttcaagatcaagattcttcctttctgagtacacgtaagagaatcttggatcatgtacggtcactggtgttggttcattctctaggtttcgaagtaatagaggtgaatcattttctaggttttgaggtacttgaggaggatcatttgttggaatattaaagggtagagatgcaggtggattattttttgggttgtgaggtaattgatgaggattatttgctggtagtgttgaacgtaaaggtgctgatgatgtagagagtaatgtggaacattttctgggttgattctctgggttttgaagtaatagaggtgaatcattttctgggttgtgaggtaattgaggagggtcatttgctggaatattaaaggtagagatgcaggtggatcaatttttgggttgtgaggtaattgatgagggctatttgctggtcgtgttgaaggtagaggcgctgatgatgtagagagtaaggtgagataaaaaaagaacaggttctcatcttctactacagtctcgtcctgaatataagatttgctaaattatgactcaatctcaacaaatgtagtatttccatatgcataggattttttagtggatggattgtaacatttgtaacccttttgaattgaacagtatcccatagaaatacacttgagagctcttaatcaagtttctctcattgatgttgatgtatgtgaacaaaagcgacacacttgaatatttcagagacaagatgatttatgatactagcatctgggtagaatgtggaaagaacttccatggaacttttaaaatccaataatctggatggtaatcggtttatcaggtaagtgacagtgagaacgtctttcccttctaatattgtttaggtacatggttttgaaataaaaaggctcaagtagtagcaagtaagtgactgttttttattatgctacttcatttggttgtggagtgtggacataagaggactatgacaatcctttcttggtatatatatatatatatatatatatatatagcgtctgatgaaaaatcattaacattatcaaatataaaatcgtttaatatgagcaccaaattgggttttaatcatattgtgaatttgtagaagtacattactcaaattagatttagacttaaatagaagaagcaaagtgactcttgtacaatcatcaacaaaaggaagaaaccattgggcttcagaaatagtaagaatgtgagataaacctccaaatgtcactatgaactgacaaaaaaggaataatgttccttttatcactcataggaaatatcacatgcctatttttagcaagttcacatacatcaagatgcaaattttccctataagtttccttaaataaagagtgaaaaatcaccttaagaatagaaaaggaatgatgtctaagtctttactatcgtgcaaaatcttgttggtggtggtattattaaaaatgagaggggtaacccaggtgtattcaagaaatatattctgtttttttaccttagcatgtccagtcatcaaaaacagatggggactgggtgttttttggttatgaacgctggctagcagagcagaagtgtcttcaacggtggctgtgcttggctgcacctggctagtttgccagttatgaaggctggctgctgctgtgatgttggtccactgcattacggtttttgtattctttcttatttctacgattaaagccgattaaggtttgtagaaaaaaggttagcctatgttttcgtagagctctaatatcatatgaaaaaatatactgttttttaccgtagcatgtccagtcatcaaaaacagatggggactgggtgttttttggttatgaaggctggctagcagagcagaagtgtcttcaacggtggctgtgcttggctgcacctggctagtttgccagttatgaaggctggctgctgctgtgatgttggtccactgcattacggtttttgtattctttcttatttatacgattaaagccgattaaggtttgtagaaaaaaggttcggctatgttttcgaggagctctaataccatatgaaaaaatatactgttttttaccgtagcgtgtccagtcatcaaatacagatgggactgggtgttttttggttatgaaggctggctagcagagcagaagtgtcttcaacggtggctgtgcttggctgcacctggctagttttccagttatgaaggctggctgctgctgtgatgttggtccactgcattacagtttttgtattctttcttatttctacgattaaagccgattaaggtttgtagaaaaaaggttcggctatgttttcgtagagctctaataccatatgaaaaaatatattctgtttttttaccatagcatgtccagtcatcaaaaacagatggggactgggtgttttttggttatgtaggctggctagcagagcagaagtgtcttcaacggtggctgtgcttggctgcacctggctagtttgccagttatgaaggctggctgctgctgtgatgttggtccactgcattacagtttttgtattctttcttatttctacgattaaagccgattaaggtttgtagaaaaaaggttcggctatgttttcgtagagctctaataccatatgaaaaaatatattctgtttttttaccgtagcatgtccagtcatcaaaaacagatggggactgggtgttttttggttatgaaggctggctagcagagcagaagtgtcttcaacggtggctgtgcttggctgcacctggctagtttgccagttatgaaggctggctgctgctgtgatgttggtccactgcattacagtttttgtattctttcttatttatacgattaaagccgattaaggtttgtagaaaaaaggttcggctatgttttcgaggagctctaataccatatgaaaaaatatattctgttttttaccgtagcgtgtccagtcatcaaatacagatggggactggttgttttttggttatgaaggctggctagcagagcagaagtgtcttcaacggtggctgtgcttggctgcacctggctagttttccagttatgaaggctggctgctgctgtgatgttggtccactgcattacggtttttgtattctttcttatttctacgattaaagccgattaaggtttgtagaaaaaaggttcggttatgttttcttagagctctaataccatatgaaaaaatatattctgttttttaccatagcttgtccagtcatcaaaaacagatggggacagagtgttttttggttatgaaggctggctagcagagcagaagtgtcttcaacggtggctgtgcttggctgcacctggctgttttgccagttatgaaggctggcttctgctgtgatgttggtccactgcattacagtttttgtattctctcttatttctacgattaaagccgattaaggtttgtagaaaaaggttcggctatgttttcgtagagctctaataccatatgaaaaaatgaatatggtgttttactattaaatagttgcttcctatacacacacaactttgagtgtataaaaggaaatcccaaaattaattacataggtatattttactattgtaccttttatacatcaaattatatatataatttccaagactttcctttacaaacttaaagcaaacaaattattcaataattctttccttttcttcaatttcttaattttagtcatccaaacaaaagattcacctttcccttcttttcctttaaaaaatgaattcttctctttcatttatttcatttctttcctttactccaaaaataatattgtagtctaacttcccactactgacttgccttggacctatatatcttttgcttaacttgcgttaaatttgttaatctatatacagcttgatttatttgggactcggttttaggctgtttctgttctttaattagctctttatgtgttttgagcattttattaattttagtttatttttggtaaaccatagacttgtttttgtttacttgctccgtttggactcaagagttaagagtttgctcttgttgaatcagagtgaccaaggagaacagggctgctggtgtcttgg

SEQ ID NO: 8629 - DNA, 1807 bp, Carica papaya
  Intron number 2 from transcript evm.model.supercontig_54.5 4 (locus evm.TU.supercontig_54.54) derived from phytozome v7.0 (chr-ID supercontig_54; pos 1048754 to 1050560)
aatacttcaggatctctctcctaaaggattgcgtcagtgtgctgttctctccttagcttttttttccccttttttttccatcagttgttccaaaacattcatgtgattactgaaaggcgtttttttttaattacttcattttgaactttattgctgatagctgagattgatgatttatcttttttcttggttaccacctattggaatgtgctgttattgcatgaatgactttgtgcatctattcttttagcatattttatcaggtgcttagattgggtaacaagttgacaattgtgaaaaggtgatgtctttgatactgaaagattgtgacaatgcatgtatatgttttcagtactggtaatgtcacgacataatgttattgtataagattcaatggcaatgacatatgactataatgttattatgattatattatgttgtttggtttgcatgagtgaattaaaaagtggtttttggttggtaagttggagtagtttttgaattattaaaataaccataggtattatattcattttcatctatatttcaaatggaagtataatgattatattagaagatgtataaaatttgtatgattaataatgacaaaaattattaaaattattgagagttttagatatactctatattgttgtaagctacttgcctcttatgcctcatgttaaattatttaatacttataattatcatggattctaaattttaaagttcaatcaataatttaatattttaaaccatcaaagagttttcataatatggaaacatcttaattattaaaattcaatatttaaaaaaaacaaaggggtattttgtaaaatataaatataaattgatgtttcttttcttttgaaaaaatataaattgttgacatcttttcacaatatgtaaatagttaacgagttttcccaataaaataattaacgattgttagtgtatgaaaatcattgttttcaaaacaattattagatacttcttgatgctttgacacactgtatcatatcacccatatttatgaaaatcttaattttaaatttattgttctaaaggaaataaagatacattcatttattttttcaaaaaattaagttatattcgtaatatgtaaacatattgtgtcatgcattacacttgcatataaaacgttcttttgaaatttaacatttgaaaaaatatgatgaaaatatatcataagatgtaaatatattctatcctgattgcatttacttacaaatacctctgttgtttgatgagctaatgccctaaaattgtatgtcacttatcataaatttgtagacaaaatttaaagtaaacattttttattctgtcaaagttaattataatcctaggtattataatgtctttctgtgtattttgtgcttgggtcacatatataatatgtttttgtagatactgatgcatattccaaaaatacactaatgacctgtctatgcgcaacaccatctgctttggttgcacgatgtgttttataaaagcttttcttcctgaaattttgttcatattgtttcatgatttctcatttgtttcttgttaaaaaaaaggatcttctgaaagaaattttgttcatatagtaaatggcagaagtcttaatttgggagaaaatggagtaggttatttcacaagattgtttcttcttaaaagaaggttatgtaacaagattgtgataaactttctttaaaagtgaagattttgatcaatatttgtcttgaatggttcagtctggtttgtgattaaacaggaatttttgagcgattccgtgggattcttc

SEQ ID NO: 8630 - DNA, 2790 bp, Carica papaya
  Intron number 5 from transcript evm.model.supercontig_3.61 (locus evm.TU.supercontig_3.61) derived from phytozome v7 .0 (chr-ID supercontig_3; pos 428013 to 430802 reverse str and)
aggataaaagagaacttaggttttacaattcagaggtaaactattcctcacatcttaaattgtttcagctcattatttgttaaaatgctgtttccttcatatgctaaatgttcaaatcataaagtttctctagttgcggaagacagacccttagaaaacatgaatttagccttaagttggaggtgatgttgaacttttaggctctcttgtcgttttcgttgctgtaaatctcttcttgtttgtcaacagggtctcaaataagttcatctaaattgttcaattctggatcattgtaaattggcttcttctgttttatagtgtttgagaatcacaaactagaatgcaactccttgtaaaacttttattttcttgtttattttgcttaaatttatggttttgcatatatgatttatggaacacccactctgacagttgcactcggccgcttttgctctgccaacattttttcggagagaagtgagcggactcggtgcgtctccaacctgcccatgacaactttttctttgaaaattgattttagcaatcctaatatatttttccaggaaaaagattcatgtgaagtttaaccctacatggataatagactacagcaaggtgagggcatgagaagctttcagggctttgaggaggatttctattctagcgtgtattgttatttcttccaacaatgttatccggtggatgacctttttaatttatattagatatatatatatatatatatatcatacgatattgtatttgtaggaacgttctatagcttctcccagttgttgtgcttgtgtggtactctttttaatatatattttaaataattaaataaatcttactgcagttatctgacaatgtgttacagtatatgtatctgattaaattgttgtaaatatgaaaagaaataatagttcaaagcaggatagctctaggcacaatgccgcttgcagtttatgtcagaattagtagctttgctaattcctaccatcgggctcctagcatttcataatttcatgggccagtaccagctttgaaataatgggtgcgttgaaatctaatgtcttgatttgaaacttgatattacaccaccacctaattgttgcttcatgcagcgtatgctagaatgataacagcagaacaagaagggaatcaaataggacacaacagtacaagacagcatacaataatatgttcagtaaaatgggattggatggattttaattcttttaaatgttggtaattgataaacattgtaatgtacaagtactgaaatttcctcttctaatgtaccataattaatttacttttttcgttaacacaataatattttctgtttgtttaaatacattaccttcacattagtttttaattttccatagaataaaccactacccaaaaatgaaatatcaaaattgaaaaagacaacaaagtgcacccaagaatgcatttattattttataattgtattataaatttataacgatcaatcataatatattattatattactaatatattaataaaattataataaataaatattttttttaattagtcatgacatatcctagaaattacagaataaaaaaagctagattagtcttttattattattaaaaaaaaattgacttatagtaattttaacccagcagattgttaatgttggtttacagtaacgaacttgctgccatgtttgaaattgtggttttagctttggacttgagatcttacttcagccaagattagacatatatttcgctgtggttttcattttacataatactattattttttgaatatatttttatatatatatatatgtgtgtgtgtttatgaaaatgtgcttcaaacttaaataaattagatttacatattttaaaattaataacaataaactaactaataataataattagtacctctatttttttatgaaaaaaattatatatttaaattaaattatgtttttgagtatatcttgatttgaatattattttaattatattataattgatgtacttatatcattcaatcgagtcatttatataatgttaggttttaatcaatcgtgtgagttttattgtgcataaaagactatcggttttattgaattcgtttaaaagtgatcaagatattaggtcttaatgcatttgataaaacataaatatcttttatgtacagagactaaaattgttatttctacttttataatgaattaaattaaaaataacgaaatttgacaatataaaaaatcagttatagttctcaaatcttgcgtgttgagtttattttttttgttatcctataagtgaaaatagaaattttttttttatactatttcttacactataagttcggatacgctttcgattataaatataatcattttaattcaatacaaacatgattatttgattttatctttaatttattttaaaatcttacgtataactgaatttttttaaaaaaaatatcacttaaacaaaaccgcaatatggtattgtatgtatacaaaactacaagagccgaagtgtaatatccactaatcacgtgataaaaattaaaactttaaataaattattttattttatttttttcggaaattattattaagaatatagttaatatttattttaaattagagaagataattacgctaacaaatcccttcttatccggaggagaaccaaaccactcatatagtcctgatttacaaggccttaccacgtgttgacctttacagaatctggcacgcgctctccacactcttcgatatcc

SEQ ID NO: 8631 - DNA, 1306 bp, Carica papaya
  Intron number 3 from transcript evm.model.supercontig_36.1 25 (locus evm.TU.supercontig_36.125) derived from phytozom e v7.0 (chr-ID supercontig_36; pos 993533 to 994838)
cccttcttcttgcacaagatccttacgggtaatcatcaaaagtgttttgttcagtatggtttcctcttctgcctgcaccctcaaattatttgtttcttttttgatcctgtattgactgtgcaaatgctacaaatgtgagattccaagcgattgtacttgagttttcttgttggtagtttgctgaatggtatggttgatccataccatcttctataagcatttcctgatgtaggacaagaaagcttgaagaagaactaaattttggaaatcttggatttctataattaaaataatatttcaatatttgaacaacaatcatgaatagtttatatagaattaaattgcgtaccttatttataagcaacaaaatacaattgaaataagaaatatagaaagtaagaaataagtaaagtagaaagaattatgagaatactctgaaaaataaaaataaatcttcaattttttctttattataaaactttccggaactagaaaaaagaaattaaaccttcctattcatttattttcttttgtttgttttgcatcggatccactttaaaatcttcctattcagcataacattctataggcttgtaataagtagctgcttcttgaatttctacaattcttttaatgttaaaatttattggtaacagtgatctgaatccttgattgacaactcaataacaaaactgtttaattttaccacaatggtgaattcatttgatacaataactagatttacagaatggttcattgctactattagttcaatatcttttgacatttcttctctttctgtagtaatcataatatttgctgctgtgaatgatatatgttatgggttcttgcatataatgcagcatgttagttgggtcgaaatctatttttcttgtggattttctaaaagcatgtattgacatcctcagttgttcattctttaagttccatgttcatgctccgtcttctcaataaaattgtgtttcctgtactaccctctcaagtatggctattggtcatgttttcttggagaaaagttggaactttagtacaactctaggttgagttatgtcgatttgatcatcacaacttacacttatgctttaagtccattttccgtttggctttattgctcctagttctcaactatttttttaacttgtcagcataaaaaactctctccacttcctgcctaatgatttggtcctttacattggtgtccttattagtcattatagatatcgtattatctgcttcaggttcatctaacaatctgatatcttgttctttttttgacgcagaaatt

SEQ ID NO: 8632 - DNA, 4464 bp, Carica papaya
  Intron number 13 from transcript evm.model.supercontig_125 .47 (locus evm.TU.supercontig_125.47) derived from phytozo me v7.0 (chr-ID supercontig_125; pos 832962 to 837425)
ttggtgttattcttgcaatatcaggtacctggtacagcattaatctttcggatcctaatcatcccataagtttgacttctttttttaattcttataacctggtcgatgtcatgaagggttacgagtttgttatgcttcagagaacctattgccgctggaaaagttcactggataacttaccagtgtaggtcccatggcagcagcaacaaaggagaggttgaccctcatccatactcctgttggataatgattgacggagaagtagaggatacttaaagagttttgatcaactaaaacgttagagttgtagttgttggaggaatctaattgtgattagcttccttataaataagtttattgttgtcaataaaagcatgcatcatcaatcaaagtagatcagattttatacttgaaagattataggtcattttaaaggagccttgccatgggttgacaagactctgaattgggagagcaagcaaccagcttgcttctcgacttaagtgtccaaggccatgtgacccgatctcaagcacgagactgtaacaatttcttatcagatgagtgatcatgggggatttcaaatcctttcaactgtagtttgaattgtacctcaagtagtatcaagaggacagcgtgctctcagaggaaaaacaaagagagttggggtgcaaattgaaagtctatccaaagagcttccagccacaaaaagagacacttccaacaccaagtatggtggtgcaacaaacaaccggagagttgaagttggggtgcagattgaaagtctatccaaagggcttccagccaccaaaagagacacttccaacaccaagtatggtggtgcaacaaacaacctgtagcggggagagttgatttctctcttcgcaatggcaacacattcattcggattgcttgatagatgtgaatattttttctgtcagcagtggatgaccgaagaagataaggtctgactttatctcttttcacttttaggatgatgcttagctctggttccttgagctcaagcgtgattggctggaactaacatgggaagagttcaagaattactctatatgtgaatcagaaacaaattgggagagtcggtgaagttgccacaagaaggccgaaaaccagcagcgctttcaacagctttcagcacacactttgactctcacacttgcccagaaagctgaaatcttcatcggtggactgcaagtgcacatagctatacaggtagagttccagcatcctctagatgtcactattaccatgagcttcgcccatgtcttctaatgctacattgattagaaggaagagagagtaatctaaaatgagccgtgaactgaccgccattcattaaaaaactgtgcccagaggagatgaagaggagaaagaaaaaggtcgatgtttcatttgtggactttatagcatgtcatgtttgtaaaaagttgttttggcttagagtatgcagaagaggaaattgtaggtaaagcaaggtcggctcaagaagaggaagagcacttggaaatatccgtcaatgccattataggggcaacaacgtagcatgaaggttcaagccattgtctcaggattccaattgctcatcttggcaaatttgggcagcgccaccactttgttgatggacctgtaactggaaaattgttgcttcagatgtacccccataggcatcccagagtaacggttgtgaatgaagaacaggtatttgttggaaggttcaggtggttccaagttaaaacacatttttagatttggaggagtacttggggtcaattggtttctgtaggcactagggtaaacttctctagctacaaggaattcaaccacctggcaaccgaaggtgtataggggttgtggcagttttactggcaattcccaacaaggagacctgcaccttctgttattagactatgaagccatctttcaagctccaaccagactactgcctcaatgttcgcatgatcgcgtaatctattttgaaggcaataccaacttggtggtgtcaaaaccttaaccgctagtcccaatttctgggaggataagatagtgcaagaggtggcggaaatgctttagcaagggattattaggcacagtccatcagctctctcttcttctgtattgttgataaaaaaaatggtattatgtgaaagttttatgttgattatagggctattaaccaaaacagtatcaaagttctctgtttcgaggaggtttttttcgttgtgggaacttcataatggcttgctttttcataagaagggcgtgtcttggttattgccttcagcaccgtaaaatatcagtcattatctcagtcctccatgaccaaagacatgaagagtattaaaaaatgctgaggcacattaccagtaacttctatttggagggaaaaatcaggaggtgcaatacttcgtctagacttgcatcacctatcagtgacataaaataaagcaattgcagcccacttgtctccaccaattcttgcaagtgactacacgaatatgggctgatatttcaatgaacatcatcgatggttgccctcatcccatggcaagaatgtcctggtagtatctcatttcctcctggtggcacctctttatacggcagtcactgcttctcttttattcttaactctatctttaaattatgcagactactgagctctgttactgagctcccttttgcttctatctagcatccacaaatagatgtgcaaactgaagttgttaatcgcaccatcaaaatgtctctatggtacttcagcagcaacaagcgaaggagatggttggagtggttatttttgacagaatactgctacaaggcaactgttactcgtctttgagaacaattccctttgggtcatctatgaacattacagcttgatactagccaatgtgcaaactgtggagattgaacctcatatctaggaccaaatagttaaggatctatatgaacacctcctttaaagctcaagcagccatgaaatcagctttaaggtggagacaaggtgttgttgcatctccaaccttattgatagctatctttaggatgcaaccttatcaaatgctcattccatgattgccttttgaaatcttggaactactagggttggtcatataacaactggccttactagaagagtctcgctgcacaatcccaagatgttgccagcaaatatccaaagcttatagacaagcttcatgacagggagtagaagaattttattccccagtagaacctattgtcgctggacaaattcattggaagacttaccagcataggtcccttggaagtaataagaaagagccaagtggggggcggggggggggggttacattcattcagattttgttggataatgattggcacagcattaatggatacttaagagttttagttaggattggctaccaaagccttaggatttagattcagaatagaacaggatctaagaattctggagttataataaggatttacctacgattagttttcctacaaataagtttattattattattaaaagcattatcattaattgaaataaatcaatgtttattcttgagagtaaatcaaggatttacctcataataggccaacaaggccggaaatttcgtgacttcagtgtcgaaggtcttgtgaccttgtctaagcatggactatagtcaactgcattcttttttttgtagtgataagttgtgagttgcattttgaaattaaatgcattctggcaagtttttttctacatctttaagcatgttcctaagataaatatcagaaaaacttttagtttcagcgttgagaaaaagacacaatgtttaattgttgaaagctttcatgtatatatttaccaaaaaaatgagtaggtcaagttttgaaatgatagctaaaatatgttatgagtttgagaagacaaaattgctttccaacatgtcaaattttcatcaaatcttttgaagttcaggctccatttggtacatgaaaatatatttaattttcatgtctaaatttatatgcatttacatgtgttcaataatgaaaatatgtaagaggtatgcatttgtgaaataatcaagcacaaagaatataattactttgagaactcttttatttaaaaaaaatttcaaactccattgttgctcttaccattatttttcttcattgttaactaacttatgacccttgggacccactacctctaggccaaacccggcagtggtcaaaagaaaatactagttaattcttactcaattatattaaagatgtcctagtaacaaattctggtgaagaaatttcttttaagggtttttcaaggcacaatgaatcttccttgatgataacctaaatattcctttttttttctttaaacatgaatgtcaaaacaatgctgaatgctctcttctctcaactctaggtttcagccttctcgtccaccagctctctctatac

SEQ ID NO: 8633 - DNA, 6745 bp, Carica papaya
  Intron number 4 from transcript evm.model.supercontig_13.1 49 (locus evm.TU.supercontig_13.149) derived from phytozom e v7.0 (chr-ID supercontig_13; pos 1321448 to 1328192 reve rse strand)
cgaatccctaccttggcaattcacttagacaggtttcttgctagataaattacttctttggttgattgttcatgaagtagtttttagctgcttagcggtttttctaaatcttattatcattactattttgagatacaaagaagaaatgccataaatatgcaccctttacaagaacatgttacaacaatcagaaaccaatataagaatgaggttccccaagttctttccatcaaggatgggctgccctgttaacaacatactcaggattggaattaattatctctgagaagagcaaatactacaggaaaaaacaaaagacgagggaagggatattggacatttctaaaagaaacaattatttagttttattaaacttaagtaaattaaaaaaaaagcagctttttttttaatgaagaaaacttgggtgatgtaggatacacttccacaattttaccatcactagtaaataaggtattgaacaacattttcttaccaaagaataaggtggaaatagaagcgattgagagaggaagagaaaagataaagatgagaggaaaagggggagggggaggggaagaggaagaaaggaaaagaagagttagagaaagggagagaaaccagaacttagagaatgcttcaattctgtttcaataataatgtcatcctcattacactagacttacttatataagtatataagcaaaaaagaggataaaacaggcaatagtaattttggtagttatataaattagccacttgaaattgctatcattatctatccagtgagaggtggggcaagttggtaacttcacgcgttaacaactagatgtcgtcagtgcctttgatctagacctatgagacggcacaagttggtaacttatggttatgacctttggctaccatcttggctcattagagggcacaaattgacaacttgtgattgccacctcattttcagaacatagaaggggccctaagggatattattgtcctatgaaattagagtaagagcgagtagattggtataggcgttgcattgaatgtcttgtgcctaaaatgtagggtggtttattttagttaagtgtttacttgtatagcaaagggggagggtagcaaaagatgaattgtatggaatgatcttgagaagactcatggtagatgagattttccttggttggttgcaaatgactttaacatggttcttgttgcctagagatgggcattggagcaagtaacttgttaaattcgctccaacctacattgaatgtttagataaaaatccgtaattagcggggtgcatatggcatctctatggatagaaaattataaacccgaaacgaataaggggcaagtatggatttaatgatttacttgctttgcccattttgatatatacttataatgttaattgatacttgttatggattactatattcaaatagtattttaaattatatcttaattttattaatacttaatattttctaattaaaattatttaaatattttataagattttttaaaattaaaagttagataaatatggcaggtaaccggtagaaagttttatccatgggacaggtagcaggaaaaaaaccttctatttgtttaatatatggttgggtatgttttatgtttttattagtggaatggtatggaaattgatgtactcggtccataactgctctgtgcccatccctattgctagccacaagagatggaggaagtctttctctagggcgtgtattgagggtttaggaggattttggacaatcttaaccttactaagcttcctctaacaggtgatagatggaattggtcaaattagaggagaaggcccaattctctagaattgatagatttcttttttttcgtcttttttattcttactcgggtttgatccatgtgtctggaaagtggaggtgttagatgggggccctatttgctccgacttgaataaatggctttgggctccatgtttctcgaattcggtcaagaatgataggaggagcctcagcggggcaagcttgttttaagattgtgaagaagctttcatatgtgatcttcaaaattaaataatggtgcaaggttgagcttggagattctgaagctagaaaagaaccatttaatgcaagtattggtacgctttgacaaatcgaaaggggagagagtatggtcttatgaggagcaagagttaagacaaggtcatggtagatctagtaatcaattgtttatggaaagcttggagattctgaggctaaaaagaactacttaatgcaagttgtggtgcaccttgacaactcagaggaggagaggatcttgtctcttcaggagcgagatagtggggaccaggtcatacttcttttttgagaagaaaaaaggtgtaatatatttaacagcactaaggacgtgcaaactcgtatataaagcatttacatatctaataaaatatctataaggtatcttaaatctcacaagaataaagatgatgattcttatttaaaaagtttaggatttggaaccacgagtcttaatcaaaattaccccttgtaccttcaaaaactctcatgcttctttctttccagattacccaaaaggtagccagcagaataagtcttgaagattgtttatccttgtgtctaagctcaaatctcctccctctctaagcccaccaccacctaacttatccccagaagactgtaccttaaggtccacagatgatatgcaaatgggcactgcaggagaatataattacaggattctgcctccttttttacacaagaaagatccattaatcaagattcttccctttcttttcaattttgtccggagttaagatacattccctcgctgcttcccaagcaaagaatgatcctaggtgatgcattaactttccaaattggtaatctactgatggtggagagtatctctcagagacaaagatcaaagggcacatggttaaaggatggtgttagaaataccaagtttttccataactttgctaacattgtaactatatcgagaaaatggaagtcgacagccatgttgagaaattttatgagtagctttctgcatggcagtggaatcttaatggcctgaacttttactctctcggtgagtagggaaaggattgccttgagagatctttttgtgaagagtaaatttttgaagttctcatgagatgtagaatgttgctctactgcttttcttgcagaacaattgggggggacattggaaaagattttgaagcatttgttcttttttttttttgtgaagggacattttgtcttgaacctcaattatgcatttttggtccttatccttgaagttgaaagtgcttcaagtattaaaaaaactcaagacctattagcttggtgagctatgtctataaactgattgtaaaattcttaactaaaagattggtttctggtgagtaaagagggggctgagttttagcatgcttttgcagaggatagagaaatcatggatgcaacactgattgattgtcaccgccaaaaattagtggttgttggaggagttggtggtggtggtggtggtcagggggtggtggtccgaggagggggagcaggcagtagaggtaatccacctttttctgattaaactttgttatgttacaggagtgattgggatgccctacttattgttaggtgtattttccattgctttcaagctatttcagttttaggcctgaagatctgcttgtctaaagcaaagttggcctggataggggattggtttattctggttcccttgctgccattttgtggagaaagctgctagttggagtcctaaaaacttggggcttctgcttgggatcaaatttaaacacattgcagctttggatcttattgtatctggattcgagaaaatgtttgttggttagaagcctggctgtcaatctaaagtgagacaactcactctcatagaatgcaatttgtccaatttgcccatgtactatattgctaattcccgattctggctaatgggatgaaaaggttggagtcaataacaatgtctctttcattgggctggtagcttgatattgagactcgagatgattccatttgatggcttgggatatggggaaactctttctgcactaattggaggtcttaggattagatctctttttctaaataaagctttcttggggaatggcttcgggtatttgtgaatgttaggagtaatatatggtagaaggtttagagcttagtttggggtgattggaatggggaaccggatattctagagcaccgcatggttttagctggaataatattaattcttgatggagataagttctgcaattgcattaggaggagaattagctatggacacagagtgatatctggcatgaagcttggaatgattaggaggcgctttctcattgtttcctcaatgttttctctcttgctagaagaaaagaactaagaaataagatgttccccttttcttctagccaatgggcttgggccatcggtttcctaagaaatttgaataattgtgaggtcaatgaatgtatcatactcatgcaacacctttcccactttaatgatcagcctaattgaaccaatgaacttgtttggaacttggatgctttcgtcttttcgccagtgaaaactttttaaatgcattttgtttattttggcttgccttgcaatgaggtccctagaagtctatttggaagcttaatgtgaccttaggattgtgcttttttcttgggagacagtcaaagggacaattatcacctcaacaatcttaaaaagaggggaaagattctaggtaattgttggtacttgtgcaagaggggttgagacaccacaacatctttggtgttgctctctcccttcaccttctgtgtgttgccatggtttttcttggcttgagatgggtgatagtatgctttatagctaaagagacttacctatgacagtgaatcagtcatcgagcacaggggaaaaaacatgtatcttttgtccctttggctactacctcggccattttgaaagaaaaaaacagtagagcttttgagaacttaaattttctttttatttttattttttgaaatatttaaattatccttttgctagagttagagattcatggttccgtaccttggattattaagggtcattctttcttcactgatgaggaatttggaggacctgtttgatattttaacttacttcaaaatttttgtatctcgattgggcacttgcctccttccttgtttatgtatattatacctttttcttttagaaaactgccttgatatcactcgatgtaggatgcactttcacaatccactttcacaatcactagtaaataagataatagaagatactattttatcaaggtttaaggcagaaagaaaagccatagcttatgggttaatggagatcagttgggtgatgactggttcaagaagggaagagatttggggctcgaggggtattaatagagagaagaaacttgtgagtttcattccccttactatctttcggatagtgtggatagagaagaacatgagagcttttaagatggtgaaagatgaatttgacagggtcagaggtagatggtttcagaccctagattttttagttatggatcatcctctttctgaaatggtggatttttgggatatcattgatattcttattaacatataaatgcttttttgtacatggattgacaccaccttggtgcttgtgaattaataaattataccatattttttatttcaaaaaaagaaaaaagagtggtggtcaaaactagagaagtttctaaactctggaaactgaagctactacacgatactaaaagaaaaaaaaatagatattggtcaagaacaaatactacagaacatttatagcggggttccttgatttttttcgaagcggaaagaaaactcaaaatacaacctaattatacaggacattttctattaaatggaaagactatgaactcaaaattgaacctaatcatatagaatattttctattaaatggaaagactacgtaggaatatcgtattattgtgcaatgtaatatatcgagaatattcctattctctaatggctcccaaacagcctcttgtttctttccatccaagtaacctcaaaggtgaaaataggaattagataaaagattcttttctttaccagctccaaagcccaaccaagcccaaacttcctctgctactaagccagaaataagcgaagataaatttaggagtcctaatgcagaatcctaaaatctcatgataggagataacatcacaaaaatcctcctattatttgtactgttgtatgaaatcctcttcgtgctttcaatcacttagatagcctcatggatttacgagatatgtcaaataataacatgagatgacaaaattaacccctataaagaatactggttttgttcaagagcatattagtaatttcaaaaccacatttttgttttgagtgcacaagagtcataaattcttctccttttggttcgttccatggtgctgtttggtacatgttgtagattggctaacttaatttaattaaagcacaaagacgctctgataaaaaaaattaggattataaggagggaatatgatattcaacctattattgttcttaatatgatcacaatttggggttgatctgtaattttctgctggatttggcactattaggaaatttacatgccattgtgtcatgtgaataggggtgtta

SEQ ID NO: 8634 - DNA, 1674 bp, Carica papaya
  Intron number 1 from transcript evm.model.supercontig_20.1 95 (locus evm.TU.supercontig_20.195) derived from phytozom e v7.0 (chr-ID supercontig_20; pos 2017716 to 2019389 reve rse strand)
acgaggtcgttcccggcgttgtcgagagcctcaaggtaattacaccgatggatttgcttgtattttctttttccgtattttgttttattttggcttatttggtttcactggtgaattatctggacaatagggttttttgtgacttttgatctgtgttacattgttatagaatacttaggattgctgttagtgatagctttatttgcttttttggataaaagttagtgataactttattcattatgacaggtaaatgagctgaaattttttttccactgctgctgtttactggtgtagtgtgttgctcttagcacctaggctgcagattgacaaaagttttgtatttttctggtgatactatcgtgtaagtgagaggaggagcttaactttttcttcttaattataggtttccagtgttaaggttgggttccactaaatgagttaccgctcacatatgatgctgcttgtcccctgcttcgcgggtgatttgcacttgatttgattccaccaagctaagttgtttgtgcaaatctatgtgtgatctttgtattgtgagtatagcaccaaattttcggaaagtcaatgttggcatggtgatgagcagtagggaattttagtcacttattgtttggaagaatctttgtgttgtgaattaccatgctacctgatttgcattttggaagaacttattgtttgtagaaggtttgctaagaagagaaaataaaagcgttgatttacttatctaaactaacaaggtatttgagtggttctagaagctaggtaagaatcaagagggtctctccttgattctaatttgtcttaagtcttagaaaatttaaatacttgtctaagtaaatgagagtgagctgttatggctgcttgtgctataaagaggtcggtcggatgagcatcctatgttgtctggccctttatttctattgccacgcctgtgccagacttgatgcgacattaatttggtatgggattggtctacaatggctgtgcatgttgagcacttgatgatataaaactagaggttatgatatatgataatgtgagaacaatgataacaatcttactgcttgtttacgagtctattttgagggtaaatgtactaatgaaatcttattttgcagtgaaaagttaatccaaactcctgtcttgagttcataattgtattagttttattatttttcatattaaatgaatccaaatactaatgtccagtttgtgacttgagtaggtcctcttatctttggcacaaaggagttagacacttgtacctgagccctgttaaaagagtgtgcacttagtttaagtcatcataaagtgagaattttaccatttcttattctttgtaatttggtcaagagttattttgatccaagtgaagtatgatccagctgtaattttatattgttgaaggcaatcatacttggaagagaaggtatctctcctcataagtaaagagattctctaagctctaactaatgtaagatgaaaaatttttgcacgccaacatgggttctttaaacagaaaaacaaagatcagattagtagtgcttatagcaaataatttgttaaatttttttatattgtgttctctgtctgttagcttctcatcttaccattttgctaggtgattacaaagttctgttcagaacgtattgcaaa

SEQ ID NO: 8635 - DNA, 3507 bp, Carica papaya
  Intron number 10 from transcript evm.model.supercontig_138 .31 (locus evm.TU.supercontig_138.31) derived from phytozo me v7.0 (chr-ID supercontig_138; pos 445593 to 449099)
ttttgaataagtatattggtgcttctgagcaggctgtaagaacttcctcatcgtctgttttctacaaatcccttttgagataagaatttctttcttgaatttcaagggaatttgtagcctgtcatgtctgatttgcctagtcatatttgtttagtgttatataggttttattttttattctaggaaaagttagatgtttttatagttgagtgaattgcaattatagatagcatgatccatggttatgcttttgagaagtttatctttaatttgtgtgcatgtaagacagttcatttctacattagatgagtacaaataggaggtagtgctaatgaaagaggaggtagtactttgaacgttttaaaaataaaacaggtcaggagatagtacttccaacttgtttcataacctttctgtgttctttgacagtcatcctctcttttattgaacaggatctaggagacattatagatcttttgcctaacactctcttctgaattttttgcttggggtaaatgagtggcatcccttaggtgcctttttatagaaattatttttctgcaagaaaaaaaggtaaacacttcagttggtgattttagaaaactttcctgaaacaaaaattctcctgactgaattgactgattttcattggtcgtgataagtaaagattacaatggcaaaggaaaaaatgagcatttccttattctcatttgaattagctgtaggaatatttgtatgctggaaattaagaatgaattttgtaaagctttttttttattaaatactatgagcatccaccatacactaccaaattctaagatttggaaaaactaattattgatttgttacatgcttgtctcattctttcttcaattcttacaaagtgatcgggtgtataatcttgcgtattttatatcatgttcacaagattatatacttcacgtttcctgattttatagtatgcagaatgatttctggcataatcccctgtcaggaaccttagaaattgataccaattagactgacaattagcaaaatgggaagacaatctccagaaattagcagaggaattagaggaattggaagaacagaatattcgagaaagaaagaggaattactgatttcttttcttcataatacttttcttatcaaatcatgcccaattccagactttctacaccattcctttccaaatgttcagtaacaacaacgacagaaatcaattcaacagaaaaacagaatctcagcaaaatgcagtgaaaggaagtaaaaagggggaagtaagattttataagaaattaagagttccgtactcatttattacgctaattacccatttaggctggctgaaagtagttttctgttgggtcagtttcttttttctctgcatgaagtggttttctcttccaaatcttcagtgcaggtgctgacatttctctcctcttcaacattaaccttgtcctcaaggttgttcatcaattgaaagaagagaaaatttatgcgaacccttcctcagtggtagtcatatatttcatgataatgtcattgtcaagtgcaacagatgggttccatagctgtgaagcagaactccttacgggctaatcccactaacaatcttcgggattgtcttgaaagaaagaaatagtagagtttttgagagtcttgaggtgaattttgctaacttcaaggataaatagttacatctttttggttccattattttaggacacaaccttgatagtttggaagattttggttccattgtagatattcttactaatctataaattctcactttttgtacatgggcggcgctcccttggtgcctatatcaataccctccacacttttattttaaaaaaatatatacatgggttccattgaaaaaatcacacttaatggataagcatggtcaatcttggcagtactccaacaagcataatctcttgtagtaagaaacttttggtgtttacaggggtttaacctatacccgctcatcaattaatatccatctattgtcatgcatggatttgctaacccaagtaacctgggaaaattttagaccaattacgtcatatcctccattcacatcttcactaccaacaacaaaaaattcatttctcaatgaaactcctaacttcttcacttctttgtttaacagcctccagtcatcgtattttccacataattaacaattcacttgaaataaagtggagcatcctttgattataaagatgatatttaacatgcacccagcttcaaatgctaaggatatactcttataagtaaagactactggactcgtacaaaaaccagcttctacaaaattctttttctatgtaattctcaaaacttgtcaactctttggaacttttcacaaaacttttgtttgcatttttctcagatgggactttcaacaagttggatcttactctcaacttgtatgttgttcaccaccacttctttttcctctttaggactaacaaccttttgacaactttatcacaagaactaataaatcttttctcacagtcccgttactccatttttctcaaatttattgtccccattatttttaccctgcagtttggataaaacagcttgagcagatttaggtggaggtagaagagggacctgaagggaggatatactaataccttgaccagattttggtaaaacaagggaaaatgatacatgtgaaaaaggatctggaaggtgcgttgagttccaaatcatgtccttgagttgattgaacctttgctccggccagttctaattttgctgtacatcataagaagctttgtgatggaagttcaatggacctttacaagtttatcctatggtgattgaacattttatcagagtttttgacatattcttcaagctgcagaaggtgctaattatctgtcatcatggcagccatggaagttaacgtttcatcttaatcaaccggctctgacaccaatttgtcaagaaccttaaacattaacaacaattaggctgggaattagcagaataagaagagcatcttcagatattagaagggaaattagaggaattagaataacgaagtatggcagagagagagagagagagagagagagagagagagagagagagagagagagaggaattgctgatttcattcaatagagcttcttcatagtattattctaatcagatcattcccaattccagactttctaccccacttctttccgaaagttcactaacaacaataacagaaattcagttttaacagaaaaacaggatttccgcaaaacacagcgagaataaggaaaaagtgggaagtaagagtttataactaattaaggatttctccacccatttgttacactaattacccaattaagctggcttgaaatagtttcttgtttctctgcacgaagggttttcccctaccatatcttcagtgcagatctgacattcacatcactgattattctttcaggtccgtgacattttctccaaagcagctgctgctgc

SEQ ID NO: 8636 - DNA, 2264 bp, Carica papaya
  Intron number 3 from transcript evm.model.supercontig_61.5 (locus evm.TU.supercontig_61.5) derived from phytozome v7 .0 (chr-ID supercontig_61; pos 114479 to 116742)
gcacctgaatagactcagagcactctctagaactggtaagcccttttttggtttttacttcaccaagatttgccatagtttatcttaaacgattctcttgatgaagtgttgcttcatatatgataatgtctttttagtttttatttattagatttctatatttttatgcacatgttattcatgaaagcatgaacaagatatgtatttctggaataatcaaataatgaatttcttttaagaaaaaaatgaaaataacattctaaaacttttggattccattctcatttttacacctattatttttattgttaacaactcaagtattcttatgtataaaatataagttaattttaaaaatgttttcttataacaaacagagccgtgtgagcatttttatcctatttttttatcagttaagcactagcttaaacaaaaactgtaagtttcaacttggattaagtaaaaatcttcctgttctaccttaagtgatgctacaacaaaaagtagctagactgtcataagtagtaacaatatttaaaagttaaatctaaacgaacaataacttggtttaattatttggactgtttagttcgcaatctttttttttttagtggaaatatatatgtttgttaattaggtaatatatacacatttatataatataactttatattgataacacacgaaaatgcacaatcaattcaaactcacaaccttttataaaaggaaatatatattaaccatctgtttgagacttattttatgtagttatcataagtagtaacaatattaacaagttaaatccaaactaacaataccttggttaattgtctggactgtttagtttgcaatcttttttttttagtggaaatatatatatatgttaattaggtaatatatacacatttattataatataactttatattgataacacacaaaaatgtacaatcaattcaaactcatgactttttataaagggaaatatatattaaccatcagttagagacttatcttatgtagtaaccatttaacgaaagttatagtttggaacttatgatatattttttttgaaatataaacatgaacttataatatttacttccttagaatttgaaatttaggatatctacatcctggggaagatgttctaaggtgctatatctgggatctttaaaattatgggtctggttgtaacctgattctagatcttccttccaaatccttcctaatatatgaatctcaccgtttagaaatgcattagccttggaagctctactcaccaagaaataagaggttaaaggattttgagctcatagattatttgtgcctcctcacaaggaaaaagataaattttattgccttttattggaataaatgattcccaactggacaaagtcatcattcctagccttccataaattgatttactgttgtgaatttgtcccgtcttggatcgtatcccatatataaatatgtgtgtatatattatatagacatatatacacacggttgtagcaaaatttggctacaaccgtgtatgtaaaccttgtcttacaacttacatcaattaaggctgttgaaaatcaggaaagttctcaatacagattaaaatttttataaaactattactaaaattggaaatacttcctaaatagcgataaagtttgccgcttttgaattgcgaaccaaccatagtcaatattaggaaaatcaaaaagagaatttgaccaaataaaacttccagtgatggcttacccatcgctgatgctaggatggtggtgctgcctttatgcagccacatgtataacatgtagctgcatcgggtgcggctactgatatgcttatttcaaaaatggtaatttttaatatttttgttttatcctgatttgataattatttataatctttacatattttaacagtatatatgtatatttagtcataataacctgcagtgagaattctcccttgaatataaatgaatagcaaaactttatttcatttgtaaacggattgatttattatttgattttttaatttcaagcaaattatgaaattgtaataatatttagtggaatttagagagtatatcataaaattgtttcaaacagatgtgtcttttccattagagaggaggtgaatcttgaagtcgttgaatttgtaatcgaacactatcacagaagaccaataaagaaggaactctaatgttgttatatgttttgacagtggaactagggaaacggtttttccctcgttgttct

SEQ ID NO: 8637 - DNA, 871 bp, Carica papaya
  Intron number 1 from transcript evm.model.supercontig_66.3 0 (locus evm.TU.supercontig_66.30) derived from phytozome v7.0 (chr-ID supercontig_66; pos 352144 to 353014)
cctggtgcggccactgcaagcgccttgcccccgaggtcctcactctctctcttctctatttatatttatgcacatatatatagtaaaccctgaaaggtttcttggtgaattgtttatgtttggttggtgagaaagctctcgagaagaaaaggaagtgatagattcgtggggtagagtttcatttttctacgtttgtttttgtcgttgtaggagcaaaggaaatgtcctgtagcttacagttggttgatgagaaatattttcggatcggatgttgattgattttagattatcaaacataactcactgtccaatatttgtgtacatttgtaatttcgatttctttgattttgattgtacacatttgtgatatgttttccgttttgttgtaaatcaaagtctcctccttccaaacaaacaaaccagaggggtttgaaggagttcatatctcaaaaaggttcttagttccaattatttggatgtttgatagagagaagacaatttttctccttttgaactgacagtcatgttgatagcgaaaatatttttttctggaatctaaattattgcttagtattgagcattggcgaatatacatttgccccgtactgttaaatcttataatctgctgaagtttcagaattttctccctttaataaaagtaaaagattcttcaatattcttcctgaaaaaaaaaaaagattcttcaattttctttatattgtgtctcatatgaattatttctcgtagctgagttcctgtctttctaatatatgttgtagtccatttcaattctacatctccatcttattcttgtcatttctttcctatttggtggtgctaacttcacaactctttggttctgtgcagttag

SEQ ID NO: 8638 - DNA, 1908 bp, Carica papaya
  Intron number 16 from transcript evm.model.supercontig_36. 86 (locus evm.TU.supercontig_36.86) derived from phytozome v7.0 (chr-ID supercontig_36; pos 683152 to 685059)
tggtcagtgagcagtgtaaatgcaagtctttaagttaatgtttttagaacttagatattgaatttctatagacacctgtttcgtggatgtttgattgcatacacatactggaagtgttggtatgagttgcctttctattttggacggactagattttccaattagttggttagattttgatgattgaggtgaaaagttttgtgaattatttaaactgcctaatccttcaaaacttacatgcatttctttgtctgtggtactaagtgctttctaatgtgattgttagtgtttaataggtcagacttatggaagacaagattcatttgtgacatctttgtttttacgtttcatgctcatacacaaaaagttagttcattttaaccgagtgatgtagaagtagtatgatttgagactgagaccaacttttcttacgattctatggaattcgaacttaggcgagaaaatagaagattatagatgaagactatagagggaataagggattaaggtgaagaattgaaatggagaaatagatagaacaagatagactatataccagatagaacgagaattatagttgagaacaaaaagaagataactgggaataaaatagaggtgagaattctcgacttgacattgtctgctgtttaggttagtagctgttatgcaagcactaattacatctacaactaataaagaaaataaacatagtgaaatattatttcttactcctaataaaactcaaaatttatctaaataactaaaatggattgaggatactaagtaaacaactactaatatttcttaatgcaaaattattccaatttaagattttcttgttcggttccatgctcctttatttgggaaaagctcgatctcaagttttgaagtgatggagtataaaaagatatgaaccggcactttttcttttgaagattatatgaacatgcacttttaacaactcaaaagcttgagattcagaaaacttgaatctctataagaaaataataaggtggtcatcaaaacttttatatttcaaaaaaacagagttggtcaccgaaactgtagattctgtaagagcatgaggcaaaacgaaatcactaacccaatttgcaattaataaggacatattgaaataaccaaacaaagtgaaaagtatctaaatcccaattaaactcaaaacctatctaaatcacctatataaacttaagataaataataatgacaattataaaaatcttccttatctcacataattatgatttaagattttgttattctgcatcaccaggtagctaatcaataactttcaacttgcatatcttcatagtactttttaggatatcatttccctgcatatgttgcaaattggaagctttgctttgcaaaatagtgatgcaaaacaaaaagatattattttgcaacaaactttcaattagaaaagttctctataactattattattttgtatttttaagttattttggttatttagttttatttaggtattataatattttacttttctgtttagttagatcttatttttatcgatattaagtattgtaaaaattagaatatttcagatttctttttttataatttttttaactagttgtaactaatatttacacaaaagctaatagctatcagcaaaggtactatgttgacgatgaattaagacttttttactggggttttatatctttcttattgttcttctaattattattctgcttaacctatctcgttcgctttgcttctctctatattttttcatcattgtccctcattttctttgcctatttctattcttctgcttcttagtttgttgcgtctgcaatttttttaacccctcttttaatatagtagctgctcactttataattgctccttgcctgtaggttg

SEQ ID NO: 8639 - DNA, 12589 bp, Carica papaya
  Intron number 5 from transcript evm.model.supercontig_24.6 3 (locus evm.TU.supercontig_24.63) derived from phytozome v7.0 (chr-ID supercontig_24; pos 1445083 to 1457671)
agtatgtgttctcttctttcaactatacttttcatagttcgaatatataatatcatttaatagtgcttatcctatccagaaaatctctctctctctctctatgtccatgtggggcgcgtgtccactgatccagcatggggagattctagtgtttgtacatgtatagacattgtgattgaaagaccttttgtccataaatgctcttgctaaagcttttattttttagttttagtataaagtatgtccaaatcagtgtgaaaagcatagattttaagcattccctggttaatggcagaataatattacatctattacaactttttttgataatgttagttggcatttgatattgtaaattaggcttcttagcaatcttgaggctcaagtatataaatattaataggattatcaagagacttaccaggacaaatcaagggaattatctaattttgagtttgcatgttccgtcactcttctgtgaaattttcatcttaggaaggagccaattccatgataaaagatgcagatattcttctgcgcgcagaataggacccaacagatgttaaataggacacgtgaagcctgttgaactctcatcttttatattgtctaatgcaaaccgcttaaatttgtatttaactaccaaataagatcatcttttgaattttatggttccttaatctgatctcgtaagagtgttttgaaagagatctcagagagatacacacaaatcctctccacttccaccctttcccatctcttttttcatgttttaagtttcttcaatcgtccatctctttcttgtcgaatgttttgttattttatcattttttacttgttcattctcttctatgactataaaattggccttgtatcttgggtaggttattttttttctttttcttttttgtcgttatggttgtatctgatagctggttgagggtgatacgtatcagcatcttgtttaataatgctccagtttgtattttgtgacactgaagttaaattctggacatttgttgttggttgtcttacttgtcacaaatgcttaggccctgtttagtttaggaaaatatctccattttcttaagatttttccttttttcttttaaaagaaagtagaagcatgtttatttaagtgaactaaaattattttcgtccaaaataattttctaacaatagagaaaatgaccttcttgataagattgctactcttgatagattggcctcagatgacgttacttaatgaacaacaatttggtcccctttaagaatttatttgaggagattcttgttagaacatattattttgaggcagaaatctagggtgaaatgacttaaaagaaggtgatgccaataccgaactctttttgtggtggggaatgggagagggaggaagaattattatggagcatgggcgattttttggctgaatgattacggattactttatgaagttgtatttagatgagaatatcgactgtcctttattgagggcactgattggtgtttgattatggggagtgagctaaatggatcaagagatctttcaaggagtgctaaattaagagggctttctgggatcttggtgtggataaggctccggttcccaatggttttactttaccctttctttagagatgttgggatttcattaatgaaaacataaagtgttttgaggaattccacctcattggtaaaattaatacttgcatgaattctttctttattaattagtcccttagaaagatcatgcccgtaaggcttcagattatcaacctataaggctagtcactggtgtataatcagaagagctctttcctatgttgacttgggtgctagatgggaccatttatgaccagtagagtgctttggattacaagtagatgttatttgagatgtctctcttattggaaattagctagtgaagaaaaatagaatatttagaaaacgaggtctggtccccaagcactaaccacatgcttattgctaaggtatttggaaaatgccaattccttcaaaagtaaaggtgtttacatggactgccatgcagcggaagttctacatgagtaagatgttagaaatccgttgacctcaccaagctcttcctctggacatctgtttcatgtgtttcacatgggactctggactaagttgattcacatgtttgggcttagccaggtcacgcccccaacgatggaaagattttttttttttttcattcattcatgaggaacagagggtgcagaagtattcccaacactagtataaaaatattctgaacattaatgtggaaatattctcaacactgatgtggaaatattctcagcattaacattgaaatattctcagcatttaattcattattttcagcctttaatttttgatttagtaaaaaaccaactattattagctgtatcttttggtattaattgctagattttttaacgttattagattttatttttgattccttatatactgtaaactaattgtcaaatcttcctataaaaggaaagtaattaattataaagtatgtatatattggttgttttcagccattcgaagtgcagaaagaaattactccatttctacatggtatctgatcaactcagactttgacagcctgcattcttgaaagaaaaaagtccgtggctgctaagaaaggagcctcctcgatagatgtcatcccaagtcatataagccaactaggagccttcaacggctagctcctcactatcaccggccacaaattaaatggccagaattacttgcgatggtcataatcaatcctcaccttcagatccggaaaaggaaacggtgaataccttactagtgaagctgtacaactgaagaaggaagacacaacatatcaagcataaaaaacagaaaataaccaattaacgttgtggcaactaaatttaatgatgagtaaaataggagaaaattttatcactacgaaattgtagcagaaatatgggaagcaataacggaggcacacccacacataaaaaggacgtctgaactttttgaaatcagatgccttcttcatgatcaatcataaggaaaatttattgtcactgaatatttcaacatactcaaccatcattggcagcaacatgatgtgtttgaaaaacatgtggaaatgggagatggtgattgtatcacaagaaacttttggaacaaaagagattatacaacttcttaataggtaaataaaaacttagatgatgtgcataggaagatccttcccaaacgaccaattcccagcattcgtgaagcatttactgaagttaggcgtgaagaaagctgcaggaaagtcatgatggaaactcataattcattcaataatatcgaagcaactgcttttataattataggaggacaacgaccactcaactcttggaaacaaaggaaggaaagaccaaaatgtgatcattgttacaagtttggtcacactaagggtaaatgttgggattttcatgggagatcagaagatgcaaaacttaggcagagcagaagtaattcagccacctcaagagaaaagctcaaaagtactgggacatctgtcttcaacaaaaaacaaccaaaattactccaacaattgtttgtacagcaaaacaattcacctgttccctccatagcctcgagatctatggctcacaaaggtaacatcctatatgcccttaatgttggaaaggaacaatttattgtctgaattcttgactcgggtgtctttgactttatgactggagattcctaattatttactaaccttattccatgtaacacaatcacaagtcattgacttaatacttcactctatgtgatttgttccaaaactagattgttactagttatctataagcaaattggcttgaagtgataattgtgtcgctaaattttttaaaaatttgtgtgaatttcaaggtacggacacagggaggacgattggaaatggcaaggagtgtttcggattgtgcctcctcacctgtaacgactttgaaagtggacaagctctacatattagtggtctagtttcacataacgctttaattaatgcttccaataatgacattattttatagcattttcagttagctcatcccaattttgtgtactttgaaaagttattgtcgttgatattcaaaaacataatccaaaattatttcaatatgaagtcatcagttattaaaacacacacgaaatccatttccaaaccattcatataaactctctcatatgttcataatatttcatagagatctatggggactagctcgcgttaagcatgtagttaggtttcgttggtttgtgtcctttactaataatcgcactcatttgacatgggtttttcttcttaaaaaaaagtcagaagttgagtaactctttcgaaattttcacaaaatgatccaaaattagttctaaacaaaaatgaaagccttagaatagataatgccaaagataatgttctgggaggttatttgttggattaaggaatcatccatcaaagtttttgtctaaatatcccacaatgacataagattgcagaaagaaaaagcatacacctccttgaaatcgcgtgttctttgagaattgtaactattgttccaaaacatttttggggggatgccatccttactgtagcttacctcataaactgaatgccattttgtgttttcaacttccaaatctcattcaaaattcgtcctaaacattatctttcttgccttgtgtcaataattccactaaaagtatttcgagttctgactttgtccatatttatctcacaaccgtgaaaaactcgaccctcatactataaaatgtatatttttgggatactcaccaaataagaaaggtacaagtgttattccataaccactcggagatattaccattttgtggatgtcttttttctttgagaatgaagcattttatcgcgatattgccatttaggtggagagagaaaacaatgaggaatgttagtatcgggattttgagatttcatttctagaaccaatcccaagttttccagatctctttgaattcgcacctcgaagtgtaaattctagcattgagtaagtatttccagcatataattctccacctccgaagttactaagaaataatgtgcacaacgagttttgtacctatgcaaggagagcacatgttcccatattggagaaaaattttcaaacactgcctgaacctgaataagagtccaattcgaattcatcaaatgaaggtactataatttttgaaaattatagaaataatttgagctggcttattgctctgcggtagggtgcaaatgtatctttatggtaaaacttaaggatgaaggaagcatcgaccaatataaagcacaatttatggcaaaaagatttaccattgttatggcgactatcaagatacatctgtactagtgggtaagctaaatactatctgtgctctcttttcattagctgtaaatttgaattgatctctattctagttaaatttgaaaaatgtattcttaagtagagacctagttgaaaaagtgtatataaagatctctcttggatttgaaactctagatatgagatatcaggtttacaagttaaggtcattatatagtcttaagcaatccccaagagtttggttcaaaaaattcacaagactactgcaacaatgtggatattctaatgtcaagcgggctatacactatttataaagaaatcaaaccatagtaagttatctattttaataggttgatgagataattatcactggtgatttcacaaaagaactaattaattttaagaaaactcgggctaagaaattcgagattaaagatataggaaatctttgatattccctaggaatgaaggtggcaagatcaagagaagtaatctatatgtctcagagaaaatatatcatagatttgcttaccgaatgtgggatgttggggtttaaactagctgagacccctatggaaaccacccataagttggggatgtctagaaaagaaaaggtgttctagttgataaaattcggtaccaaagattgtaggcaaactcatttacctcttatatacacgtccaaatattggagtttttgttaacattgtaagtcaactcatgaataattcacaagaagaacatacagaggttgcttataggattttgagatacttgtagttaacaccttaccagaatttattctttaagaatggccttgatagagatcaaggtggcacaaatcaaaataaactacatgggagctcatggatacatgagagctcatggctacaaaagaaatcatggccacatgagcttaggaggtcacggccacattagaggagaacaagatacaactaaggaagtaaaatcaaaatgataaactacattggaaattaaaaaaaaaatggcctcttcagtgtcagctctctttactcttttttagccggtcataattctaatgaataatatcatttcttctaaaacatcatttggaaatcgcgtgccttcgtaaaaatagctttttttgcttaagaagctgtaaaagagaaaatccttacaatgggcaatttgataaaaaaagggcacactactatcaacaagtgtttcttatgtaagagatctcttgaatcatgtaattatctactcttgaaatgttaaaatctcacaaattctagagcataatactcggacttttgggaatttcttgggtaatggtagattctgtttctctcgaacttttggcatgggaaaacttgaggagcaacaaagcgcttacattaattcttcttaccatattctgggctatttagaaggagagaaacaaagattttgaggggtttgaataagattttaatagcatgaagaataaatagtttcattattttgactctactgttttagggtataatgtagaatattttgaaaatttaggttatattgtagatatgttaattgcattgtaaagtttttgtaaatggatagtgctccattggcacctcacatcaatacatcttatcttcttttttttttttaaaaaaagatacaactaaagaagctcctcaagacacaagtcatgaagaagcccgtccacatggagataagcatcggacggatccaactcagggtacacttaggctatatggatggattatcaccatgtcaagtggattgatcacaaggtcatggatcaataaactcaagaaagactttcaagcttatgttaaggatggatccatgaagaagaaagttttgggctgaacttggaaggccttgaaagatggagactaagcccatgaagccatggagagaggcggccaataacttgtcctataactcatgaataccgagcactaaagtgtcatacacatggactctcggccagctccttcgcaagagattttattcatttacaactcatcaaaattggccaacaaggagtcctacaagtcatgagtttcatccaaatcttctacaaatcttttacaagcaatcgaccgtcagtatcctacaaaagagtccttaaattcttggactctcgggtatttcattcttggaagcagatcactcttcttggtagcatcctagctgattacttctcttctgaagcatatttaacatgtgtatttatccaagtatggccaaatatcactcatctattaagtcctagccgagcaaactactacaagggccgaccaactaaaagcataaagaatccttaatatgtatcttagtcatgtgtaaattatgatgttatcacctatgagtagttgttattgagaagtccttgctaattagttaagagtcctactttaaagtagtttttttatattaggacttttgctgattaaggtaacatgtttcaactttcaaccttcttgttgcataaagaatttgtttcaacttattaaggtaacacgtagcattttaatcaattcattttgttgaactgatttcaatttatcaagatgtttcttatgtcattttaatcaattcatttatttctattattttaattccaataacaggttgattgtgggttaattaagtttttatggtaattgtgtatgtgtgagttcggattgcatagttggttatggattttgcatcaggtccaaaacaagatgtataaatttatagtgatactattgggtaggatctgtcccagactggagatcaacttttggttattgttcatatatatggagaaatttggtcacccagagaagaaagaaacaatatgtgctatctagaagtagtatgaaagctgaattgcgcactatggctaatgcaatctgtaaagatatttagattagaagattactcaaggaattaggaatcaacctataagaccctatgaagtttttttgtgataattggtttgctttaagtgttgtaaaaactctaatttatcatgacaaaactaaacatgttgagattgatcatcacttcatcaaagaaaaagtagaaggcaatcttatctaactggtctacataccaccaaggtcacaagttgcagacaatgaaagccttgcctcgaaaaagctttaaaggcctaagtttcaagtttgagatgaataacatttttaacccaggttgagagctagtgtggaaatattctcagcataaatgtgaaaatattattagtattgtaaattttaggagaaaaataataattttattatcaccctttaggttgttacacttagagtatttataaaattcataatctactaataagaaactttttattttattagaattctaataatatgatataattattctcatagaatcctaattacataatacaatataataaataataaactaaaatacttaaataataacttatactactcacactctccttccttcaagttggtccgaggatatctctcatgcccaacttgcagatcaggttttgaagagtcatcttgcagtttatcagtaccaatcatctttcttgtttgaatattatgattttagtagatttgttgcacttatagttgatgaagagttaaattaagaaaggatacgctttagggttttgaatctcctcattcgaaaagactctaactattggtgggtcagatgtttcacttttctcaactaaattttcttgagctcttgtaggtccactattctctcatgacctctagtttgttttccatgcaacttccagtaaatttctctagtgtgctttgacttgtcacaatagtcacacctctgtatatttttggattgttcaaaatgagtaactaatgcagctttctcaactggtgttatgtaaaacatgatactttttctacttttttcttattagatataagtttgttctaatgaagaaaaaagatccttaccaagcatttggacctgtatttaatcatattatgtgttcaaaccagttaagaaatcataaaattcgctctttttctatcaatttctaaaatttgactgcatttgcaggacaatctgcttgaaagtcttgatagtaatttaattcctaccataattcactcagttcagaaaaatattatgaaatagtaatatctcattgatttgtgccatgaactttattccggagttcataaatttgactgttattacccacttgtgaatatgtaaaagatgttgtatttcatattttttttgcagtatcgagtaacaaatatattcatgcaatataaggttgcatgaaattgattaaccaagagattaccaaagagttttcaaagttctatttgttatactccaaatcacctgtaatttatccctgcaatcttctaatcttgataaacaataaataaaatcttgatcaagtaagataattaatttcatcaagttttaaggggcttatttgtaatgagaagttatccgaataagaaaccatcacttttcttgcttatgtcattttaaaatgctaaagacaaaaaaaaaaatacccaataatggaaaatagatctcttaatttataccaaaataaccaaaaaaggatagaaaaatactgaaatcagatttgtttggctgtctggctcggttctgctcgaaaacagctcggctcaaaaacagctcggctcaaaaaatggctcagctccgactaaaaattggcttggcttggtgcagtggctcggctcgggttgcaatcggctcggctcaacggcttcttcggttcaggcagatctacagtacacggtggccagaaaaatgaagcagattggggccagaaaagcttccgcgtgcagctctgcgcgtggtggaagttactcatttcacagctcatcgaaattgggatgctatcatttcaattccataggatgtaattattttttttatcttgtgactttgtgaggaggatgtctcatcttctgattttgtttttcttttctttctcatattaataaagtttctttttcgatcaacaaagtctggatttcgagaaggcttataattgggttagctgaggctttgtcgaaaagttttggagagaaaacgttttggtgctatgtggtgggcttgagtatcggttgcttcccttctgtcttttttttagaccgctcttctggacaagttgaacactaaggatttattccaagctctcagaccaaatcaagtgttatctccgggggtgcgcatgatgtgttataaggctgtagagtcgagtctcttggtcaccttttcttttcgcattgtcatttcggctggaaatcttggtccctgttttttgacagttttcatgttgtctggacttcacgaaaaaaagttgtaggagatttcaacaaatgtaaagagtggcaatggtttttagtgctgagatcttttcttgtggcgtttcagtacttaagttagagagaaatgctaaaatctttagagattattattctgttattttggttgtttgggacaaaagctctttttggttgtcattttgagctatggccgatagtcatctgatctgttttcttattttttttttttttttaataaagttcctttttgtctaaaaaatataaaaatttcagaaaagatttttttttttttttggcaaatgaaatcctggcaaatgttaaaaactttatgttaaactgtactacatcaaggtgacgtcaccaccagacttctgaaccccagagtaacatccaagcacacatgatccgatgtcacctgtgccttattttggccaatctgaagattttcaagttctctcttttatttttttttcatgtattttttattttatttacagttactgcttttctggttttattttgtgttttgaattttattgcataaatttttatttcattattttttaatctaaaaataattatatttaaaattttgtaatagaaaaagtaggatttgtaggaagataaatatagtacatatgtggggaataagacatccttttcaagatttcaactagaagaatcgaaaaaacctccaaaagaaaaactcaaaccaaaaataactgagcagaggagtttagaatccaaacccacttaattacaagattatcaccttccagttttatgtaacaccgagggagcaatgtctgaaaccatccatgagcttttgcccttcgtgtggggaaaaagtcgttcttcccatagcaccaaaacatttattcatatttaaaaattttatcgttcctgggtccaatttagatttaaaatttgaggtcaaatgtttacaacttatctaccttctaactgaaatgtacttgcatactaataaacatatcaaaaatttcattttattttaatgctggaaattataattgaaaatttcatgtttttaaatttttaagttatgttagatatttatgttttatttatatattaccttattatttttgaagtgtttttaaatctagaaaataattataatttgaatgatatatgtaatattttaaaattttataaaataaaatttgtcatggtttggaaactgtgttgaaattgtttttccttaagatccagattatatgttaacacaaattgtatatataaataaaatttttgaaaaaaaaaaaagatagaattattaattgaaatgtttatttttatacatatattaaaattagtaaatacatgatctattatttaaaccaaatctagaaaggtaaataaattaaatagaaatatgatttagattttatttgaatatatttgagaaaaaaatttatcgaataaaaaattgttcttattattatgtttgttgtttttttcaataattaggcatttactatttatctatatttttagttattatatgtataaattactgatagcaactaaacacattttcttataaaataaaagacatatagtgaaaaataaccaaaactcaaggctcaaagtaatttctacaactaaacaggcacttaaaattctgattcctccctgtagaagtctattctttcaattaaggcttctttgcagtgctcataagaactagttcaggatctttgatgttgggtgctatagttagacgtagaacatatgatcttcaattatacttctgcaaaactcaagttatttttattattttaattttatgttaatgcaggtgggattgcagtttccggt

SEQ ID NO: 8640 - DNA, 1101 bp, Carica papaya
  Intron number 1 from transcript evm.model.supercontig_10.1 23 (locus evm.TU.supercontig_10.123) derived from phytozom e v7.0 (chr-ID supercontig_10; pos 1780359 to 1781459 reve rse strand)
aagaaaagactaagagaacttcaagtgagttggaaactgattcgttattttcattttacatgttaatgttgtttgatagtaaagaaattaatttagtaggttcctggggacgtgcattgtaagccaataatttgaataagagaaggaaatgttgtttgatatgcttgattctgtatacttgaataacctaaaggaaaagttgtgaatctataataacctctctttagttgtcaaagagctgtagagaaaggggctagcctgaaactcataggtgatgaaatttttatctctgtgcagataatttaccaaaactcaattcaaactgacatggtctcgaaataccttgcatttggaaaattcgtttggtttgaaagtttgattagtgcattaaagagggtaatgtgtagaactgttttggctatatgaaccaccaattccaaattacttctgtttccaaactgcaggaaaacaaaaatgcttaccttttcgactgcttcattcttttggttgtagaaactgacactatgtttggtgcaaatgaatgtagaattcatttgcaaattcacattttctattcacattaatccacattttcatttttgaaatgtgaataaaaaatattgatatgcgaattatattccctttttatcaaattcattgtttcaaacagggcttaaaatctaaagatgaccttggatgggctaatttcttgtttgctgctttatcatcggaagatacttgactcttgaatggcttttgatcacaagctttgagcttttggtcaaatgatttcttttactgcctgtcaaaaaaatgatttatcggtactctgaaaatgcatagagttgtaatctcaacttaccttttatcagtttattctggtttcttagtacaggtttggtgttcggataaattaaagtgttaattatctaacgttcacttaacattactttcgtagttactttttctgctttggaatgtcacttcagacagatttcatctgatgaaaatttgtctgcacgtataaatgaataacacataatgtattgatagattatttttccagttcagagaattgatatcttgggccagctgggtgga

SEQ ID NO: 8641 - DNA, 11159 bp, Carica papaya
  Intron number 6 from transcript evm.model.supercontig_73.9 0 (locus evm.TU.supercontig_73.90) derived from phytozome v7.0 (chr-ID supercontig_73; pos 1247966 to 1259124)
cagttatcatatcagtatggctctaaaattgtgcatattgtacttcttactaagtaggtttttttaacgaccccggaaatttaaaaagaaatgcatataataatttaagtgcggtagcgaaataaaggttaaagttaacatcgtttacacgataactcaaaagtactaacaaatattacggaacaaattttctgaaaaaaatacgaaaaatagaaaaaaataaaggaaactataaagtatctaccatctacttgtagctttcttgcggatcggactcaggaaccgggttctcctgatctgaaatggttaaataaggggtgagctacactagtcgagtaatgatatcacactatatcgccgtcacaaaagtaaaggttggtagaaaatcaaaacaaccaatggagcagtagattcaaatagatttgtttatcataaatgaaatcatttacagttcacttaccagtgtggaatttatggaaacaatttataaaagcaataatatcatacggatcacaattcatgcataatcagtaacatagaacatatcataaattcgtattcatcaacaataattgatcatcaccacttcttgtttcaccagtctactagtatccatggggatccataggggtgtcctcgctacacgtgaactatttttcttaacaattttaatttcagggccgtctccataccccgtctggtatgagcgccaaatgaccaaatctccatactccgtctggtatgagacaacattcacggtagggttccctatgaattcagtctgtttaccatctctcaagatatctagtgagcctgtcaccttatccatttatcagatcacatcccattcctgtttgtccttaatcttcgtcaccaaatcaaacataaatatataaacaagtaacatgcatccaacaacgcaatcatatattagattcccaaaatcaaacagtagtgaagtaagcactgatatatgcatttaaaaccacagaatagataaaccagatatcataatgcatttaaactgtaaaataaattaaacaggaatcgatagaaaataatgttcggctcgggttccattagcaaccgtaattaattatgtatatctatttaatttgtacagaatacagtattattatttattcaaacttcacatctatgataggaaatagggtgaggggtccttacttgattcaacgccgaaaactagatggttattgcatctacgggcgaccatcgggtttcttgaattttcctttgggaaatgaaacacggttatggtatctacaagtgtcccaaataaactcaaaaatcagacccagagcctacttgaccaattttggaattctggcacggcgactctgccgtgctcttgcgatggcgtcgtcgcccgcagtggcaattcgcctcgggttggctgttttcggccgaatttaaccgaacttgtaccggttcctacgagaaaacaacttagggccatcggtaagccgaaaaaacgcagaaaatcgaaactcgctggcggtggggctctcagtgttgcggctcctccggctcacattgcggttagatgttttaattcggtcaacctgtagagaaggaaacagtggtcacaatggtggaaaaatcacatcaaacgggaatcggagagggcctcatcggaggcgttttccaaaacaccccgcagcggcggcggcgccgtgattcggcgatattttttggccaattagccagttctttcactccgatttggccatgagtgcgtttaaaattgaattttgtgcaagaggaaaattttttaccttgtttagaggtcgaaaattcctccggtacggcggcaggtggcggcagtcgactccccgacggctaggctgtcttctctggcgaggggctctggttagagtttgggagcggatggggttatttatacccattcgcttttgatatgggccgtccatcacttttaatctggaccgtccgattgcgattaaatagggagtaaatttgagtcgtccatcgcgattcaatctgagccgttcgtgcgcgattcaatatgggctgtccgtgcatgattcaatatgagtcgtccgtgcgtatttttgatctgggccgtccgtgcgcgcgggaacagatctcatccgttcgatcgcgcgcacgcggatcgcccacgtggctccccccgcgtggccccccgtgtcagcgcctctgccacctggcgcatcctgattggtcggggctgctaatcgggcagctgacgtggcgtaacttttctaaattgcgttttgactcctaattttttatttttctttcaaaaatattctcagaacctaaattttcatctatttttctcaaaattgttttcaattaaatccctaactaatttttttacctattattatcattattattattattattattattttcattaaatcaaattaaaataaattaaaatcatataaataataattatatttatataaaaaataataattaaataaaaataaaaataattaaatgttgggtgttacaactctcttccccgtaaaagaaatttgatccatcaaatttgtctcttactctcgatcgaacagctgggggtactaagctctaaagtctgattttagctcccatgtggccttctttggtgtgtggttatgccatatgactttcacgaaggatatctccggttgcggagtaatctgctctttcgatccgcaatgccgactggtactttctcgtaggataaattctcctggattggaagaggttcgtgggccaagacatgaaagggatccgggttgtacttgcgtagcatggacacatgaaacacattgtggactttaaaaagttctggaggcagtgctagtctgtaggcggcagtaccaatcctctctaaaacttcaaatggtccaataaatcaggggttcagtttctccctcttgtcgaacctactgattcccttaaaaagagtgaccttaaagaacactcggtcgcctttctcaaacgctaaatctctcctccggtgtccgcataactcttctgcctgttctgagccgtctgaatgttcttcttgattttaaatattttggatgtaatctcatctaccagttccgggccgaacaattttctatcgttcacttttttccaacaaatcggcgatctgcatggggcgcccatataatgcctcatacagagctatgccaatactcgcttggtagctgttgttgtagacgaactctatcaggggtagatggtcgtcccaatggcacccggagtcaaggacacaagcttggagcatatcttcaagtgtacggattgtcctttctaactgtccatcagtctgagggtggaagacagtactgagggacagctttgttcccatgtcttgctgaaagttacttcaaaatcgagaagtgaatcgggagtccctgtcggataccactgtcactgggactccatgcaatctgactttttcctagatatacattcttgctaatttgtctaagggatcggtcatcctgatggttaagaagtgggaagacttggtaagccagtcaaaaattacccagatggcataatgtcctgagcgtgtcttaggtaaccctgtcacaaagtccatagtgatatattcccacttccactctgggatcggtaatggctgaagtaacctgactaggcgctgatgctctgccttgacctgctgacataccaagcatttagacacaaagtcagctatgtctcttttcatcccgttcctccaaaactggggtcgtatactttggtatattttagtacttccgggatgcataacaaactttgagctatgggcctctatcatgatatctctctttaactcactgtcacctggaacacacaccatgtcctggaatcggagtaacccatcagcggagactcaaaattctgagctaactccctgttgtacatcgttcttgaaggctactagggcgggatcagctgactgagtttcccttattctctggattaactcaggctggacggtcagatgacccaaacatgtgactctcatcaagtcctgaagtcgaacctgttgtgtggccccaatttgcctgtattctgagaccattaaatagactaagatacttgcactttttctgctgagtgcatcggccatcacattgcccttacccggatggtacaagatgtcacaatcatagttcttaagaagttctatccatcttctcttacgcatgttgagatccttctgagtgaatatgtgttttaaactcttattatcggtataaatctgaaaagtttctccatataaataatggtgtcaagtcttcaaggcatgtatgattgcggcaagctctaagtcatgggtgggataatttttctcatgactctttaactttttagacccataggctataaccttcctatgctgcattaaaacacaacccagacctagataggaggcatcattataaactgtatacccccccgatccactcggtaaggccagcacaggtgcagtagtcagccacttctttatttatgaaaaacttctttcacggtcctcattccactcaaacttggcattcttctttgtaagtcgggttaggggagcagttagactagaaaattcttcaacaaacctgcggtaatagcccgttattcccagaaagttatggatttctttaactgatgtcaatttctcccatccgagcaccgcttcaactttttcaggattcactgatactcaatcctttgatatgatgtgtcccaggaaggtggtctgatcaagccaaaatccatacttactcaactttgcatacagtttcttttttctgaaaacctgcaaaacttgaggtagatggtgaacatgttcctttctgctttttaaatagaccaggatgtcatcgatgaacacgataacaaattgatttaagaattgtctgaaaaccttgtttatcagatccatgaagatggttggggcattggttacccaaatggcatgactagaaactcatagtgtctgtacctagttcgaaaagccgtcttggggatgtcttttgttcttattttcgcttgatggtaacttgatcgcaggtctattttggagaagacctgcgcaccctgcaactgatcgaagaagtcatcaatcttgggaatgtgatacttgttcttgattgtgaccttattcaatcctctgtaatcaatacatggtttcaacgttccatctccatttctagcaaaagtgactccggcatcccaaggggacacacaatgtctgataaaactactttcttgcaattcagtaatctgtttcttcagctcattcatctcaacgcggctcatgcggtaaggagcaaccgaaataggctgggtgtctgactgtagatctatggtgaactcgacttccctgtccaccggcaatccagataattcattcggaaacacatctgaaaagtctcgtactaccggaatctcttgaatacaagggtttgcctagttagagaaaacagttagcttaaggtactcgatgaataagaaaacttgctatcaaggaataagtacaaaattattttattaatttgtaaatgactcttcattagaaggattgaatacaatttttttgttaaaacaatttactgtggcgtgatacgccgttaaccaattcatccataaaattacatcaaaatctcccatgtttaattctactagatctacactcagtttcctatttgctatctctacggcacaagtcttggaggcatcttctcccaatagtgttacactccagtcgtagatacaaataatattgaatcaagtttatcaggtaatacattaaattttgatgcaaaaacaggtgaaacaaatgaatgcgatgcaccagtgtcaatcaaaacatgagcaagatggttacagatagtgtgcataccctgtaccacgtccgggtcggcttcggcatcctgctgggtgagtttgtaagctctgccctaaataggaggtttgccctgattctggttccttgggcactctctcgcataatgttgggcactaccacatatgcgacaagtgttgttgaggcggtattagggtcggttcccgtgatccctgctgcaatgctgacagatcttaccacgttctaccactggaccctgagggggagcctggatcaccggtctgggcctcttgttctgttggacagacacagtaggtgctggtctgcggggtggagttgagggtctgaggttccctgctgcctgagggagggtgtggaagctcctctccaccagctatgccttggccagaacggccgaataggtcatgaactccagcacgaacaaatgctgcctgatttctgggcggaggccccactagaatctccccactagaatctcctagccttcctgccctcatccaacaatgtcgtaggggagtatcggcccaactccaagaacttacgagcatattttgacacagtcatgttcctctggactaagtggacaaattcaatcttcttcagatgtcggagatactctgggaggtactctgcatgaaaggctgttaggaactgttcccaagtaactggaacggacagggtggtctgcttgagttcctaccagcagtctgcctctcccactagcatgtaggtagtaaaggtgaccttctactcagaagtcacccctaaagtcttgaaggctttctccgtctttgccaaccagtactcagcatcttcaaaagatgatccctctgcaaaagtggatgggtttagtctcttgtacctctctatgtaatccgggtcaatcgtgggaggaactggatcccgtggaaaagggactgggttaggatgatggtaggctgaggggccctgtggtggtccttgttgatacggcgggggcactggattatactgtggtgctggtaccaggtggtactgtggaggagcagggccataccagggtggctcaggatcctctcactgtagtggtggctcaacctgtggcagcgggggagggttaggaagctccctcctctcctctcagccctgttgggccgcaatgagtctttctaatatctcaaataccctttccacgtcttccctgagcgaaccctcccgggctgctcggtttagtgggggtcttcctcttctcatttctctgtacctgcatttcacaaggaatagttgagtgataatttattgtttggtgtttctctaagtattattgtgtaagggacgggtccgaggaacgcggctctgataccaactgtaacgaccctagaaatttaaaaagaaatgcatataataatttgagtgcagaagcgaaataaaggttaaggttaacatttcttacacgataattcaaaagtactaacaaatattacggaacaaattctctgaaagaaatacgaaaaatagaaaaaaaataaaggaaactataaagtatctagcatctactcgtaactttcttgcggatcgggcttgggaaccgggtcctcctgatctgaaatggttaaataaggagtgagttatactaacccagtaagaatatcacactatatcgctgtcacaaaaataaaggttggtagaaaatcaaaacaactaatagagtagtaaattcaaatagattcgtttatcataaataaaatcatttacaattcacttatcaatgtggaatttatgaaaacaatttataaaagcaataatatcatacggatcacaatttcatgcataattaataacatagaacatatcataaattcgtattcattaacaataattgatcattaccacttctcgtttcactagcttactagtatccatggggatccacaggggtgtcatcgttacacgtaaaccattttccttaacaatcttaattccagggccgtctccataccccgtccgatatgagcaccaagacattaaatctcaatatcccgtccggtatgagggtgaagcaggccgtccccatatccagttcggtatgagcgccaaatgaccaagtctccataccccgtccggtatgagacaatgttcacggtagggttccctatgaacccaatctttccaccatctcccaggatatctaatgagattgtcaccttatccatttatcagatcacatctcattcctgtttgttcttaatctccgtcaccaaatcaaacataaatacataaacaagtaacatgtatccaacaatgcaatcatatcttaaattcccaaaatcaaacaatagtgaagtaagcactgatacatgcatttaaaatcacagaatagataaaccagataccataatgcatttaaactgtaaaataaatcaaacaggaatcgatagaaaataatgtctggctcgggctccattagcaaccgtaattaattatgtatatctatttaatttgtacagaatacagtattattatttattcaaacttcacatctatgataggaaatagggtgaggagttcttacttgattcggcgccgaaaattagatgcttactgcgcctacgagcgatccccgggttccctgaaatttctttcgggaactgaaacgcgattacggtacctacaagtatctcaaataaatccaaaaatcagacctagggcctactcggctaatttcggaatttcgacacagcggctctgccatgctctcgcaacgtcgccgccgcctgcggcggcgatccgcctcaggttggctgttttcagccgtttttagccgaacttgcaccgattcctgcgagaaaacacacttagggccctcagtaggccgaaagaacgcaaaaaaccgaaacttgccaacggtggggctctccggtgcggcggctcctctggctcacgttgcggttgggtgttttgcttcggttaatctgtagagaaggaaacggtggtcacaacagtggaaaaattacatcgaacgtgaatcgggaagggcctcatcagaggcatttttcgaaacaccccgcagcggcgcctctgagctttggcggcgttttcgggacaatcgactggttctttcactccgatttggccatgagtgtgtttaaaattgaatttcgtgcaagaggagaaaattttatctcgtttggcgatcaaaaattgctccggtacagcggctggtggcggcggtcggctccccggcggctgggctgtcttctccggcgaggggttctggcgggtaagcttagggtttgggtgcggatgaggttatttatatctatctgcttttgatctgggccgtccatcgcttttaatctgaaccgtccgattgcgattaaatatggagtgaatctgggtcgttcatcgcgattcaatctgggccgtccgtgcgcgattcaatctaggccgtccgtgcgcatttttgatctgagccatccgtgcacgcgggaacggatctcaaccgtttgatcgcgtgcacgcggatcacccaggtggctccccccgtgtggtctcctgcgttagcgcctctgccacctggcgcgtcctggttggtcggggctgctgaccaggcagctgacgtggcgtaactgttttaaattgcgttttgaccctcagttttcgatttttctttcaaaaatacccccaaaactcaaattttcacccctttatctaaaattgtttttaattaaatctctaactaatttctctaccaatttttattattattattattattattttcattaaattaaattaaaataaattaaaattatataaataataattaaataaaaataaaaattaattaaatattggttgttacaggttttcttactaattttgtttttggtgcaactcctcaatccttttttctttcttttgtttggatagcagaaagatataaattgtgcattttgtacttcccatgcaatacacttctcaacaagaaccctcactttctagtcaatcaaaattctccaagacaagcatccatttgtcccttctagcctaaggatcccaagcttccttttggccccttatttcaacatggattttacttgctgtaaattcttagaaatcctaaaactagcatacttttccatttgggactcatactaccgtccaagaagccgtaaaccatttatttccaaaactgaatggacaagtcctctaattgatgctactgctttcttagcacaaaggaaactgaacaaagtggactaggctgcagtttttgatctagactaagaattgagagtatccataaacatgaaagctattaattttgaaaaaagaatggtctctccctcaagttggaccaagtctgtctcccatcaaataaaagaagatcaatgagattgatccgacatctccatagactccttagcatccttttgagagaaagacttcaatctctcatgggtgtaaaaaccatctgaacatcattctcaaccacccatgagaaatcaatcgaccctggagtttctccagatcattccataacaacttcctccccagcctcttccctttgtcatatatccttctgagcactcaacttaaacgaggcaacctaaatcttaaaagaatatcggacaaaccccctgcactaatcaaccaactccaatttgctttatttcatcccacaacacaacagtaccactggaacatcccccaccttgcttcgttccagtctgtctcccttattatagttcaccatactgagaagcatcttaaattccctccccgtactcactctgacttcttaccctgtgatttaagagatttttccccctaaatctttctgttacccttgatatccctaaatagttaaatagtttgatccttaaacctgtcgaaaatagatggctaatccttcatgaaccattgagaaccctcaatccaaaaagttagcaacaacaatatagcatccgaaacctctagttccctttcaacagcctagtgccacaccaaattattttcttcaaataatcgtgtagtttattatggcattctaacttactgcatttgttttttttcagttgaaaagatatacttgttattataatgaatcgtaatcttccaatcagcaagcctcagttcatcacataaactatagaatttctagtgcttcagaagaatattgacacaaattcattaatgtagataataattagatattgtgtttttgatattaggttcggtcaaacactttgggagctgttggcttcct

SEQ ID NO: 8642 - DNA, 7667 bp, Carica papaya
  Intron number 15 from transcript evm.model.supercontig_91. 7 (locus evm.TU.supercontig_91.7) derived from phytozome v 7.0 (chr-ID supercontig_91; pos 67129 to 74795 reverse str and)
cctcaacgaggaaaatctcccagccctcaggtaacatgagctatttgttcttaagttttagttgtgatgcggttgaaagttaatgtatctggagatagggacatcatttaaattttgagcttctatgtagatacttttggaattttttttattttttttttgtgaattatgagggattgagtctggcttcatgggtaagtcaaaggaatttgttaaatggaaaaggtaactgttctgtaatgtctccactttaggttttaatcaagacttgtttttttttttttctctgcaaaaggatatccttttcatagttccattaaattatcttttacatgctcgtttacctgtgtggagtcaaaggtaatacccggaatttaatttgtaatattgaaattaatatatataatttaaattttatttttttaattattatttaatgtaaaaatggagaaaattaaatagaagatgaaattgaaaatgcttttgaaaaaaatgagtgaaaattagggttttgggggtatttttgaaagaaaatttagaaactgggggtcaaaacgtaatttaaaaaaattgtgccacacaggatgcctatttagcaaccccgatgaaccggagcgcgcctgtggcaagggatgctggcgcggtaccacgcgggaggccatgcgggcgatccgcgtgcccgcaatcggacggtccagattcgttcccgcgcgcacggatggtctggatccattcccttctcaaacgtgattggacggtcagattcaaacgcgatgaacagttcatatctattttctatttaaacgcgataggacgacccagatcaaatcgcaatgaaccgctcagattcactccctatttaattgcgattggacggttcagatcaaacatgatggatgacctaaattaaaaagtgacggatataaataactcttttcacaccaaaccctaactctagccgctagatacgccgccggagaagaagagccaaccgccaggaaggaagtcgcctgccacccggcgtcatgctggagccacttccgaccgccagaagaggtaaagaaaaatttttttactcaaaattcgattttaaacacccccatggccaactcgtagcaaaaggaccaacaaattagccgaaaactacgaacaaagtctggcaacgccaccgcgggaaaatacaaaaaatgcctccgatgaggctcttctcaattcccgttttgcgtaattcttctaccattgtaatcaccgtttccttttctacaaattgaccgaaacaaaacacccaaccgcgaaggtgagccggtggagccgctgtaccggagaactccgccgccggtaagtttcggttttttgatttttttcggccaaccgaagctcattaaggtgttttctcgtagagattgatacacaaaaacaactaacccaaggcaaaccgccgccgcgggcgataatatcgtcgccagagcgcagcggagccgccgtgcaagaattctgaaattggcgaaaaagagatcctaatattgattttgggttttttgggatatttctacatacttgaagtgcgttttaattctcgaaagaaaattcagagaacccgagaaccgccagtaggcatagtcaaaagtttagcatttcggatatcaatttgagtaaaaatccatcaccttattctctgttatggaattgaagtttaattaataataatacggtatcttgtgtaatttaaaaaatatatataattaattacaggttactaatggacgcaaaatcggaagttattcactattggccatgttgattgattttacagtttgaatgtataataatacctgattgattaattttatagttttgaatgcatgtattgcttatcttatgtgattacagttaaattaggaaactgagatgcgattgtattcctttgatgcatgttttgtttgttttatgtgattacaattgaaatggggaaactaaatattaaaggtaaacgaaaaattgtttaattaagtgaatggatgaaacgacagccttactagatatattgggagatggtggactgatcgggtacatagggaatcctaccgtgaacattgtctcataccggatggggtatgaggacggtccgtttcactctcataccggacggggtatggggatggccgttaattgaaaatgttaaaggaaaagggttcacgcgtagtggggatatccctatgaaccctcacggataccagcagtctgataaaagggaaaattgtcattccaatcgattgcatataaaatcatgatatgtattatgttattgtttttataagttgtttttgtaaatctcggtaccataaatagacggtaaatgattttatttatgataaacaaatttgattaattaagagctctattagttgtttttatgatttctactaactttcatttatgtgtcagtgagtagcttgatatttttactgagttagtgtagcttattctttcattaactatttcatatcaataggatcaggatttagagcccgatccacaagagagttgcgaatagaacattcagtttgtttacttttaatttatttgtttggttagttgtttttttagaagggttattcccgtaaggcatatttggtactttcagttattgtgtaaaaaatgtaaaacctaattatttattttatttccccactaaatttaaaatttttggagtcgttacaggtacttcttggacaaaaatgatagcaatgattgtgcttccagagttcctccagaaatttcatttattaatttatgaaaatgaagtgttcttttagaatttgttgttttactagtaatttgtttggtgcaagtttgcacgatcattcagttcctatttttttgactgactaatgcccgtaaaatatttttgtctaaaacatgtttttgactgacgaaatggcctttataatggtacggtcagcattttggggttcaatcttaacacagatcattcagttcttatgtctttttatctgaacatgcatttaaaacagttctgtgtctatgtttttgaaaattcataactaaatttttgttttactgaatttttattcatgatgcttaatttacaacaggtaaatatatataggagaacattagatagaattttaataggaaactatatgtaaagcagtccctaaaaagaaaataacttccaatagtggaattcaactacaattatattctatagacagatttctatgaagataccaccaatccgtataggaattgaacttctacaagaagtcagattccaacatttccactcaagttggtttagagatgttgaacaaacaaggttggaactcattctttgaaagctttcctatgtaatgtcttggtgaaaatatctgttgtttgatggcaagactaaatgtgtcataagaatagtactcttgactttatcttccctttagcaaagtgtctatcaatctctacatgtttagttcgatcatgatgaattgagtttttgccatacttattgtgcgttgattgtcacataacatttccataggctctaaagagataattcttaattcactcagtacctttttattgtcatattccttcacagatacaatgtactagagctctaaattcagtatcaacactacttcttgatactacagattgcttattgtttctccaaataactagattttcccagatgtatgtatagtatctagaattggatcttatattagttatataaccagcccaatctgcacgagtatatatttcaatttcttggtttttggtttttttttaaagcaatcattgtctagttgtaattttcaaatatttaagaattcaaaacactatcgccatatggtcttcagttgagttattcgtgaattgacgtaccatagtgacagcaaactaatatctggtctaatatgtgaaaaataaattaatttacctactaaaagttggtattttttttgtcaaccggagcattgtcaatttacttcccagattaatgttgggattcatgagtgtctgtgggtttgcattcaaacatttcagtctcttctagaagatctaacacatttttgttgagaaactgatattcctttccttaacctaataatttccatttctaagaagtatttgagattccgtaggttttaaatttcaaattctttagttaagaacttttttagtttgaatgtcttttttgtatcatccccctataattatcatattatttacatatacgataagaattgtcatttttctcgaatgatcatacttcacaaaagattatgatctatttggcattcgttatattcaaagttcttgattatcttaataaatttgtcaaaccatattttttgagattgtatgagtttatagagggactttttgagtctgcagacctgtatgtctgtgacttgacatttcaaaggcaagtggtccctccgtatagacttcttccttcagttctcttttaagaaatgtattcttcacatctagttaaagtaatggtcaatctagattggcagctagatgcataaatatcgtaactgtcttaagtttcactactggtgcaaatatctcctaataattgattccatatgattgagtacccttttactactaattgagctttgaacttgttgatgttaccctcaatattatgcttgattgtaagcacgcatttacagctggttaggtgtttccctggtagtaattctgttatttcctttgggtactcttaatgcttcatgtatcatgcttagtatttgtattttatcaatattgcttacaaatttctaataagttgatgacagacttttgtatgaaacaaaattgtgatttggatgctcaatacatgctcttttttgtttttttagagtaatagatttatttacacatagattaccaagggagagatctgaatttagattacttgaagtatttagtgatgttggatctagattcaggttagactcatgactctgattaggtggttgtggttctttctcttcttagttcttgttcctctagtatagatccgaagttcaggttttttagtgtggtgagtaggttcaggtccaagtgtctcatctcgatctatgtgttttggagactgaataaatttaattagaggaggaagaagatatggttgagtcccaaaattgggatcttatgtattcttctccccctaaataccaattttataatatgacttgttttcaagaaatgtgacatccatgaagttatagaacttttgggtaactagtgaataacactagcacttatttcccttttgatttgatgagtacccacgaaaatgcattttattaatttaggtttggtttgtttctttgatggttacatatgtgaacaaaagttgaacaatcaaagactttgatagataaggtaaatagaaatcgagtggtcggagaatattatagcataacttggtagggtatttgaaacttaagaacccaagaagacatttcatttataaggtaagtcgcaattagaatagcttttatgcagaaaaattttaggactttagttgtgaacatgagggaccagaaaacatttaagagatgtttattctttattcggctatcccatttttgttgggggtatcaacacataaattttaatgaacaatcccctctttctttaaggtacatctccaactcttttccaaagtattattttgcattatatatcttcaatcacttatatttttgtcttgaattgagtttgtatcatgttgttgaattttctgaatatatggtcaacttctaatttttctttcatgagaagtaactatgtaattcttgtatgatcatctacaaagaatataaatcatctaatatggtgatattattgattttagatggtatataccatagcaaatagtttggagactttgtacgataatatggaatatataataagagtatattttaacaattgacgtacttcacaacgaaagctttttgaattttttttttttctaaataaagaagaaaataatttttgaagatatacacagtttgggtgtcctaatcgataatatcataacataattgtattaagattatctaagttggactgttttgaaactctacacatgctgcattataggatcatctcttaaaaaatccattatgcttgaaaagaaagagtctgcagcacactttagcattgttagtcatcctcctcgaatctaaactcctcaaattcacataagtttgaggattagcaatatagttatgattgggtaagtttgcttgctgataacaagttgcaatctaaattaggttacacctattccagccattcttgaatgagattcatttgctatttatacggtaaaattctcactacatgaattatattcttaaaataatgttttatttcccgttatgtggtggatgcccttaagtcaatgatccaactatcttgatctcctgaaataacattaagagcactaaatgaattacctctttgggttgttttctcaaatcctatcttgttgttaatggagttttgatgttggaacactttttataaggtttctatctactccttcccgaattagcaagattccataatcgagatagcttcatcaattgggacatgagttctcttattttctttgtctgtaactgattttgtagtcttcaaatcagctagttttctatcaattttccagcaattttttcgagtatgatttgattttctacaatgatcacaccaacggtaaaaatttctgatatggttcctttactcgagtagaattactcgattgcttcccgaattttgtttgcggtccggtacaacaagaaattctcaccgatatcatttgtcatgaagctaattagccacagcatgatcagattattctttgctttctaagttcagaactttggatttccggcgcttgttttggtgacttatccagtgaaaaatcagtgaaatatttttctctccctcttctgcagataaacattttgaccgattgaggccattgaatgtatttatttccgtttaacttgtgactggtaatcgaaatttgagcggctttcaattcagattgtttgatgaaaataattttatcagatcgagatatgactttagagaggtcattggttcttaccgtggtcattctgtatttgatcatcaagaaaagagagagaaaaagaaaaaagtttctttagggttcggaaaacaggactatgatattatgaaaattttctatttattgaatttttattcataatacttaatttacagcaattgaatatatataagagacaattaaagaaagttttagtaagaaactggatacaaatcagtcccgcaaaaggaaaagaacttccagttataaaagttgactatgattctgctttataggaaaatttctctagacattccgatctgtataggaattggatttatacaaaaagttggattcctacagcttcatctttcttttgttcaagttaagaatttcattgttggttgtgatgttctcaaactagagatggtttaatttgtgattcaagtaaatgttctgaaatagcattaacagtaactttatgctgtctttgtttatttttgtatttgcagttaaatcagctgaagttgaaaaggag

SEQ ID NO: 8643 - DNA, 3100 bp, Carica papaya
  Intron number 4 from transcript evm.model.supercontig_13.6 6 (locus evm.TU.supercontig_13.66) derived from phytozome v7.0 (chr-ID supercontig_13; pos 752813 to 755912 reverse strand)
ctgttttaccactaccagtagcatccactaaaaaggtacaacgttagtttctaattatactgtacaaaatcattattactttatgcagatagtaataattggaacttgatatagtttttccaagcatgagatgttagttgatgttggaatattttaaccctcctggtccagggtcatgcttaatattcccaagtattaacctctcctaggaaaaggtttatgcaagtggttgctaaccttttctttccacatgctagcctattgctaataagcatgtgtcatgcttataaactttctaaatcataactgatgttttgtcctgattctgtgtgagtgcaacagtgtcatttattacttctatttgttgactcgatatagtttatcttggttttttgtctcttgacaattcatgttctttgatttgatgcataaataggaaggatcaaggctttgcgagcttggaattgtgctctgatttgtgatacttataacatggtattaatttatgaaggaataaaaagggattcctgatattaaaaggacttttcaagaagtctattctctttttgctaaaattagaggtcattggttcctgaaattctattgttgtttaatggtcatcctctttcttcaaaagaggatttatagtacttgcttgacaagttgactagctcgtatccctttcttctgttatatgcgtgacacagtgtcttcgggctttctctgtggtatgcatatttttgttcttgtaaaagggcattccaaaggcaatgggatgtttgtcacggtacattcccttctggtctgctggtgcttcatttatgaaaatattgggaaatttccgtggaaaataaatatttgtgaggtttgttgcacaaagtgatcatcacatcacatagatggagtgacaatctgattcacccagaacccaactgggactgtgacctccaatgtgttacaatagtatgatatgaatatgacttgctgaatccaaacaacttcagtttggaagggctggaaactttaagctcatgaacctgggttgacttgaactcggattgaaatgctgttagatgattaatacatgaaacaaccaaaactaagaaagatctctctaggtgatttgatgactgcactctgttgtaacaagacatgaaacaatccaatcagaaattatttttgcagtcctatgaatagttattgcagtggtaccatatcatctttgaaagttttttagataatctagaaccacacatgggtggaatattacctttttcttctgtttttatatgatgtatatttcactctaatgagccagcaaaatttttctggtgcggctccatcatagattcttggtcttgatgagaacgaatgccctgaaagccaactcctcttttacttggaaatggtaatctgaaacattttatttgaatatgctgggcttgatggatgttttgaaactccaactaatcctcttattaatgttgaagagtggacaagtttccatcaattaatcacataggcaataaatcagtcattactaaatacacaaggacaattaaaaagctcacctttgagcaactttgtgcaagtacggagatacctcaatcagggaaatacaggaaagaaagctctcccttctcggcaccatgttttaacttttaaaacctcttaatgacagcaagatattgaactggtaaatatatacatataaatgtatatatatatatatatatatatacattagacagaagaaatcaagtaggtataggactattcccatacaagcatagttggaaagtgaatgcccctccaaggatagttttcttcacttgggaagctgttgcgggtgcatattaactattgatacgctaatgaaaagggggagactttggttaattggtgttgtctgcgcaagagattggaggagatttgcggccatattctgctttgatgccccatttcatacagcctatggtctaccgcttttgggatcctgggttatagttgggttttggttggctctgttaaggaagaggtgtaagcttggaaggatattaccagtaggaagaaatagttggggcttattctgttggcgattttttgggttgtatggaaggaaaggaatgagaagatctttgagggggtggaggaggggcttgataaaattagagaaagatggttttaaaaccttggtgttttgattttaaatcaaatgctgtattataggaagaatcttgaggaactaattgatatgctaattaaattgtaaatatttttgtacatggattgcatccccttggtgcttatatataatacttatacattttatttaaaaaaaaaagtaagtataggatcaagtatagatagatatgaagatacaccgattctgttaatttcaacctcaatatcattaacatggaaggtaattaggagaatggtcaatgtctttatttaagcagtcagtatattttccctggatgggatattattcaaaaaaattgactattaattcgaccttgcacaagaagttctttttccttttataatttcttgccaagttattcgtttgtttgaacaagcatatggaggtgataaataatagaacttatctgtgcaaaactacccatattataagttcattccttgtagtgtctttacgaaaaagtgaatggcaacttgtcctcagcattcggcatgtggtgccctgcttggttatgctgcacttgatttgtgtaatctctcacatggcaaataaaaaatagcactatgtcttctgattaattatctcatagctactgatcttgattccaaagctcttcttctacttatcattgttggtatttcaaattcaatagtttgtctaagagagaacactcatccaaaagtcatacagtagtttgtatgcggcgtcttctgggcatttacttctatgggtgtagcatctgtaaacaactacaaactacaggaattgcattgttttttttatttattatcttagcacataggtattatgggaatgtgattctaacttatgttttatgttctctacgtgttttccttagtcaagccgagctctagtaagcacacacctccgtaa

SEQ ID NO: 8644 - DNA, 2106 bp, Carica papaya
  Intron number 9 from transcript evm.model.supercontig_58.2 5 (locus evm.TU.supercontig_58.25) derived from phytozome v7.0 (chr-ID supercontig_58; pos 326356 to 328461)
caagtattgactccttctacgagtatctcctgaaggttagtaaactgatgtctcctagaaacatagcgatttaattttagtgagggaaaacctcaatttgttattgatgtggtcattgcataacatttatttctaggtttagggatggatgtcaatgagaggtccatgattaatggggctttgaggttgtgtgttatgaacgcatttgtagggcataaatatggaaggcaaaacaatgactaaataggatagtgaagttcaattacatatggaaacgtaattagtattagatttttaaataattgaaattctaattagtattacattccgaaatagttagaattataattaatattaaatttctaaattatatataattttctattagtattagattcttaaatagtataagatttttaatattttaataaagtatttctaattagatttagatttctaatgagattgaaatttttaaataagaattataatctctatataaaggagtatgtttgttgttaataaaagtaaatcataatattattttaaactacgagattggaggtttctctaacgagattcaaggtatcaactccctttgatgagttgtaatctattttcacaaaaataggttgctctcgcaataaaaataaggatgttaaccctttgttagaagacgattttgttgttaaccatcaattgacaagatcttggtcctgaaatcatcgcattgtggtataattaggactggattgtttgcttttaagaaattacaaatgtatccttatataataagcaccatcgtcaattcatttcggcctcttaacagattttaagacatggttaaatgtgttatataacatatcatgtaactgtaaagtaacaaaaagctgcaatgcaataaacaattcacccttgcataaacacagagaagggactgaggtctcagttcagatggtgagggagaagtaatgatgagagtacaagaaaaagtatggtgtgaacaggtatgtagtgtgacgagaaaaagttggcattttagtcttttaaaattttttattagggtgagattagcattttagtcttttaaaaattttcatcagggtgagattagcattttagtgttttcaaaattttcgttagggtgagatcacaaatgggctagatttttattcttaaaaaagaaagacttaattgtagttgtggtcaaatctcaagaatcttcatacattttacccagcaccagagtctttcttttcttcatcagcttacctggtctgagttaattttgaatttccaaaacatttaaaaatatggagaatgattttgttttaaaatatggtcggctttcaagccacatggagaaagttagtgtcattagccttattttaattctaaattaagttctccaactttggttgattataaaagacgccaagtctttgagtcttttattgtcctttcttaaaatctctgaaagctaaatttgcacaggaaagacgagctaatttatgcacactatatcacaaaggtacttgttgatttttgcattaaatttcaatattattcagttcttcacataatgaacatcatacacttcaatcaagagccctgttttgctctgaagtaacttgtccactttagtggtgagatgggttgctcatggtattgtcattttagattcataactactgtcttttagtttgctgatgcttctgtctccaccacagacctttagagttattatctgtaattatatggtgtgaaccaacataactattatgagtttcttttgttttgctcatctaaaactgtgattcgtctgattccaccttttctgtccccctagattttcttaaaggcttttcagatcagaagataaggaaaaaataatgtaaatggtcagtaatcaaagatgcatgttcaaacaatcatcaataatttcaacatggaccagaaaatggcccaggagtatcaataggatttgagtgaaatttgaagtaaacctttcttgcattttaaactttgtttatttccacttacttgttcatcaatcatgacattatttcaggcatatttgttgtttggagacgaagaatatttatt

SEQ ID NO: 8645 - DNA, 522 bp, Carica papaya
  Intron number 4 from transcript evm.model.supercontig_16.4 0 (locus evm.TU.supercontig_16.40) derived from phytozome v7.0 (chr-ID supercontig_16; pos 822394 to 822915)
gttagcagatcataaaccggtttgttcttttctttttacggaatttatagattcacttccaattatttgattatgtaacagtccatacctgtagctttttttgacactcaatacctttgatttagtagatagtaatttttagaagaaatctatacatggtgttcttataaaaatgtacgcatggaagttcaacataaataaatcaaattaagaaaagaaacctcgaaaatattggaaaagaagagttaattttatagcaaaacaacatggtactagagcgtagtttaccatttttggattcttggaacttataaatgattttggattttacttggagatcaaacttgcaatcatacgtcaaatcaaagttttatttttcggtttgacaggtttttttttaaactgttttcttcgaaaatatggcaaatgtttttaaattttctaaacattatgccatgtttgccttcctgcatcctataattgttacctactctctgaagcattataactgttaataggaga

SEQ ID NO: 8646 - DNA, 1540 bp, Carica papaya
  Intron number 7 from transcript evm.model.supercontig_16.1 56 (locus evm.TU.supercontig_16.156) derived from phytozom e v7.0 (chr-ID supercontig_16; pos 2347406 to 2348945 reve rse strand)
tctcatccatgtgagtgatttgtgtcaagaatgtttgtgtgaatattttactgaatatcacatctctatgtatatgcaacctttgtagaatagaaaaggaaataaaccgttaattacattaattacgtaaagtgtattttaccctaattatatattttctttaatgctccccatcaagctggagaatatatatcaatcctcagcttgccaattataaaggtatcaaaatgtcaataatgttcctgttgattttagaggaaaaaaaataattttatttctcccattttagattgttacacttagggtatttataaaacttttaatttaaaaatacaaaaagtcttattgtactataattctatttataggagataattattcttatagaattctaattgcataatatcaaataataaattaaaataattaaatgataaaatatggtagtcaactcctcctctcaagttgctgcagagagattggacatgtctaatttgcagaccaagttctgaaaagtcattttgtagtttaccagtgtcaatcatcttccttgtttgaagatcctgattttactagatttgatgcacctatagctgatgaagagttaaattgagacagaatacgcttcaggttttaaattttttcgattgaaaatgctcaaactgttggtgtatcagatgtttcacttccgcaaccaaatttttttgagttcttgtaggtccacatttgcttttttaaagacttctagttagtttttcgtacaactttcaataagttttctagtgtgttttggcttgtcacagtagtcaaacttccgtagatctttggattggtcagagtgagtaattaattcagctttttcaactagtgctatgtaactcgtatctaatcatattcggtgtccaaatcaccataatccacccagtttgaaaaaatattgagaaacaattatctcttcttgtcttgtgccatgaatcttatttcagagtttataaatttgagtattattatcgcgtgtgagtatgtaagagatgatgcatttcatattttttcaacaatatcaagcaacagatatgttcagtcaatataagattacatgaaattaatgagttaggacattatcaaggagttttcagaatctcatctgttatattccaaattaattacatcaaattttttcatatcatctgcaatgtacgtctgcaattctctaattttgataaataataaataatattttgactaactaaggtaattatttccatcaagttttacgaaattaatttgtaataaggggttatccgaataaaaaatcatcaattttttgcttttgtcattttagagtcttagaaacagggaaaaataatacccagtaaggaagaacaaacctctaatcagcacaaaggatgccaaaaaagtgttgtaaattagaattagatttgttaggcatcagctccactcgggcttggctcaaaacgactcgatctcaactcaaaaatggctagatctcggttcaaacaaggctcaaagtcggctcaaa

SEQ ID NO: 8647 - DNA, 7187 bp, Carica papaya
  Intron number 5 from transcript evm.model.supercontig_74.2 (locus evm.TU.supercontig_74.2) derived from phytozome v7 .0 (chr-ID supercontig_74; pos 13761 to 20947 reverse stra nd)
agcttgcaaggcggctaaaggtaatcaacgcatttatcagttattcttcagttgttcatcatattaggaaaatctatacaatcgtgttccctctttttagcatatgcctagaatttggtaggtaaaaccatgtcaccttgttgcctaagtgtctattttatgccttatttgtttactccaaggatgaaaagtgcttagaagaaccttctctgatgtttctttcttgggaaagctgccttccttagtaaatggaaagtatatatgaatgtcaaaatgtaaatctaagaagtataaaaaaggactttatcttttacttttaatattaaaaaggccagaggcctttggtctcaatagcacttacctttgataaccaccctcttaggtgaggacggtaataggggtttgagctccacttatggctttcctcttcacaaagaaaaagaattaataggtttcttttgtgctactgttgtctaatataaagtttattattggagtgtttgaaaattgcttctttattcttaataagttgctttaataagcatatcccaatattctcacttggtaacataagtagggtatctgtgagttgctataagaaccaggggaaacaccctctatcgaagattgttggaggtcttatatgtgcaactttcaacagtaggaatgtgtgctgggcattctcatacctatggcatgatagcttttgctaatttataacctctgagttgaaaagacagtttgttgattttagcttcctgtatagttaattgatgtacgttatacgttgacgcttatccaatattcttttttccttggcttgcttgctttttgggtttgagtttactttgttgacatgaacctttgatgtggtcgattgatttaccttgatttatttgccttgatgagtatgagcttacattgttggtgacttagttgattgatttacttgccttttgccttcttgagcttcagtttattttgtcagttgcttagctggctgattatcttgattttctgcctacctaagctctggtttacaatattgaccacttagtcaggcaattatgttcgcttcccattttatgggtctgagcttgcattgttaattgattttctttggcattttaccttttgagttggggtttacatgggcatcctgccacttgaattcaggttagtttgtcccttgtctctcttatccaacttgttgatttgtttagtttctcattctcattggttttacctgttcagttattgctttcctcttggttccatggttaatttttgttccagttttggctttcaacctttttgcttacttattctagatgtctttcttgatttttttttatttccttcatacttgattttacgattggttctagtcttggcttccatctttccattttctgtcttttgtcctgtacttgggttctggatccctaagtattttccttgatctctttatgcttttaccattctagtcctttggtttttacaacttaggctttatgattttcaattcattctaattttcttggagttcttgtctttctatcttgatagtcttagagtttagtacttctcatattccttgtatcttctataaatttgttgtttgtactgtgtcaagaaccagctcaatagcaggaaagaacaaggaataaaattttgcttctgttagtataattaattctgttaaattaattctagaattctacattttttttggtatactcaaaagacataggacggctttagtgtacctggagaataatattactgtcactaaccatctataattggctgcagtaaccctataaatgttaggcgtaaactgataggagtaaagaaatatcagaaaatatctagtcaacgtcgtccctcttttccttctttcaactgtaaggagacgagtgcaaggagaagaaaacgtaactgggagcagagaattgaagtcgctgcaggtatatgagtggaaaacagctggcgaggcatgatccagaaaagacagggacacatggcaaccatccagcaaaaacagggacgcgtgttgagcttcgggtgggagatgaaagagtgggcgacgtgtcacaaatccgaaagcagacaagcagagacgtggtgcaaattggtgattgaagatgcgtcttccggaagaaaaaatgcgtggtgcatataagaagggatgcgtggtgaaaatccgatcactgaagaagaatttcaagctaaggtaccattttcacttatctagggtttctgggcaccatcttttgggttctccttatcatttcttcgcaaaaattgtttttcttcttgaaatttcgattcgtaatagaaaatccattgagaatttagcatatttggcgaaggaattcatgttttgtagcctataaatacccccagccactataatgaagtcatggtaagaaaatacaagaaatttcagtcttcactcgcaaaattttcagtctctttcttctctgtcttgctctaatttgtctctttttctctctcctgactttctctctttcttctttttctctctctttctttctcaaaattgttgttatgaacctaatacatggttcctatgtgaaagaaagaggaagaaaaagagaaagctgagagagagagagagaaaaagcgagatattagagcaagacggagaagaaagagacccaaaattttgagaccagagactgaaatttcttatattttctttccatgactttcattactatgattcaacggattttctgtttcaaatcgaaatttcaagacaaaaacgcagtttttgcaaagaaacgtgaaagagaacccaaaagacagcacccataaaccctagatgcatgaaaatggttccttagctagaaatttttcctcaatgttaggatttgcaccacgtttcccttcttcaacggtcggatatgcaccatgcattctttcttttggaaaatgtatcttcaatctcagatttatgctacatccccactagtctgcttcaggatttgcgacatgtggcccactctttcatctcccgcctgaagcttgacatacattcttttttttgctggatggttgccacacctccccggctttcttgattgttgccacatgtcctgtcagctgtttttcattcgattcctgcagtgacttcaattctctgctcccagtaccaataaattctaacaaaatattcagaagagaaaattacaggagtagtttttttttatattttttgagtagaaaaaatactatatattcacagaatactagtggcatgcaacttgtatacaaaattctttacaaatctaacaaaatatcaataatgtcccaagatcctcacaataatatagggtagcctctaataaaaaactttggaatctagtgtctttaaatctgtgaatattagattcaacaccctcaaacccttatattcatttccttccagatggcgaaatggtagcaagcgggataagactaacaatcatcttaccattttgaaatctttgcacacagctccctgatactactgacaataacccagctcactcccagtaaataataaaccacagaccaaaggcgataggcatacaggcactaaaggagaatatgattgcaggtctccgtatcattcttacacgaataatctccatttgctgggatcttacccttttgatcagcctatcttaagtcgaaatcgccctcaaactgcttcccaaacaaaaaaagccaccttgggagtggccttcacttccagaccagcttagatggaaacttaataaaataatcttcattctttgtcaacccaacatacccatatagaataggacggatagtggcaggttagtgggtaatttgcatcactaggcatccatattcctcacctagagagcggacacgttcaacaatagctagagttgttcatgactggaaactactgggattggtttaattctcagtttacattggaaattgtatgtatagaataattcttctccctcttgtgaagagttatttacgtcccttggcatatttgtggctactgtaacccataggagggtgttttccattttctttccttccaaaagcattcaagttatactcttgaaatgatgaatatttactcatggtaaccacactttgttttttacttttccatgtgattaagttacttcttacaagtgtgcaataacctatagttgattttttatcatttagggatccaacccaattggcatctgtaaatgcttctattttaaggtgatcatacttagaaaagaacagattttttcttggtgcatactttatgtatcgtaatatgcggaagatagcatgtaaatgagtttcacgagaattatgcatatactggctcacaagactaactgtatatgctatatcatgtctggtatgtgagagataaatgagtcttccaactagtatctggtatcttcccaagtcaactgatgtaccactaactgcttgcaatttatggttgttctcaataggtgattctgctggtttgcaacccatcatatcagtctgttataataagtttagaatatacttcctttgagaaatgaaaatctctttattggatttgacaacttcaatccccaaaaagtattgcaatttttctaaatcgtttatttcaaactcttgagtaagaagttttttcaaccgaaccatctcttttgtgtcatctctatttatgacactaatagataaaagattatcagaaaaattagacagatgtaaaactgaaaacagtataatagtaaaagtacaattaatggaacatgttaccaatacggggatgtatgactcatctgttatacggactttattccattcagtacaaaaagaataggttaagaattttttaaaggagcctattgtgtgtctgttagatatagaatctataatccaattatcaggagttgaaatatggtgaacaatacctgattttaccatatttgatgtgcaaacagttgatgaagagtttagttgattcagaatgtgcttcagattttgaattttttctatggaaaaggctccaacggatggtgaattaggtatttccctaacttcaacaaaatttatttgagctcttgtggttccacatcttcttccttcctgacctctaattggtctttcatgcaacttccaacaagttttcctaatgtgtcttgacttgctacaatagtcacttttcaatatatctctggatttattagactggcaactaatccagtcttttcaactggtgcaatgtaaagcatgatatttcttctactcttttcttactgaacataagtataagtttgttctaatgaagcaaagagatccttacaaagcacttggaccgtatttaataatattcggtattcagatcaggtaaaaaattataaattcgctctttttctatcaatttttaaaatgtaactgcatttgcatgacactctacttgaaaatcttgataataatttaactcctgtcataattcattcagttcaaaaaaatattgaaaaatagtcatctctcattgctttgtgtcatgaactttatttcggaattcataaatttgggcgtcattatctatctatgaaaatgtaagagatgttgtatttcatattttttcagcagtgttaagcaacatatatgttctggcaatatggagttacatggaatttatgagtcatgacattaccaatgagctctcagagtctcatctattatattctaaattatcaacatctggttttttcgcctcactagtaatgtaaccctgcagtcctctatatttgatgaacaataaataagatctcgaccaagcaaaataattagtttcattaagttttataagattgatttgtaatgaaggattatcaaagctagtaacacttattttttttagttttattatcttagaatgttaaaaataagaagaaaaaatacctagtaatgaaaaagagacctcctatctgcaccaaagagccaaaaaaaaccaaaaaaagggaaaaaaaagacaaaaaaaaatggaactagatttggctcggctcggcttggcaccggctcggatgcagacagttctacttaggcacggacggaccaagtcagagtggtttggcgcgcggagtggctataccagacatcctgtgcgcagaaaaacggactggcgcgagggaggggctctattcggtcaatgcagcacgactaagcacgcgactagagcaacgtggtgtgtaggaggatcggtcgacccgtctccaaacacggatcggccggatcgaagtggcagagggcacagaatgatagatcttccgaacgcacgcagccgcatgaaaaaaaggtcagataatcgcgatcaagctagattttgtgcggaagggaatcagatttgtctcaatcggacttttctggcagtattccaccatttttcggatcgaatgggatgaagccagctgcgcgtgtggctcacgcacctctgttgccggtggcgcacgacgcgcgcggaaactgtggttgttctggccgaggttaagcagcgactccgtttggatgatgttgggtttggtttctttagtagttgagtactaactttggtctattttgtttattctatgattttttttaaaaccttaaaatagctttcttttagttttgatatcatgaaatttttggaaaaaataaatttttaattttattatttattttttatgtttaaatttacaagatatatatagagtgattatttttattgtagttgaacttttattataggatataattatattattagaactttaattaatatagtattttatttaacatgaaattcttgtcaacaatatgtaaaatcaatgcttatgtttttcagtaagttcttttatttaaatatataattgtttatttatttatttaaattaccaccaaattacttttaagttacttaaaacatattctgcttaaaaaacatctgtttcaacaattataaacaccctttacataagattataactaattttacaacacatggaccacgataatatttgattagcacctgccactttggcatgattttgttttttcatgacagcattatctttctggatggagtcttattaagtcccttatttcaagcaggaagacagagcggagatcactgtcaattcacttca

SEQ ID NO: 8648 - DNA, 1588 bp, Carica papaya
  Intron number 1 from transcript evm.model.supercontig_53.1 63 (locus evm.TU.supercontig_53.163) derived from phytozom e v7.0 (chr-ID supercontig_53; pos 1335201 to 1336788 reve rse strand)
acctctcaccaaccattggtattcttttctctctctgattttctttcaagataatgcttgtttcagttattgtttgggtccaaataatcattcaagggatttggtcacttgggtctcaagaatcattcaaggaatttggtgactccacagttgaatgatgaatgctctgtgattttctttcagtttcttttttcctctttggattgactggtcaagcttttagccataaatttaagctagtgatattgtctttaaagtttgtttttctttttctcatttgaagaaccctttttcttttctgggttttgactttttgtgaatcttctaaaagcaccattgagatcctatcatttgctatttctggttttgaataagaaaggtgtatggaaagttccttctgtgtattggcctgtagggatcaggaccagtctacttttttcgattactatattgatattattatcttctatttttcaatttttatattttttatttgattgctattgggaatcttgagctgatggatttcatgtttaccaataagaacttcagaacagtgatggacatatagagggagtaaaggaaaagagaaagcatgaccctagtctctagcaaagcttctcaagatgtggaatttcaatctttgcaatactttttaaaggggtattcagtttttattagagaaaatgatgaattgcaatgcagaagaattgcttgtttggagctcgaggcaactaggattggcttttgttttcatgtgattactgagaagatgtggtcgtttcagtggggggatatgtaggcaggtcaagttttgttgattggtttttagaaatatagggatatggctatgcttcataaggaagtgtagacattgttctgtcaaccaatatcgaataatattttcatatatgttaatattcacatatttcctttttctctgtgctctgctgttaatgctgctatttcaatttgcaacttcggagaatttcattttcttggattgttatgaaatgcattgattgggccttttcaacttgttttagaaactaatgatttgcaaagttatgctctttttagaaaaattagattcgtgtatttaatatcgtgtccttttttgttttattttgtttttaagtaatctatgatcagataaatgcttcattcttttttcgtcagcactgtaaattggaggatttctcatatcagtggagtaaatagaaatgcaggaattttatctcacaaggaattgttttgaatgcaaatacaattatgctctttttggttcagattagctttattttttttctttttccttctgtttttaaaattctataattatggatttctatttccttagtgctcacacatttatgtaatctgaatctaatatagaattagaatattgtttcccaccaaacctttatctaatttttattatattcctattgctattatgagagactaacatttgaaacaatgtagccttagtagtttcagtgccttctagtttaatttctgatggttattgaatttatgatgctgtttcaacaatttataggcgtggattttaaaataaagcagctca

SEQ ID NO: 8649 - DNA, 1352 bp, Carica papaya
  Intron number 5 from transcript evm.model.supercontig_23.1 24 (locus evm.TU.supercontig_23.124) derived from phytozom e v7.0 (chr-ID supercontig_23; pos 1956894 to 1958245 reve rse strand)
ccaccttcaaggtaagctatccttacatagtctgattggttcttgtttgtttaatcaaaatgtcagacacatgatcaaattgagttgataatgagctaacaaatcccattagttgattcttgtttggtagatcaagacaccatccatatgattgtgttgaatgtatgaatgaacaaagaaccaaaaaataccatcttcctggaatgtctttggtatagttaagttgatttagacttatttaaatcaattttacaagtgcatgatcgtgtttacagtcttacagagtctaagttggcttctgctgaggtatgaagaattctcaatcttaatacgaaagaattgggttctctctctgtctcactctctctgtccatccgtggtagatctgattgttgcacataatgcatgatgtggatgtgcacatcttttgttggatactgcctgccaaacccaactcataaggaagacttttattccatacatgaaattgatgtagtgtaattatccatgcaacatacagattaaagtgagagagtagagagagagagaaagaacacaagaattttacctgattctgaaatgcgcctgcatcatgggacctcctatgagatttgccactattgaagaactttctctacaactaggcaggaaaaaacccaaaattacaagaataactggataataaaaagcctgttttgcagattcccatctctttgctggaacctttgtttaacagtattaatatgagccccaactcaacaattttatgcacccatctttttctttaagaactctactgccacgagcttaatcattcaaatggtttgcgagcactattaatcaattcaagtatgataaccatcgtccagattgctatttgcagaatattattaccccttgtttttccagttaaagcatggaattatgagaattattgaatttcttgcttaaaactaatagtaggtcctttacacaagtaaaagatctgttgttattaaaacatccatttatttcaagttaaaatctcagataggaaaaaaatctagcagagggaagaaaataatacttagaaagttagctggtagataaagattacaatcttagaaatgtcttttgtagttcaggattctgataccgtgctcatggcatgggtcggttgacttcagacaacactaaatgctactatattgtagtctagcatttctagttatagatcatcccacctgaaatacttttgaagttgcaccagaaacataacgttatttatcgctggtgttgtctcattacacttactgaggttttaaaactattctgcagacaacaagttggatccgtccgtggcgagggggctt

SEQ ID NO: 8650 - DNA, 1936 bp, Carica papaya
  Intron number 1 from transcript evm.model.supercontig_49.1 49 (locus evm.TU.supercontig_49.149) derived from phytozom e v7.0 (chr-ID supercontig_49; pos 1226617 to 1228552)
tagagctcgaggaggatttcattatccgccataaggttagtgttcttagttttttcactactcggataattaattttggcgtgaatgatctttgtgttttaaggcgagacacgtatattgatggctaaaaactcgagtcagtagatttgcacgaaattgttggtaactcaactcggatttcttaaaatggatggttgctgttgctgcaaccaagaaagggaaaaaagaggaggaattacacgtagtttggcaactggaaaggatattttcattcttttacaattttaatagtatttccaagataattaaatttattatttaaaaaataaaattaaaattacaggtttgttgagtcaaatcatatataatttacttgtataaataattattcataagctctgctaaaaaccaaaattttcaactctaagcttttagtttttttttttattttttgtaaaatgatctccgagcttcttagttgttataaacatatatatatatatatatatatatatattagattagagtttggggagactgaatatattgtggacattaattgtttagttgcagtaataatttaaaaaaaaaattatattttcactattaaaaattaaatcttatttatttagtatgaaaatcttaaagtcatcaaattgcaaaatagagaaataattagcaaaatgctgaaattgtttttagggtaaaccttttgataatcaaatcataatagtttgggaagaatgaactattggaaatattacttttatttttattcaaatattgcaaggtagtatttcaaaatttgaacatcaacatatatagaagtcttatagtgatatcaatcttcaagtaatttcttgtctgagtattgcttgatcctcataagatatttatgctatcagtaatttaagttaatgaagctaacaaagaaatatgaaaattgttcaagttatccatgaattttaaggaataatatctaacttttaagagtcaattcacaaattgaggattgttacgtacttatttcgtatcaagaaatgttgtgagttaatcgttttcgaaaattttttcaaatgaattggcagtttggaaataaattgatttttttgtacgccggtaatattcctaactctaccactgaccattttttatatacattgtaatgagatgaattaacaatgtaggtgcttcaaactaacaatataggtgtttttatttataaaaagaatataatataatatttttaacattgatatttttttatataaaaaatataatatacagatttatgaattaacacataaataaaatgattaataaagtgaattatagattaatatgacattcttatctttacctatctcgacaaataaataggtagaataaattttgatgaagtaatagtattctaacaaaaagataaaaattaataaaatattaaatagataagaataggataagaatatattgttatgttcaatatcatacacaacaaacgcataatctttgctcactttctatttaatgatatatatttgtcttgttttgtaatactttataaatacactaacccagatattattacagtacaacttttctatattaaaagatagtttggtttcctcaataaaaatggcatgattgatgtctagaaagctactgtgattgattataattataatatctttgagaatcctattttttatttttattttcagtaagttatataatacctcaatttctataataaaatatttaatgtagaatcagaaatacaaacaattactaaagagataacaatttgtagattttaagttttaccccagaagaaaaattctagatttaagtgaattaattatttaattatttacagagaattgggatattaattaatgcaggaattacaacaaagaattcagaaagtgaaggaaag

SEQ ID NO: 8651 - DNA, 1451 bp, Carica papaya
  Intron number 2 from transcript evm.TU.contig_24967.4 (loc us evm.TU.contig_24967.4) derived from phytozome v7.0 (chr -ID contig_24967; pos 13591 to 15041 reverse strand)
ctctacggtcagtgccttgctcataaaagatgcaatagtgttgttcagtatttcccttaaaaatgttttggcatgtagaagtccgtctcctaagtcttctattgtttttccttccatttttctttgagggttaatgggaaattgttactccattaatttctgcttacaagtctcatttttagtctcaatttaaagctatggttacgctgttcttttatggctattagcaaacagtttggggtttgaattatgaattaaaatcttaattctttgaattgagagatcagtcacgtacttcttgatataatacttaactgaaatttagatgaaactttagatgtagtattggtattataactaaatcaaattatatattactttcaagcaaacaatgcatgtgaaaattctttaaagcaaaagtatgtatatatttttgttttaaaggttttatagcctatatcatcctaaaaaaataagtgaaaatcaaactcaattatctttctgttgagctacactaatgtgttatttagttatcatatcatgatcatgttcaacatcattgtcattttttgctcatctttccttgctcttgttctccttattctcctttgtaagtactgattacttcgaactgtttctctttaaatagttttcccttttgtgctttattaaaattcaagttccttggtccaatatacaaatacacaattatttcaaaaagtcggcgtggaagctaattaacttaaaagttgagacaaaagctagacaactctattgtacaatctctggttgttaaagtgtactgaatgaacgtttaactaatctggtagcagatcttctgaaaggttttggatgttaataaattagtttcaagtttgctaccatgtgatggggcatgcatgtcctgagaaagacatggatttgacatatgctgctgtttcagatgttcatttaacagatttagaatccaagaagaaatgctgtcatatgtgctgtaaggcattttcttttggtgcggtgttgagttgctttttgattagcatatatgaaattagccaggcatatcatcagtaagtttatcccatagaagtttagattttcattctggttgatatttcatcaacagtatttttatgaaagaactctttgtagtgattgtagcagtctctcctttgcaaatgacatttagctatcagcagaaattagtctatgttttcaaaattccttcaacatgaagcaccttcctggatggtttagtttaaattagctgcaaatttagttttctgagttagggccctacaccattcaataaaattcatcatttttatctcttggtttggttctctggcatttgtttctagaactgtcatttcttactagttctgccgcatctttgtttggaatgatcttttgtaggatcaagacaaagagattcaggaattgacggctga

SEQ ID NO: 8652 - DNA, 919 bp, Carica papaya
  Intron number 3 from transcript evm.TU.contig_28217.3 (loc us evm.TU.contig_28217.3) derived from phytozome v7.0 (chr -ID contig_28217; pos 13983 to 14901 reverse strand)
gagacattctatctatttttcttgctgtccagcttgtaagtataattttttattctccatatgcagtttgttgcattgttttgagaatcatataatttgtgattcaaatttcggtttggttcaatttcaagataatttgaattgtttagataaattgcaatttattaagaataataggtttatcatacgattcaataatggattgcagaaatcgaattgaatggtacttaaatcatgcccgatacaatttggttggatctaaaatatatagaaaataaaaataaaatgaaatatattctttaacttttaggatgattttgacatgagttgaaaaagaggcaaataatctttttgaataaaaaagaagacttcccatttttttctacgctattttctttgaaaacaagtactctttttagttgtctactttattacttgtctaagatttaattgtgaaagaaaattgtaagtatttttgtttgaatagtagatattcatgatagcaaaatctgatttatgaactatgttcttattcacaattcttgattgaaaaaaagaaatagaattttgattcacaatatgaatctcgattcaacaacttgtgaaatgttgctttatgaactattgcttggtttttatcatttctgtatttggactttcttttgactattaataacaacctgtgaaatctgagttatgaccctagttgtaggggtacaatttaatcctatgagctcctctttgcaagaggaaaaagataccactaagacaacagcttggttttttcatttctgtatttggactttctttcgactattagtattttcatcatttatatatgtacttattacatattcttattcatctagtatctattgattcaggtaatagcttcattggggtatttggtgtatttagt

SEQ ID NO: 8653 - DNA, 384 bp, Carica papaya
  Intron number 2 from transcript evm.model.supercontig_58.3 7 (locus evm.TU.supercontig_58.37) derived from phytozome v7.0 (chr-ID supercontig_58; pos 425055 to 425438)
ggtaagcctatatacatatatgcgtctctgtgtatatggatatatagcgccagtatatattaatatcgtctcctgaatcttacaagttacagaatacacatgtatgcattatattttaaagtaacataattaattaattaaaatcttcagaaagttgatatggtttaagtagttcatatatatagcagatttaaaggaaaatagccatgaatttagttagatggcatgagcagtatgcaatggtgagtgtacatgaaattggtttttagacactcataattaatatatatattgtgtataacgaatatatatatatataattgtttgatgtggctgttaatgatatatatatatggatcaataggtaattacggagcgcaaggg

SEQ ID NO: 8654 - DNA, 1549 bp, Carica papaya
  Intron number 1 from transcript evm.model.supercontig_138. 38 (locus evm.TU.supercontig_138.38) derived from phytozom e v7.0 (chr-ID supercontig_138; pos 495720 to 497268)
tcatctccaatctcttccaaaaaggcgaacccctggtattctcacgatttcttctctcttatagcgtgtgattgatctttttttttttttgcgattttcctgtttatttttaattattctaatgattattgtcttgttggctcaataatctgaatactacttttaacctccttcccctgaccgtatatttctacgtgttttctgtattcccgatccctattagtaaagattgataactttctccgatttgcctccatttgtttgaggaaagtaggtattatgtggttttatgatctgttttctctaaataattctgttctttaattttaattggtgattcgagttggtaagcttaattgtggtatttccgttgctaaagtgaggtccctgtacttgctttacgtttatacttagttcaccttttttcacaaggaataactggatagagaagcaaggaatcgtacatacaattttacctcaattattgttagtgcttaaagtttctttttgtaataagtttctcccggtaatgtgggtacttctgaagcagtctatgctccctactgttgttggatgactattgcaaagttgatatgtactatcttatctttttacttacttgcaccctatacaataaaatctttggcttaagttggcataagtttttgttgagataattgaggttgttagttgtggaagtgaggaaaagtaaagggttacttaatatgaattcagttgttcttagctccttattttcccattttcatttttggttgccaaattaacccaactaggcatctaggttcgttgggggaaaacccaaatcctgaaaggtaggattacaaaacaagcagcccctaacaatataaagtcctaagatttctctagttgctctgttcttagatttggaggaacccaggactgacaaatgatatccttcatctagaatctgaagtcttgattagttgggtcatctaatattatccttcttacttccatgagccctcgtttgtgccttttgaatgatattttgtagtttttcctgcaaagaatttcctgatgagttacctcacaggttgagatacttatcttactccgcctagggtttcatcaattttcactttttggcgaacactgtacttgtcgaaaaaaagcatgatttcatcaaccacacactgcagtattacatataaatttaattagattctgtcatatgttttgcattcaatgtaatatcagccattttttaatagttggtgtctcatcttttcaattacaatatatgcactctcattaaaataatggatgcatatgtggaaaaaggaagagaaatgctatggactgtggatgaagggtacatgtaataacactatggcttacattttttctcttaaaaaagagaagccatcatggcttaaattgaggggtgtttatgttcatttatgttatttttgtttaatatatttgttcagtggcttggaatatccttttttggtttctctattggatgttgattcatgctaaatattacctccatttattgcaggat

SEQ ID NO: 8655 - DNA, 3984 bp, Carica papaya
  Intron number 5 from transcript evm.model.supercontig_75.6 (locus evm.TU.supercontig_75.6) derived from phytozome v7 .0 (chr-ID supercontig_75; pos 105600 to 109583)
gagggcttcaaagatctgcttacttgccttttaaggtttgtgtttcttatttctgatacttctgatgcatacttagatataaaaatgacttgtaaaatatattcaatatttccagtggttattactgttgaaagggcgaaatttgtttctgcatttcggatagctgaagatgaccaatatatacgtacttcaaaattaattactttttttagaggaagatttgacaattaatttacaatgaataagagattaaaaataaaatatgataatgtcaaatccaactattaataacaaaaggtacagctaataataggtggatttttttaccaaattaagaattaaaagctgaagatatttctagagaaaattaaatgctgagaatatttcaacgttaatgctgagaatatttccagattaatgttgagaatattttcacactttccctcaagctggattgaaaatgttattcatcctaagcttgcaacttaggtctttgaaatttttttaaggcaaggacttggtcaggatgtttgcagcctatgaccttggtgtttggagcagttggataacattgccttctacttttttggtgatgaaatgacaatcaatctcaacatatttggttgtcatgatgaattggattcttggcaatacttagagcagaattgattatcacaaaaaagtttcataggatcttctaggttaattcctagttacttgagtaaccttctgatccaaatacctgtacagattgcactggcgatagcgcgaatttagcttttgcactacctgtaagaaccacaggctgtttcttgctttttcaagtggccaaatttccccatacgtaggaacaataacaaggtgttaatctctggtctttgacatatcccacccaatctgcatcactgtaaatttctattttttcttaaggagccttagtaaagaataaatcctgtccatgtgtaatttcaagtatctcagaatcctataaacagcttcagtatgttcttcttgcagatcattcatcaattgacatacaacgttaacagagaatccaatttctggacatgtgtgacaggtatatgggtttacctaccaatctttggtactgacctttatgaactggagtaccttttctagacattcacaacttgtgggtggtttacgtaggggtctcagctggtttacatcccaacatccacacccaataagcaaatctatgatatattttctctgagacacatagatgtcttcttttgatcttgccaccttcattcttaggaagtacctaagatttcctatgtctttaatcttgaattccttagctaaagttttcttcaaattaatcaattctttagtaaaaactccagttacaattgtatcatcaatatatactattagaatagataacttactgtggtttgatttcttacaactagtgtatggttggcttgacattaggaatatctttgttgtattactcttgtgaatctctcgaaccaagctcctaggaattgcttaagactataaaacaacttttttaacttgcaaacttaatatctcatatatggaattacaaatccatgagggatcttcatatacactttttaagctaagtcttcatttaaaaatagattctttgcgtctagctggaagagatgtctatccaaatttgcagataatggcaggagaatatgggcaatgtttagcttgcctctggagccaatgtctctttgtggtcgataccatagctcccttctagaagcatatttggatgcagattatgcaatgtcaatggtagataaaagattcgccacaagttactctacttttattgagggtaacctagttacctagagtaagaagcaaaaatatagttaccagatcaagtgcaatcagatttcgagtaatgacccaaaagatgtgttctattatagataagaagaattttagaaaatttaataatcaagtgggagaccactatacgcttataatatgataacaaatcagtcataagtattgcgcacaattcaatacaacatgaaggaataaggtgtatcgagatcgacaaacattttatcaataagaaatttgatagtgacctaatatatactttatgcatatctactagtttacaactaacaggtgtgttgactaaaagcttgagatgtctgaaattttagagtatcattggcaagttggggatgaacaatatatattccctgcttgagtgggaggattgaagagggtttatcttatgtaaattaggtcaaaggataatatatcatatataaatagttatccatttttttttctattccacaaaacttatatataggttgtaatatttaatgaaatacacattcgaccactttttactactgttaattgtactatctgaattcatatcccgaaattcacacaaatttttaaaaaatttagtgctataattatgactttgagtcaatttgctgatagataacaagttacaatccagttttggaacacaaaacacagagtgaagtgccaagtctttacttaactccaccgttccaattctagtgacttatgattgtgttccattaataatccacacataactgtgcatctctgagtcatattattagaggcatctgagtaaacaatatagacaacagatttttcctttgcaacattaaggacatgcatgatgttacttttgtgagccacagatcctgaggctatagaagtagcaggtggattgttttgctgcaaaaataattgttggagcaattccaattgttctttgttaagagagatgtcccagtactttcatgcttctcacttgagatgggtgaattacttgtgctctccctcttggtattaaattttcaacttctggtctgccatgcaaatcacagcatttatcttttagtatgaccaagtttatgacaatgatcaaaatttggtatttccctcctttgttttctggagttgagtggtagtttgtcctcctttaattataaatgcagttgctttgacattgttgaatgaattatgagttcctattatgactttcctgtggctttattcacgcccaactttagcaaacacttaatgaatgttaggaattggtttggaaagatccttccatgcacatcatccaagttctcagttagtcttactaggaatttatataatttcttttgttccacaagtttcttgtgataaaaacatcatctgaatatttccactttcctgtggctttctatgcacaaaaggtacggttaataatagctgtattttggaccaaatcaagaattaaagactgaaaatatttctatggtaatgaattaaatgctgagaatatttcagtgttgatactgaagatatcttcacattaatgctgagaatattttcacgctcttcctttatgagaaacaaggatcaaaattttagtgagaaacaagtcacatgatttcttaccacgggaacccacctcacccccaaacgaaaaaaagaaaagaaaatgcacaatgattcaattgtatctggtgttgaagtgatatcaagttctgaagagtgggaggaagaaaattaattgaaccggtgtctttttagagagagagaaaaacaaagagggttcaactgattatgttttctttctgttaaagagtagaaatcatgtaatgacttgttccttcattgtgattatactgcttgcttctgtatactcattgaaataacagtagtcctaatttatcatttgtgcttagcttttattatgggatagactcttcctctctacctcctggccccccctcttttctcactctctgatacacaagatgcagccacataaaatatatgattactgttgcttgtgctacattatacatggatgtacaggtagttttgtttttgccttggttggaaccagtagttttattatcttttaattgatttccattattttttccttcgtaggtaaatagttccggagtg

SEQ ID NO: 8656 - DNA, 5315 bp, Carica papaya
  Intron number 1 from transcript evm.model.supercontig_228. 11 (locus evm.TU.supercontig_228.11) derived from phytozom e v7.0 (chr-ID supercontig_228; pos 165001 to 170315)
gaagtacttcaaggtcattgaatctaaactacgtaatgttttctgcttgaacttgtttaaagtgcatgcattacatttaaaaggataataggatattattatcttgtattcttgatggcttaggctactatccgctttgaaaacagattgatgagactgaaattattttctagaggaattctttacatgagatgcctgagagttgtatgttagtctacattgacctgtatgtgccaacaacaatacatacctattaattcttgattttgttctgcatattgtaaaagctccaattcttcatgtcttgttaaacatgaaacatttatgctgggaagtgtattttatgtattaggtagaagggtatagtagtaaaatacttgtatatgtataattgtatgttcctttttattattttcaagaacatgtagccataggaccctaaaatactcaacaataaacataacgttcattcttccacatggtgctaaataccctagtttttctttcacaagtcctaatcatcatcacaagaaaaatataaaaatttaaatagggctagccttcatagccagtcagtactaccaccgctgccagccttcatagtcagccacctgcaagctcaagcacctccagctgcgtaccttgtccatctgcacaccttgtccagctgcgcgcatgccgacctactaggctttctccagctgtgcctgcaccacctgtcggccctgctccagtcttgcctctaccaccagagccacatgcccctaggaccagccactgttgttgctctctacaccagaaatcccgctgctccggatagcttcctgtccaagcatggctgtttctgattttgcctctaccgaactgattttccttgctcagagttttagatcatataagagattacgtcccaaactattggcgcaaatccgttgcaaatttgcaacaattgattggagatttctaatcaatttatgccgcctaacttgaacggaaaaaattacctgaagtggttgcaactgatccttacgatcctcaaaaggaaaggaaaactcacccataactaggatcgggggacctacaatttaatgctcgagtcgagagatttaatgaaacaatgacatggctctggaactcaattctcccaaagatcagtagcatgtgtatgttcttatccaatgagaaataggtttggaagtaatcagggaaatatacttaaagattaaaggcgcagcccaagtatatgatttaccaatcaagatttggcctacaaagtaaggaaacaaattagtgactgaatatttcagtctcctgaaagatttgtggtaataactaaatgagtatcattgactcatatgaattgcaataaagatgcagcctctctgaagaaattcgtgaaaaaacataaaacacaccaatttatgcctttattaaaaatatggtcaggtgaaagttcaaatcctgggatgagaagaaataccatcattgagtgaattgatatctgtttttgcaaaagaaaagcgggaggggggttatgctaaaacttcactctactgagagctcaacgatgacaaccaaaagctccaaatcacgccaacagacaaatgagctgagttacaatgatatatcagcaactaatcgagagaataaggataatctatggtatacctttcataagaaatcaagatatactaaggagaaatgctggaacctccattggaagcctgccacatctagtaaaaattgtggataaaagaataatttccctaccgcctcaaggacaaacacatgtggtcaaccaacaggggaagagaaggctgctgatctcagtgatcgccaagcagaaatcgagtgcctgaggactcaacttgagtctctggagaaatctaaaagtacaggtctattgaccattcaattacattttctacctcatgtggactaaatatctcagtaatttctctatgttgtcctggagtatggagtcataagctataaatcatatgatcaactcctccaaatacgttaacgcctatgttttgtgtcccaataataagaaaatattataattactgctaatagttcactaatcatagtaacagaagttggaaacatgaagattcgcctcactttattcttatgttgcacggatctaatttcagtaacctaaatattacataacgttaattgtaagtgatattttcttcatctcattgcaggcctcaggaagatgattaacatgctgaggcacagaataagttgtatcttttagatgtatttgagatgccatacaatgctctctgctccagtaccttagataagatatgattacaccaagacaattaggacattattctttttttatccttaaagttatgttcccctctttaaagatttaaaaattggaatatacactgtgatatacgtaaatttgtaaaatataaatgtgtaatctttcctcctagtaataaaagaagtaagtttccttttacattgattcacaatgatgtttgcaagatctccaaaatattcttaacattttttagacttagattatttatttcatttatcgatgattatacttgaataacttggctcaatttaaagtgaaaattaagcgtttttgctatgataatgctcgtcaatactttaacagaacactatccttattattttaaagagaaaggattgatcatgaggcttcttgtgtccatagttcataataatcaagtggaatggcagaataaaaaaatagtcacttgcttgctactacacacgctttcttgttccaaaacatttgcttggaaagacactgagggaaggctgtattgactgtcatgtatcttataaacaaattaccatctaggatgttggaattctggagtcctagaaaagtcttttctaccttcttttctaacgtagggatcacaaataactaatatttagagtttttggatgtattgtctatgttcatatacatcaacttcaaaggagaaaacttatcctttggtccattaagtgtgtattcgttgggtactccctgggcaaaaggaatataagtgttatcatctttctacccaaaaattttatgtttcgctgatgtcacttttattgagagagtcatttttcaatcaaccttatttttaaagggagactgtattggaagttaagaaggatttattcttctctgacattcccctaccctcaaacaaaatcctctcaagtacccaaaacactagagaacctgagttcacaaaaagaacctgaacccatattcctgtaggacccaggattttttctcaagtataatcaataaggaaaaacctagatcctgatatcaagcaagttcgagcatctaagttttgtgcaggagatgaggtaaattttgggatcttttaccttttgatatagatatacctattacacttagaaaggggacggagaaatgtactaaccattcactttacttgatttcaatctttttatcatttgaaagatgtcctctatctcaaaaaaaatttcttatgagtctaaatgcaatgtttattcttgatatactatgtaagacttcatcctgtgagaatgaaaaaatgctataaatgttcaaattggaggtgatgaacttacacaaggaaaagagacttgtaggatacaagtgggtgtttactataaagtataagactaatgagatcatagagagttacaagaaaagactggtgcttgaaagatatactcaaacttatgggataaactattgggagacccatgacctattgtaaaaatgaatacaattacaatgattttatgtaaaaatgtcttccttcatgggaatttagaaaaatatatatataagaatttttcgatatttaccaaagaggtaggggtagataaagtgtgtaaattaaaaaaagtattttgtagtctcatgcaatctccaagaacatggttcggaaggtttgcaagagtaatgttagcaatagggtacaaacagagtcgggagaatgcaccctatttaccaagcatttagattcagggagtgttataactttgtcggtatatagctttgttttgtatatgttgatatattgtgataagtgataatgagatttgtgctcaaacaatggttagccagagagtttgagattaaaaaattgaggaaaataagctatttcctttgtataaaaatgactcactcaaaagttgggatatttatcttacaacagaaatatatcaattgtctttgaaaggaaataagtaagctggtgtgtaagtctgctcgcactctaattgatcccagttataaattaggactggcagaagaaggcaccaaaatcaacaaggaaatctatcaaaggtttgtttaaaaattgatatacttgtcatatacaagaccagactttgtttatgcattgagtgtggtaggccaatccatacacaacctcaaggaagtacactataggccacgtacttgaaggggacataagggaaatgtatcatgtttaaaagaaacaatatgttactttttgaagtatacactgatgtagattatgcaaggtctgtagtagacagaagacccaccattgactattgtaccttctttagaaagaatctagtcatattgagaagtaaaaaacaaaatatgttagaagatgtagtgcagagttaaaattccaagcaatgactcgatgagtatatggactattatgattaaagattattctagaagacttggaaattaaatggggtggtcctatgagattctactgtgataataaattgactatcagtagtgttcacaatatagtacaacatgacatagttgaatgtgttgagattggtagatatttcatcaaggaaaaattggattgtgatttgatatctactccttgtatacctgccaccttacaacttgttgacgtgttgattgagggtttaagtgtaaccaaagatttcagataatcattaccaagttgggaatggatactgtctattcaccagcttgaaagacattgttggaaagtatgtattatgttattagggtaaatggtatattagtaaaatactcacatatgcaattaattgtatatttgcttttattattctcaagaatatatatataagcccttaatactcaacaataaacataaagttcattcttccacaatttatgagaggtgttgttctctctagctcactttgcttcatgcagtcaatttcctcaatgtcaatcagtttatggtgttctttttttgtgttatctacttacctttttctggtctgtaggtttccgtagttccctgctgaaggcagtgaacgag

SEQ ID NO: 8657 - DNA, 2072 bp, Carica papaya
  Intron number 3 from transcript evm.model.supercontig_78.6 9 (locus evm.TU.supercontig_78.69) derived from phytozome v7.0 (chr-ID supercontig_78; pos 850613 to 852684 reverse strand)
gtagtcaacagcctgataagaggtaaaaagttcatcctcattgatgtcaaatacagtgtttgtaataacttctgttcgcatggttaattatcagattcaactcaataaatccaccttttagtgcatatttactgtaggttaatactttctaagaaatcttcaatgacattgaggagccatggtggaaaccttggtgctttaggaacctgtataattgcataaaaactagtaggcaaagcaggaggatcagagctgtgaaaaacaaatcttcaatgttgaaaattcaagtaatattcatactctcagaaaaatgaagcattccttgtcataggtaggatattgttgcttagcctctcatggttttcactagataatacagtagggtgttccttcttgacattcctcctatttcaactcctgagtcatcacttggaacctcaaatgacatttagaatctagatgccctaaagaggagctttaggcatcttcctgatgtagaaaataccttagtagctaaatgggactacttaaattcatataactttaaactattagttttgggagtcacgatataacaaaagccccttattaatcttctttaagaagtagctttgtcaaggaagttgcaatttttttttgaaatataaggaagttgcaaatatctgttaagacttcttcatttaggccatagtctaatcaggatcttgcacttacaggtgattcataatgcattccaacttgattgttgctgaccacaatcattgcactcctattttgtatggttaatttgcacttcatctttacatctgaaaaaacaagggaacagtacctattcactaatcattagtaaggtcctttaattgttaatctggacctttaggacattgaatagtttcttctaattaaatactctcttttcacgagtgatgcttgagtaggacaatgaagaaccacgtgagccttctaattatagctaatataattatctgattgattttcactaggtgggtttgtaggtaggagctgaggggactgaagcactagtcattcttggtgacatcatcataaggagctaggggtgaagatatggacatatacactctctcctcatgctaggttcttcaataatctcaaacatatgcactaattaggtttgattcccaatttgaactattggctttccgtgtaggagcacctttgttaagagtttagagaggttataattgtggaatacaaaaatcattgagtttgggatttgattcaaggtctctattcttcatggtgtttcatctttgttcctctccttttcttctctttgatctccttaagtctttctatctgctgtctgttttcagcacttttattccaatcctatatattctccatttttctttctacctatttcaaatgttgccagagcaagttgtagtgtatagattgatgtcagggccttcaattaatcaagcagctactttgattattctgtcagattccattagcaaaaaaaaaaaattctttaaatcatatgatgtaaagcaaagatgttaagtcgatctcttggttacaatctatcatggggtatctgattataggggtgtagcattaggttttggtccccatggatttctggagaaattgaagtacttaagtattggattgatcttcaacctcttctccaatgtcatcaagacaatatttgggctaaagatttttacatggggtagcttcatctaatattcttgttgcctgttgcaagttgagtttctttttcttttccgagaaaaaacttggaaatcgagtaaaatgattgaagttttatctaaaattattggaagacatactgaattatcagcttgagctttacatttgttacctctgaatggatggatctcttcttaaccttgatttaggttctgaatccatattttcatcagaatgaaagttgcttaaaagtaaattattgatgttgaaatttgtagaattatcaaatgcagaaattaaaattcttggtcagatagtttctgtttattagatgtgtaattatgaagattatttctgcagatctatctcaa

SEQ ID NO: 8658 - DNA, 1813 bp, Carica papaya
  Intron number 1 from transcript evm.model.supercontig_97.1 2 (locus evm.TU.supercontig_97.12) derived from phytozome v7.0 (chr-ID supercontig_97; pos 98199 to 100011)
caggctctggaaaaactctggcttttattataccggtgagtttctcttatttttttttccgaggaagttggtttgggcgccggaaaagggggttattgaaaatttccactttggagctcagattctttgggttttaattgggcgtccgggtggtttggattctgatgcaatttcggtttgaatgtgatgggtgtccaggatttttgtatatattattgcttgattcaaattctggattagttaactggattaattaagttcaagcattaatttcaaatttcaaggattttggagtttgaaactatgtttgaagcaatgaatttcataggaaaacgtggagttcggttgtggtctacatgtttgcattttgaatttttctaaaccatgaaatgggtaagttcatcctaagttctgaagtagtagaattcagaattgaacttgagagtctataggaaaaagcttgaaatcgctttttgcttgtctgtttctttccaaaattattcaattgaatttcttttcataaaatattttgaagtttcacgataatttcaagcataaaagttcatatccggatgaatttatttttctaacagattttagttggaattttggaaggtacaagagagaacaaattaggaaacaacaaatataaggacaatattgagctttgcatttttaaactgcttgtgtggtgttggaggaataagttattataatttattggattaattagcatgactaagtgattttaaacacatagagagtattctgtcaatcagagaaattgcactctattctgctagctttttttctcttttgagggtagaggtgtggaattctccagaaaaggtttacatatgttctatggtttcaaaacttttgcccaagtactgttcaagcatcagagagactaatggattttatactgccagaatgtcagaaagtgatttaggtgaaaattagttcaagtttgagctgggatgtgcaagttgggaacggatggtggcacttgttcataactagttcaagaaaaggttcacttgtgttacttgaactcttctcagaaattggacttaagccaatgaaacctgtgatttttagtaggatctgattcatgagtctatctgatgtcatgacataaaatttctaacaattaatataatatgctagtggataatattatgtggttctaggaatttattcttctattttttgattatctttggagcaacttcaaatgctctactggattttctgtatgtcttgacttttagacttaagtttttcttatattttgcttataaaaagaattttctttttgagggtgatgagagtagtatgtagaaaataaaaaataggcggattcattattttgagtctattttgttaggtcatgccatgattagtgatgagaattttgaaaatgtcatagatacactaataatactttaaagttcttgtaaatgggcggtaccccttttttggtaccatgtttatatatacttcactttttacttcaaaacaaaagaaaaattttcttcttttcatttatattcctattattcttgatgttattgtgtacttgagtagcatccaacctcaagtttaatgaaactatctagaattcttttgaaatatacatcaagctacaaagaaaattcacgataacatcaagatgccattagttgttttcttgatttgtcaatttctttctctctcctgctttcttaatatagaaataaactctggcaatactttctctatactgtctgtgctaggttttggagaagttatacaaggagaggtggggccc

SEQ ID NO: 8659 - DNA, 503 bp, Carica papaya
  Intron number 13 from transcript evm.model.supercontig_32. 53 (locus evm.TU.supercontig_32.53) derived from phytozome v7.0 (chr-ID supercontig_32; pos 664349 to 664851 reverse strand)
gggttacaggtatagttcctcccccttctcttgccgccaacaggaaaaaccaactattatacccttattatccatatcataagacaatttgttttcattattgttaaggcaaagtacttgttgatactttatggtttgggttccttcagatttcatttacttaagtttatttttagtagtttcagtattcttagttgcattgttatattacttgactgataattataacgatgtatatgagctctccatgtattaaattttttttaaaatctagaatgtttgtgttctagctatggtgttaactgaaattgtaaaaactaaactacatgcattggatcttgaaaaatccagaattgcataatatcaaatcatacatcgatattattattgttactttttgccacattacattgtaattggttttaacaaggtgttgggttcctttttttttttttttttggtactctctttgtagcaaccgcgtgcttgacctgatagagcat

SEQ ID NO: 8660 - DNA, 7202 bp, Carica papaya
  Intron number 5 from transcript evm.model.supercontig_10.1 09 (locus evm.TU.supercontig_10.109) derived from phytozom e v7.0 (chr-ID supercontig_10; pos 1690397 to 1697598)
gtcttgcagcctttcctgatcaacaaggttttttggtatgagttatttttcttttcctctttttaaattttttcttcactgtgggagatttcttactctttcataatattgtgatgtgatgtgatacaacaagaggttgaacctacaactataggtaaattaaatgagagcaagagactgagatatatcagcaataaccaattcagaattcttagatttatcgaattagtgttatagaagtctgaacctgaagctatgcttgtggcatcttttacagagacaccaaccataaaagaaaacaggaatatagagttcctaataaaatagggatttttaataggaaattaagctgaacagaagctactagactagatgagaaactaaataactttcctaaggatttgttaacctcaaaactagtttatgttgtaaataagctaaatattcccaatacataatagatcatgtacatacttattttattaacttccaattctccaccttttgaatggtctgtttggttgtgtatgttttcactatggttaagcctccagcaattaatagtatctgcagttgttttataatttgaataacaatatacaaattataaaaatttgaaatcagagaaccaggcatttaaggttccctagagagtctgtaagatttagagaatttttaggcagaaaagcatgttctctcagtggagaattcccattatatatatatataagtaaaatataatttgatttttagccctaaacttagctaaaatataatataaagatttgatctacagctagtatatcctaaattaagaaagaataaaagattttcaaagatatgagatacttgtcaaagctggacaaagcataaaatctgctgaattaagtgtgaagtcaatgactttaattgtgaaatctattactttaattgcgaaatctgctgatttaagtgtaaaatctgctaattttaattatgaaatctgctgactttaagttgtcagctaactacctttgacagtcatcgttaacctgtatgttaatatgcatcatatacttattgcattcaattataaattctttttactgaattcttacagaatgtgtagattctatggtatctacagatttatctgtatgtttccttatgagtatggctctttctactgtagtttgttcattattgggggagtacgtttgcgatatttgaagtttattggatcatggcttgggtctcatttcccttttggcaatttgggttttcatagtgtataaagcaattggtaaacgagtggtttaggcagtgtgttgggcagatttaggtactgaaaagtttgatatgaatggattagcatatccaggaaaaataaaataaaataagaaggtgatgaccagatatgtaagctaagatgtcatttctctttattccaagttggggttgattttgaactttgtcttctctctctaaaattctctctctatctcactgaatcccaacctctgctctcactgaaactctatatttcctctcttcctctgtatcccagcacaaaacctagcccccgagatcccttctacggctaggttggccacaatggccaaccggactaagcaacctggacccacaacatgacctcttcccattcaaaaaggtttgtccttactggaaataaatctttcaacattgcttgtgatgggaaaaagctcaatggtatcagaatcagtgaaaatggtcgcgacattagagtaactattaaaatgagcaaagaggaagtttcttggattgtgaatgcattgagtgatttttactggaacaaagacggacgaacatgtgggagaaatttcaaaggccgattccatgatcttttgttggctcttggctggaaccgaatgggtcgattccttgccctctcagagctgaaggataaccatgagaaaaggatcgtcatcccagatgggtatggagctagtgggtggtggcgcatcatgagatccatattcgaacttgctgaggtccctatggttaaccccttcaaaaaaagtgattctgcggtgactaactgaagtttgactacctcatctgtgccttcattatctcggaaacctgtcacagttatcttctgctgcgcaaagtgcaatcacaaccctcattttcccctcttaacaacagagacttcttatgcggcagttcttgcttcaaaaactgaaaaccctattcgggtgaagaagaatcgacctggcctgacccccaacgacccgaaatttgaaattcaaaatttttcatctattgggggaaagacggcaagggagcaagtgacctgacctgattgatggtccaaaaacactccataagcgagagactacaatgcataacaaaaggcccaaatacacctgggctaaaaaagaaaaatggacaaatcaagccgggccaagtaaagttataaataaattgtccaacccgatggcgttcactaagatggtccagctgatctagaggaaaaagaaaaagcaatcaagtcccacttaaagaaaattctcaatcgaatcaaaagaacctgagtcgaattcgtgccctaacttgggtcccaactctgctgaagtcgaacttaacaacatggctgcttcagctttatgctccaacacttggacttcttctcccttatctaacaatgtctcgattttggaagaagaatagagatcaatcatgggagctgagatggttgttcctagtcttgacaaggagcacatattggataatgattcgcagcttaaaaatgaaacatccttaccagatatattatgggctttagacacgcttattagagactccaaggtctgactcaaaactcttctctgattggttttttaacaatatctattgcatcagccagcatctcggtgcttcctttccttctcaagtaatagacgcaagggaattctttgtcgagcgtgcaagtgaagcgggaaatgtcaatattgaaccactattattggagcacagtaaaaagaagggaactcaagatttcaatcttccgttaattactatgggagaaacaagaggaacaaagaaggcggggctgaaattcaaaatactaaatgattgataaaattttttcttggaatgtacgggacataaacgaccaaaggaaaagaacaatcattaagggctgccttcacgaatagaaatcctcaatgatttgtcttttagaaaccaaaatgaatacgataaatgagaaaattatcggcagcttctggaggatggaggatgttggttgaaattttcttccagccaaaggttttgctggcggcattctgattatgtggaagaaggattgtgtgatttgcaacgatgtaattctgagtgagaccactctatcttttctcttctctaatttacctaatggagaccattggtatttttctggagtttattgtagaggcaacagtgaggaacgcaacatgttgggaactgaacttgcacatattaagaattcttgggggtgacaggggaattgtggggggtgacttcaacttgattctgaaatgttctgaaagattaagtggtcacacaactcctaaggatattgaggaattcaactcactccttgactgtttggatctcaatgatcttcccttactaggggagagggggagaatggacatagagcaacttaagggagcattcttcttcttctagaattgacaggttcctcatcactaccaattttcttgctgttctccctaacctaaaccagaaaattctctccatcacttccccattcttttgtcgtcggatgggattcaacggggccccatccccttcaggattgataataaatggctggtgctggacaattccaggaaattggttgcagatacatggtgtaagttgactataaagggtacaattagctacataattgctacaaaacttaagctcctcaaagccgaaatcaaaagctgggctgatgaaactggcagaaaagaagaagatggcatcaatgatattctggtggaaattgaggatttagatagaaaagaggaaagcatgctgccatttgctgatgacagagaaaaaagaaagaacctgaaattattgctgtccaacaaactccatatggaggctatatcatggaaacagagaaaaatggattaaaagatggtgacagaaattcaaagtatttccatatgcttgcaaaccacagacgatgtatcaactatgtggaaaaactcaccattgggaataacataatcaaaggaaatgaggctctcagggaaagtgcaaaaaactattttcagaacctatactctgaacagcatgaacacagactacaaccggataatttgtcttttaactgcaactctgaaagggacagagaatatcttgaggataatttcactgaaaatgaaattctggactgttttcgtgaatgtgatggtgataagactcccagtctggacggtttcaacttcaagttccttcaaactttctggaacgtaatcaaaagtgatgtcactgaattcttcaatgattttcacatttctggttatgattccaaaaagatctaacctgagaatattaatgacttttgaccaattagccttgttgggtgtatatacaaacttctgtcaaaagtccttgctaaacgactcggtaaaattcttggtaaaatcattagtgattgttagcctgtttttgttcccgggtgacagatttcagatgctattttgattgctaatgagattgttggtgatgttactagaagtaacaaaaaagatattatgtgtaaacttgacatggaaaaagcttttgatcatgttcactgggattttattgaatacatgcttagaataatggggtttggccagaaatggagaagctggatcagattttgtatcactacctccgcctttgcagtaatggttaatggaggaccttcaacatttttctccgcttcaagagcgttaaggcttggcgatccactctctccactcctttttatcattgttatggaggctttacataaactaattgcgcaagcaaagaatatgcatatgttaaagggtattaatgttggcaagcgaaatagaacgattgaaatctctcatttattttttgccgacgacacccttattttctgccagccggagactcattctcttattctcttgaaatgcattctagcttgttttcagacagtctctggactaaaaatcaacttacacaaatttgaacttgttattttgggtgctggtgatgatgatatgggctaccttaatgctacactaaactgcagaagctcaaatctgcctattaattaccttggtgtgccgctgggtgctaaacataatgacagcaagaaatgggatccggttattgatatggtgcaaaacagattagcaacatggaaaaagaaatttttatcgaagggaggaagacttactcttgtcaagagcacactctccaacttgcctatttattatctttcggtgctcaatttactaactaagattgcgaaaaaattataaacaattcagtgtaacttcttatggggtgatgtggacaatgaaaagaaaaaatatcatctcgtttggaaagaagtcaaaaaaccagtgtgggatggcagtctgggattgagaactctcgtcaaattgaacaaagccctccttgggaaatggatctggaggtattggaatgaaccaaaaagtttatggaaaaaagttagactgtaaatggtttgttgacaatcaaaagagcctatcacacatcaaaaaatataaatatggcacaagcctctggaggaacatcatgaatatcagccaagctcttctaaactgtactgactggatcattggtaatggtaacaaagttcaattttggaatgacatttggtgcggatcactttctcttaaggacaagtttccacaaatttatgtcatctgtagcttcaaaaatggttttgtgaaagatatagtctctcctggcagccttcacagctggaatttcactgttatgaggaatttacatgattgggaaattgaagaatatgaaaacctgcttcacacactgttccacatccacttaaaacatcatgatgataggctgtgctggaaatacgagagcaatggctattttactgtcagctcattttatgattttctggatgactggataaattgcaaccaaaggaagttccctgccaaaatcatctggagatcgggtgccccacccacgatatcttttttctcttgggaagctacaaaggaaaaaattttaactttggataatctaatgaaaagaggaatacccattgcaaacagatgttacctttgtaaaatgggtccggaatcttgcagccaccttcttctatggtgcccgatctctcataaactttgggcaatggtcctcagctttttggggttatcctgggtcacggctaacactatctatggtgaattacttgtttgggacgacctcgataaaagaaataagtttttccagctcattcctcttactatattttgggtcatttgcaaggaaagaaacaagtgtgtttttgatggtattgaactatagttcaataccttaaaagacaattggttctactattttggtgctattatattaggccacgatattgataataacgtaggctttgcttctattataaatatacttattgatgtgtaatttttgtacatgggtggtgcctccttggtacctgtcattaatacatttctgtacttttctttaaaaaaaaaaaaaactttctttatttcaaagtggatgctaaatgcatgtataagcactgaaggaaataggagataagatgtactgtaataacattatgtaagccatctataaaaggttgattcccagaacaaatcagagctaagtatttctcaattcacgatttgtttaaattagtacattttttgcactaattagtttcatcatcactaatctgttactctatctggtgatatatgtatgcttccttttcacgctagtgtctctttttacttgttatcctcgtcatgttttacttatgctaactctgttcttatagatgccctttgctttagggctttagttcttgttggtaaagctttatcattcaaaccatggtggatggatatgttgaatctggtattatgatgacactaggttggatcaatcgaagggagagttggtgtacatca

SEQ ID NO: 8661 - DNA, 3286 bp, Carica papaya
  Intron number 5 from transcript evm.model.supercontig_587. 1 (locus evm.TU.supercontig_587.1) derived from phytozome v7.0 (chr-ID supercontig_587; pos 2743 to 6028)
ctttggatccagatcctgctgggttccgggagcaggtaaatttactttatttggttaaagtattcctaggtggaaaaaaatctttctagaaggcatgactattctaacattgagtaagttaatgattcatttcaataccatgggtgcaataaaggtaggtaatgcggtggagagaactggaccctttttatttggtagtacatgaatttttaagtagtgagttgcctgcttgtatgagtagtcttcttgcctgcattgtgaatgacactgacaatcataattgccaaatttagattccaatcaaacattgaaattgtaaaactttgaagcaagaagtacataattagatttggagcatttcttggatcaaaatttaatacttgtatatatgttaaacaaaaaatgcttaataatagaaacttaaaagaaatttagcaaagtattatatgtagtattgacattgtattagaaaatatttatctttaaatacagtatttattgaaaatcctaacaaaatattcatgttgtagtttatttttgtctatattttatgtagaataaggagatcttaatttgaaataaattttctattaaaattttttataactattattattttgtattttaaaattatataggttatttaggcattataatgttttagttttcttctaagtaggttttaactaatttaagaattagaattagattttccttttctataatttttttttgtaagttgtatctaatgcgtaatgaagacttgtagcttccccaaagataaaacggtaattgattaacaatttttttgttacctgttggctatctctcttcaatcctatcataattgttttgtctaacttagtttgtttagtttatttctctctttttttctttaccttaatatctaatttcctccagccaatctttacttttctgtttcttacctaaattttctatgcttaaactatctgtggacaagttagtttcaatgctgtttgttacacaccagttgatctcacaatgcatcctgtcagtttcactagaaagagacctaatctttttcctgccttttctttcaaacaaattctgaagtccgcaccaacaacttactataactggtctcagcatagatccgcagcaaccactaagcagtggccttaccaaattttagcccttgattccattggaaaacgtcttattcattggcaaaagagaggatcgtagttatgtcctagatttctgccctcttgtccattgcgagtgacactaaccactgagatagaaccattatagcaagacgaatccatagctggaacattaaccctcactgatgaatgaggactgatgcgtttacttacgtgtgcacacctatgactaggaattttcttgttgaccagttccaacaggttaaccaatctgatttgaacagtccggttcagatcctttcagactggtttttgacatgttttagactggttcctaaggttttaaaatgtattctacccattttcaggttactttggttagagtcacatcttataatcattttcaaagcagatcaacagtaaatgtgacaactcatcatggaattcaacataattctggttacaattcatgatacaatctacctaattatatatgatatattgtgccaaatttttgggtcttatggatgcatagagagtattcagatacatctaaaattaattcctattaaattctcttgacaatcattgcatatatagtaactgttgttagttaagtactgactatgaaataaacttacacttagaagctaagaaagcattgggttctacaagaattaaagactgaggttaagagtagaattaacacttctcctgtgttagaagatgaaaaacatgatgctccttgctaatcaccaattctaactcaagaaatattagttcatgtttaagttttttatcttcacgttaatgatgttgagcaacttattccagtcagtaatcttgttctacctactatccatgataactgcatgaaacatatttcttcggatgatttcatttggactccttggttctatgatatgatagaacatataattttgattaacttaactctcaatttttctatggggattatcaaaaacctcgacttttttaagattttaaagagcatgtttaagctttttctatcttgatgctccactgcttcaaaactcaagtcaagtattcgccaagtggatagaaaagtgtagatcaatattttaatttgtaaaagaatttccattaatttctttttattaattgttaatggtacttactattttcaagtttaagtttatctggaccttataatatatttttttctttttaggtagatttttttagtattataaggatttgaatctttaacgttgatctttaataattttccttactagtggtaactaatggctatgcaaaggctagcagctagtgacaaaaagaatgaactacggtgaattaaaaatttctttgtaaggtttttattagttgttatgtctctcttagttcattcttattttttttttgtctaacctatttcattgagtctagtactccttatatttcttcaccttgatccctaattttccttgacaaatctttttattttctatttcttacctgaattttctccatttctaagctatttgtggaataagttagttgaacagctgtcatcatctctcgtgctgtttagttcttattttctttaatataattatgttttccatctgattaaactttcaagttccttggtcatacacatctgtatatgtgtgcaaaagattaaatttattctaagaaactgaaacccacaagctattaatttaaaagttaagaagaaaagtagacaattctatgaattgttccctcaaaatgagagtcacatctaatttaacaacctttctgtgtgaaatggatttttatactttggttcaattcaggtccaaatcaaagtttggtctgatcaagttagatccaatggtatcaggatcggctgaagttcagtattcaacttgattttgtaggattcaccactaattctctcaattttctgttgcttgatatattggggtttatcttgtacatttgaatcatttttcttgttaattggatgattctaagttttatcttattatcctaacaatattgcttgtggtgcattcttatctcccttaagtgcatgaatgtcgtagtccaatacatccaacttcccctcactttttccctttattataaatcttttgtaggtctcc

SEQ ID NO: 8662 - DNA, 2955 bp, Carica papaya
  Intron number 2 from transcript evm.model.supercontig_119. 20 (locus evm.TU.supercontig_119.20) derived from phytozom e v7.0 (chr-ID supercontig_119; pos 111150 to 114104 rever se strand)
ccgaggagatccttctgaacgacctagagcgcctggtatatctctcttctctctctctctctctctgtctgtgtatatgtatgtacgtatactatataagtatatgtagagtttttatttgctgaaattttataaatgaatatgtgggtagacaggatatatatagcattgctctgggtttctgctttcagtttgagtgattatagaaagagattttgttttgcttattcgtttatcaagagggggaagctctggttactttagctatgactttgaaatgctctttttttttttttatccgttagcttaaatgcagagttggatcttcggattctatagatttattgattttaaacttcatttgtaggttcattttgtgcttgttttttggaaaatcaatgttttgattggagttctcaattatatcttcattcatagcctcattcataggactagatagatattgatttctctaaatactgcaaatgctcttctgttcttcaaatttattttttcaagatttacgtattgagtttaaaataggttaaggtggctaattagccaatcacatactagctgcatggctgtaattttatgtgaatggtcagtaggctcaccgataacagtgctgttggtgctcttataccaatgaagctgaaatctagtttcatttttaggtcactagctacattcataaaatgtatagttcagtataccttggtctttgttggggattttgttttccttgtttggagaattacttttgtggttcatttgctaattatgtctaattagccaatgacatatatgatcccaatgtgaaaggccggttagctcaccaaaagaaagattttttagcatcttttgacactgaaatagatggttgcttttacttttttagcttttagctacagtaataagattcttctttttttaagccaaaaaaagtttatgatcattcatgaggcaccaaggaattgagctagtaaacataagatttaatttaaactagtgaaatacagaggagtctcataatctttgttatgcattttctttcataacgatggacagttcatcaatcatgcttcaacagcattggctgttgttttgtgtgcgtggtccgtaaggtcaaaagagtataatttgttagtggcccttaatactgaagcagaatgctcctctactttttgttgttaactatattgataaaacatgcaacacattttatatattaaattctcttttgaagtttttccatttctaggggaaacagaagtcagagtttgtactggtacttgttaatcaatctcagcttagctaaataattctctcatgttatgttgactcagagtgctcatctgtatgatggttaatcaaaattaagcttcaagatcccttgatagacttaatagtttcaccatgtaacattaaaaaaatgcttaccctcttgccctatctatggctgtgcgtgtgagtaccatttctggtatggttattttttttttctttgcaaaaatcttagaaatgtgtttttggttaagtaggatatgggaaggaaatgaatattctttttgggcactgcgttgtaggtttctgcattcagtttgatggttacaagaattgagttcttattttgcttatttgttaattacgagggggaagctctggtttgttacagttgcgattcgatgaaaggattattgaaatgctctgtttttctctctgggaccaatggcagcactggatatttttgttcttataggtttatggaaattaggtttcttctataggttcctttttatgattgttaattcggaagatcaatgcttgaattggacttctcatgatatttagatattatttctctaaatacatcaagtgccccttcttttaatttgtttgcttcagtagaattcaaaaaccttttaacaggttaaggtggctaattagccaatcacatactagccccatggctgtattttttgtgtgaatggtcagtaagcttaccgataacaacgctgttggtggcctgttactgatgaagctgaaatctggtttcatttttgggtcactaattacattctgaaaatttgtagtttgatataccttgtttgatgtgggattcgtttatgtttccttatttgaagatgaactcgcatggttcaattgcaaagggtggttaattagccaattgcatgttttcgccttatgtgaatgaatattttttgttagtatcctttaacaatagcagatatgtgcttttactttttggttttttagtatgtttacaaattgattgtctttctgaatgccaaaatgcataagatgttaatgttcacttgtgcttatatgaaaattggtttaactctattattaaacataatgttatatcattcttgaggtgccaaatgccactcacagacaagagagttctgaaatgaaaagtggttttgaagtcttattttttattttaatattagaacttgtatttttcatgttggggatcacattcaaaacaccattaggagtgttgtgtgaatggtcagtaagctcaccaagagggaacatttcatcagtggttgttaaaagtgaaccagaatgcttgtcttgctttttggttgttaactatattgataaactgtgcaacagatttagacaaaaagttttcttccaagttatcattcccaggggatatgcaggtcaaattttgtatcggcagcctgttagtctatctcaagttactaaatagctccatacaatatgtgaatcaaagttatgcctgaagttttaggctgttacatcctgctcagttttggagttgaaaattggatttgaacatcaagttaaaggaccattgggatggatatgtgtgacatgtttttactatttttggcaacatgtaaatttagaaatgatgcaggttcgaaaccagaagaaccaaaagtggcaggagat

SEQ ID NO: 8663 - DNA, 1776 bp, Carica papaya
  Intron number 5 from transcript evm.model.supercontig_36.1 64 (locus evm.TU.supercontig_36.164) derived from phytozom e v7.0 (chr-ID supercontig_36; pos 1184199 to 1185974)
agaggcttcctgtcggtactggtagcaatcctgtaagttaatcattttcattatgtcggtttaaatattacagttctttttcttcagagttgtccactttttagttggtcttatttatttcttgtggtctgattgctatgtaactacaagtaaataaaataatctcttgtcattggagttctatggccaagtgaatgaaggaaatcaatgtaaaaaactgcttcaaggacagtctaacacatttttaaatgagggaatgatgagaaattgtttgtatttaaaggacatgctcggccacaaatctaagtgcaaactggttttcaccctttttattgatccacacttcagattttagtaattggttgtttcccttttccctttagttccactgaggaaaatgtgattgagcaggattgagttcctataccaagtggaacttaagcttttagagctggtagttcttattgagccttcttttggtgacttagcaagtagtgaaatgtaggcctattagtattagttcctagatttagtgctttttgtccccataaaagcagccatttatgttttttttaagacaaatagtgtttttagtgatcaaatagtccatttgttgcctatacatggacttaaattctgcacttggaagttttggtggatacagacttctcaagacccatgatctcttcacagtaagtgagttttaatttatatataggacttattacacttgatattttgttgtctcccagtctttggggatggacacaagctgagcaaggcgaattcctcagtatttgaacttaattcagttaaatacaattagttgttgtaggattcggggttggttcaaatgacatattaattgatatgggctcagtttgactcaggcttgataaatagtcagtcctatcgagcctgattacaaatgttttatttcaagcttgattttggggctcgaataaactgaaaataagctcgaatcaaaatgaattattttttatttgttattttaaaaatggacatatataactaatatgtatatacaaaaacatatgactgggatagctttaacataaaacacttcttcgtgctttgaaattcagtatttatgatcttgaacttggctcaataacatagaatagcttgaaaataagtctggtcatagcgcagactgtcggcagacagaactggcttgatgccggttctaactcctagacaaagaaaagtgtggaagctccttgcttcggggatattccttatcaaggaacaggtacatcaggatcatactatcatctagacaaaaagggaaacgcttggatttaacctttaaatggagctagctcttctgtggcgtgtactttagttgtcagttgatttggtgctgctgaaagcttagccattaatgtatgatacatcctttaagtttataagcatttagtttataagtcagaaagtcattcctaaaataagctaatttaaccaaatattttaccataaaattccttcccaactgataaaacctgctttctgagagcctgtaacccaaaaagaaagttaaatccgagtggctcctaaagtctaatataaaagctttggctagaaagtctgataattcctttttatgatgaaaagattcaaattcaacttgttaaagacaatattaatcaattaattagtttaccttggaaaagtgaagtttgttgtagttttttctgagtaatctagttttttttaataggtgtatctcttggccgattgtgcagtcaaaatttt

SEQ ID NO: 8664 - DNA, 5033 bp, Carica papaya
  Intron number 3 from transcript evm.model.supercontig_115. 19 (locus evm.TU.supercontig_115.19) derived from phytozom e v7.0 (chr-ID supercontig_115; pos 412781 to 417813 rever se strand)
ttgttgaagatgtatcctgaacccttttcacttatttcatactgcaatagtgataatctatacttgtttacttgttttctgtgtgaaagtgagacaccttggccttttcttcaaagtgcaaaatatttttgtggcttcagtttttcagcatgccttatgaaccaattttccacttggtcattactgctaatgaataataaggtgtttggggaggttggtaaaagtgattttaacaaaataaaaataagtactatgttcttaaccttttatgtttctatttttcttatctaaccaatctaaatgatattggagggtgctgaaagaaatggtaaggagttggctgctttcagttacttaaaaacaggtaacttttgatttgaaaaataagcaatttgcgcttgtacagatacttattccaaaaaaataagcagttattttcaagaaagatgtaacaaaaatgtgcagtttttgttactgaatacaaatattgtagcactggtgtttttttttaaataaagcagtggtgtttgaaagtacttataactataaaagaagtaatcttaaacaccctttttacttggttactcctttcatatccttttaaaattaaaaatatatatgtaaaataatgtaagtcatacaatatttttaacaatatatatgttattaatttttcaaaaattaactgcttattttttgtaattaccttatttaaactcttaacttggtttttttaaataacaatttgcctaccttaagtaactactgctttaagcacaaatttccagcaaaatccttaaactctttcaaaatgtatgatttattgatgcagcggtcatttcctacctaacgtaggtgggttttgcaatcaacacggcagttagaaatccttaagatcctaaattgggaatcttaaattctcctgaaggtctggtaggaaatttgacttagcatagggcaaactacatcaagtgtgcacaatttataggaacatttttttttgagataaaaagtatggtatgtattgaaaaagtagcacaaagggagtgccgtccatgtacaaaatgtagagatttatagatcaataagagtatctacaatggatcctaaatcctataaactatcaaggttgtgtcctaaaataatagaactaaaaaaatgtaaccatttgtcgttgatataaacaggagtcaccttaataccctcaaacactcttttgtttctttctttccaaataacccagaagattgtaagtgggattagtgtgtagctctgttttatgtaagaaaacccctcccaagccaggagttcagctatcaccggcctagcagaaacccagcagataccaatgaggcaaaaaatctcggtccaaagtctgtaagtgaatggacaccacaaaagtagacgtgtacaggtttccaggctagatttacaaagaagcatcggttcaccgatgggatacctctcttcatgagtttatctacttgtaaaatgccatatctggcagcttcccaagcaaagaaagatactctaggtggagctttcgacttccagatcagattgataggaaaagcagcttggtttacaacaggatgaccctccagatgtttatagagagattttacaaaaaaaaaatacaatttttgctcagtttccaattaagtctgttgttgcaattctgaaggtgagttgtagccaaggtctgaagtgaattcgtgtattcctccaattcccaatcttgtaggtttctattgaccaccacacttcaagcccaaggattgttatcatcatgggcgttttcaaccagcatgtgcttatcccttgcggtggcaaatataaggggaaacgggattgaaaatttgcagttccgcaccacacatcctgccagaattgctgttgcctacgacccaagtagagcagtccagaactgtgcgactgaattgcataatgcctttccagagaccgctaccataggagctgttctccatattggtaaggttataggaaccgtttctgaaccacttgcattcgatgatggttttccaaaggcttctgttatcattccagaatctccaaagccatttcccatcaagggcttgttgagcattaaggtagatcgtaatcccagacttccagcctcttcaggtcttttgacttcatcccaactgaccagatggaatctcttgttgctgtcactatctcccaataggaactgacattgaatagattctaactttttagccacttcagccggaatggtgagcaccgagaggtagtgaatgagtagattggataaggtgcttttgatgagggttagtatacctcccttagaaatgaacttacttttccagttggcaagtttgcactgaaaaatgttaattatagcctcccaacaactgctatctttgtgtttagcgccaaagaggattcccaagtacttaatgggaaaattggcagttttgcagcccaataccttagttaacaagggtgcgggacagtcacaaccaaattccactaattccgatttgtctaaattgatatttagcccggagacagcttgaaagcaaagcataatacatctcagattaaggagagtgctgatgtccggttgacaaaagaatagtgtgtcgtcggcaaaaaaggggtgtgaaatttcaatttgtttgtcgccgtttcccacagtgatgtccttcatcatattgagttccctaactttatcaatcattttatttaaagtttccataacaatgatgaagagtaaaggggataggggatcaccttgtttcaagtctctggaagtgttgaagaaagccgaaggacctccattaactgaagtggcaaaactagtagaggaaatgcaggtgcttatccagcctctccatttatgactgaaccccaatctgccaagcacgtactcaatgaaattccaagacatgctgtcaaaagctttttccatgtcgagtttgcagataacaccttggctgttgtttctaaaaatgccatccacgatctcattggccataagaatagcatccgtgatttgcctcatgtagacaaaggcttactgattttccccaatgacaacattgaggactttagataaacgattgaccaagaccttggagagaagtttgtagacaatgcccactaagtttatctgtctgaactcactaatgtgtttggtgttcttcttcttcgagattaaaaccaggaaagtagagttaactgatttcacaaagaagaatttttgtggaaatccatgaaaaactcgagtatatcctgcttcgccaccccccagtattcttggaagaatctaagattgaagccatcagtccctggggctttgtcaccgtcacagccgtggaggctatcatagatctcctcctcagtgaattctacctctagctgcatgctagtaagctcatctattctggagaactgaagtttatcaagcttaggcctaaggtgaaagtcctttatgtatagtttctgataatatgttttggtggtagcctctcatggcagcattcccctcaactttgatgtcatcaataagaatcttttccgcataattgcatattctttgctgattggctagacaatgaaaatattttgtgtttttgtctcaatctttaagcgatgtctctctagcgttttgcttccatgagatggcttccttgttcaacttattagccaagtctaacttcagcatgtttcttttttcctcgtccatactagaaagaccccagaccccttcagtgttgtcgatggaaacaatctcagccataatacgactgatttcggattcttttgccctgctggcataacactatacagggtgaattttagagtaaatatctttaattaaaatatctggtaaatgtgaactccagcatgattgtgaatctaaaatcatctgttgattcttccattaattgtctccattcaattgtaacagtgactgtgttgatacaccactaaaatttacatgcctatgtgatcctttatcgataatggtgctgcaaggaactatgttgatattaatcaacccattgttattgacaatgtcaaatacttgtatcccaataaggttagctaagaatgtcttctttgtgcaagaaaatcacaaaaagtatcgataattctcaaaagaaatttctgccccagttattgaaaacagactaaacatgttattgatatctaaattctgaggcagaattcttgctgtatttttctgcattcattagtgacaaccagctgtaagcattataactactaaatgatgccaattggaaatgctttaccttgtaattgtagtttatggactctatcggtgaattagataattccatgctggctaagtacgtatccacttttcaactgttttgagagctggagattagaccaagctcttttgctttctagtttagatttccttgttgtcagccctttttccaggagaagcatgttgtggcaattagccatgtaggatttacataattttgatgatgatatgaaattaatttcactggaatgaacatgttcatttagtttttggtgtgaaatactcagctgtagcgctaaagtttgcgtcacaccactctccactatgatggtgagaaaactgtaataggaatgtgctcttttcctgatttgtggatgtgtgcctttgcacgactatacaaaattaatgggtttgggagtttaacttagcttgactggtatggctatcttgttgttgttaatctctctttagttttaattttctactctacagaaaatgttttacttcataatgaatcagagttattttacttcctcttcttttttctaacctgagcttcttgagaagtatttggcctttgctgtgaacattcaccttttgaactcaccattgttgttattttaatttcttgtaaaaagcttaaatatgttcattgtcttaattttgtcgaccaatatttcttttgttgttgaaaccttgacacagttgttcaggatcaaattatctttcctaacgaggcagtttttga

SEQ ID NO: 8665 - DNA, 666 bp, Carica papaya
  Intron number 2 from transcript evm.model.supercontig_12.3 0 (locus evm.TU.supercontig_12.30) derived from phytozome v7.0 (chr-ID supercontig_12; pos 209379 to 210044 reverse strand)
ctttacgtatatatgcagatcattatatgtaataccttatatttaggtctttaatctcccaaatcaaataataagacattacaggtttatccccatcttcgtctttgtttgcttcgatgttcttttactgattttggtctccgtcccacgagaaaaattttaattccctgttgttagcgtttttcagaaatgtgactcagggggtgtcatgttgttgaacaggtgaagggtggagaataagggttgattgtgacattgttagtagaagttcttgcgacttcacatatttagaaaactaagagttaggaactgatatgaaaatggtaacgagcacttttttggtattttactcttttatggttattttgatgttgaaatttgatgatttgattttcatgggaatgctggcaattggcgcaggagcagcacttgcagagaatgaaataaatttttcttcattttagttatgtagtttttcttttcctgtttccctttaagtttcagaaattgtgctacacgttattgaacttgcaacctgatattcgccaatcgttttgttggagcactaggccaaatttatgattttttttttttgctttgaataatttcaaatcttctcctgattgactaggcagagaattcgtttggggatattagcagcaaggt

SEQ ID NO: 8666 - DNA, 2908 bp, Carica papaya
  Intron number 4 from transcript evm.model.supercontig_118. 5 (locus evm.TU.supercontig_118.5) derived from phytozome v7.0 (chr-ID supercontig_118; pos 35576 to 38483)
cccaggtaaattttatcttgttccagtttctgtttgtatttaaaataatcatagcctgtttttataattcctcaactgcatgtttgattttccaagttttttttctgttttttttttaaataaatctgattcttactttatgcatttcttaattcatgaagagttcttttgccttgatccaattgcataatgtatgtattggtatttagtctttatcatgtgtgttgccttgtatcatttcatgcttcttaatatccgctgcctaagatttcctgatagatcatctattgtattcaaaacaaagtgaggttcaggtcctagaaaatttgttcatctcagtatcacattcacgtgctttaatattcagttatacagatactatgactgaatttcatttccaccatccaaatggaaagagtaaatatctatatatgttgactcagataagatgcggattaaacttaatccttactgttggcaactatttgggatttttcgtgttatggtcggaggggaatactagggtctttagagactgttaaccatatcattacttttggagaaatttttgttttcccaatatctctttgattaagatgcatggtctctttcaaggtgtctcttcgtctattttgggaagagtttgtttgcattctggaattgacttattcaacttttctgttgtcgaaagatctgttattatctttctacttactcttttttctctcttcctaataacactttttttacatgcttgccccttaacaataaataaataagtaaataaatgacctgatcgacttcctggcttttcatttacattccaattctctaacctctcatacagtttttaatatgccttccttgtttgtccaatcaggatttgaaatttcgttaaacattgtagaataaaaaactgaactgagattggccaaaccattaggaccttccgtcataatccccagctagatttttattattattaagagataaatcaggatagcctatgttattaaagagcatagagattgtggacattggtgaatgctaaacctaaatatcagttagagtcaattcaaactcaaaagaaacatgggggtgccagggattttgacaggattttctttttgattgcttctgaatctgttggcagacacaatgaaaatgcttttcgctttgattgagggtgattcactccattctagatttgtgtatagtagatatgatggaagcaagagatttttgctagttttatggaataacttggaactgtaaaaattgatctatatcgtgaataaatctgagcggttggcgaactgttttgactggagataattgtggctaaaatgaagatgtagaggtggaatatataccaatacaagaaaaataacaataggaaataaatagttctgaaaatgcacatgtggacctaaaagccatagcattgacgagtaattgttggtaaaacatgtggagaaggttataggtattttcaaagaccatgtaggttcaaatagtgaagaaggatttgatttcaaataccttactgatatgaccttacagctcatttgtttcaaagtttttctattcccactctgttcctacatctcaaattttaacatgtagaatgtgatcctaattttcatgtttgattcagaatgcaacaaacttcattcttgggtttaattctagaatgatcaatttctgtttcacgtgtggaagtagggacaacagaaacatttgcttaaattgaacatgaattagaatattattgaaatttttatctcaattatactaagtttctattgttttttcaattaatcgatatctgaaccaaagaaaatccctggagtagatggaatataggaaaagaatccatgtagtcaatcctgttgcaaagtcaacttttcatttgtagtacaattgttgagtgacaaccaaattctcccaactgaatgttaaggaactaaatagtaataatgcttgtgcgtcatcatctagtgtgagattcacgatagctaactgagttaagattctctagaaccaattctaaagctctgaagcatcctgttcggctctgtatcttgaattcactagttacttgatcatgaaagccttgttttgtatgttcttgtgctcacatgagttcttaagtttggttcggggtgcacaatctttctcatattttgcacattatgaatcacactaagttgcatatgttgttgcctcattgtgccatttgcttctctgtaacattttttattcatccttcttcatctctgctggctttgcatcccatgatgaatcacaataagttgcatacaccaagttcagttggattaaataattatttataagaaaacagatcttccatttaatgttttcttctatatgggaggaggtgggtgattttaacaatactactaaataattctttacgagacatcttcaatctgggataattagaagtgaatttaacaatactaccaaactatcattcatttttaacggaacaagaatatcacaaagcaactaaagctcttacctaagttattgggaaaaatagataggcggtagaaagcaaaatttttgagcaatctaaaataagttataccagtaaccagtcaagcaaatagccctaggcatcaaaatcataaaagagacaaagatgattttaacttagttggttagaaaatctcctgctatctaatagataatgcgtataaatttcttgtctagatcaacaactagtaagaaaagtctttcttggattacaacaatctaatcatgagcttcaccagaaatggagacagacattgttaagttattgaaatatgagaattgatttggaaatataaagaacattgttaagttggtgtgcagggtgtgagaagagaagtggggaatc

SEQ ID NO: 8667 - DNA, 2600 bp, Carica papaya
  Intron number 4 from transcript evm.model.supercontig_87.1 06 (locus evm.TU.supercontig_87.106) derived from phytozom e v7.0 (chr-ID supercontig_87; pos 829958 to 832557 revers e strand)
ctctgcgtgaattacttgggcatactcccctccaggtctgtcatactttacactgctttctattttaaaataatcatgcctcttagccttaacctgatcttatgttttgggaatatctcaatattagtataaagttacagtttctacttgactattttaggtaaaatcatcttgatgactaaatgcgctcctacttctctaaatttggaaacattagttaaaaatttaaccatagggtttgccataaccgtttaagtccgagttcatgattagatttgatttggtgtttgagaaacctttactcattagaaatgactttactttggactttaaattctaaaaaaatgtaataaactaaataaaaggtggaatttctattttcacccatgagacaataagcccaaagacccttagcaggttatataattcctttactaggaataagactctggattaatcacttatgactcaacatcaaaaaatatgtctgaatctcataaatgctaagccaattggtttcatatggagtacttgtcttcacttgtataaagaattcttcatccggaacttgtggaccatggtcttggggctccttggaattcattgggttacagctggctccataaaggatgaattgaaagcctgcgaattttatgcaaaggaaacaagaattttagacttatccctcttaccatttttggatcctatggaaagaaagaaacaatcgagcgtttgaaggcaaaaaggataattttggcaacgtccatgacaaatggtttcacttttttgggtccattagtctaggacattagcttattaaccttgataattttggttttattatagatatgttcattgatttgcaaatttttttgtacatgagtggcatccccttggtgtctgcaccaatacaattttctctcttttatttcaaaggaaaaagaattctacatccgagcctgtgagtctaagccataaatctcctccaaaatgaggtgtaggtcttggttttgagtctttaagtgcctgatagcgccagttaaaaacaaagagtaagctctggttggagaataagataggagtcagcaaagctgtcaaacagaattttcatttcattgccttctgcctctaaagtaccctctaagttccctagtcaaaactccatctcccaaagtaagcaatgtttttagcaaaagggcaagttgatgctattatggatttcatccaccataccagaaccttctcattctgtttaaatatcccatttaattcaattcccatttcatacctagctaatgcatagttgttttctttttgtaagtaactaatgcctagttctaacttcacattcattttaatatgtacaatcacaagaagattttctatgtttaaactacccccatctcagtttgaattctttggaagtgaaattttaattctcaagttctaactgtacgtatcaaggctaatgagaactaaatcaaatgccttgtaaatgctatttgttgtgggcttcttttgtactttcctttttacattccatgaactaggtggatctttcttgttaagccgaagagaagcggcatcttgatcgggaaaatagtttcatttagtccatcactttttaacgcatatagtcatgggaaaatgataggattttgtcttcttttatagtttcctatagtgcagtcatacgctatgccatgcagcttgggaagagtgttcttttagtagttttatcttttggagaggtttggtatgtaagatggctgaaccataagaagcataatcgtttcccaatttagagtatggggaagaagaatagaatttaatttacttttattttgtatcattcatgagagggagccccatatatacaatgtgtcgtgtgtgatgcaacttgggtgaaagcttggacctttgtgtttgtttcaaatttattctattcccattcattttgtagatcttaattatttaatatatataagttacttataatttacattttatgaataagtaaacaacttttaagtaatattttcaattccacattgatagatttagattctcaaaaagaatcacaaagcaattaatttaaattaaagatgaactttatttatatttataatattatttttcttctctctcttttgttctggattcttattacatgaaattcaaatctgagcataagacctgattgattcaatttggttctgttctttttttaagagaagcttgagctttttcttaattcatatcctttaactttcatgtcagtcttgactaatagaattggacaataatttttattttctaatctcaccttcacctctttgaattatttgggttggaagctctgaagtcctattattcaaaatgggaattagaacttcgctcttaataaatttaaggtgaggggttccaactaagacttacatgagaattaagggtgagaaataagtggactttgaatgaatgttaaacctaatgagcaatatcattattattctcttagaacagttatcaaaaaaaattttgaaatgttgaaatgggttgatgcaggttgttgctggtgctttattgggactcgttgtggc

SEQ ID NO: 8668 - DNA, 8061 bp, Carica papaya
  Intron number 6 from transcript evm.model.supercontig_7.18 4 (locus evm.TU.supercontig_7.184) derived from phytozome v7.0 (chr-ID supercontig_7; pos 1875595 to 1883655 reverse strand)
tagaagaaattgttcactatcttcgtgatccaaaggtaaatgtagtttttaacacaatgttcaatgattgctgtctcccaattcttgccctgtagttgggcacggaaaatttcactcatggacaagcatattgctgattttaggttggatatatgatagtaatgcataatgaaaaaaagttacaatgggattattctactgacaaaagtgttcttatatttgctctagttatttatttagtttttttcttggttatttacggtatttagggaataatagttatttctattaggttttagattagagtaggatttgcaaacttttgttttcatcttttattattttggcattatgcttatcagcttgtccttaaggttgtaatcaatagctttatcaatgttactgacgtagaaatgggaggtaacattgaattatgtatatttgctaaggtttttgttccttgttatatgtttttctctggttatcttcttattctccttttgttttgcttgtttccttgtcccatgttctccacctctattatagtagtctctcaaaatgggttgtcctgcattgtttggtattaggcttatattcttattccattgttccactgcaaaatgagagaaaaaaagttagattttcatatcccacttgcagcttgtcaaatgaccctgttcttttgtgaaaaaacggaaaaaaatctttaaccataaacctctgcatgctgttggttctcatcaatccatcttccctatactgttgttttggcgccattgttgctgtaccagagacagaggttgccagttagcaacttgctaaaaatgcttgaaaatccagttgcgctaattgaattagctttcctctaccaacaaatctgtttttccgttttgatgtcgaaaatctctctctctaaatacgattaaatgtttctttctaggtgcaatgtcaaatgatttgatatgcgattttttcgttgagactacattagcgataatcttttgtctcaagttttggtagatttcttgcaattaccacggagccacactccatgcacctacatactagatagaaatgttagaattagtggtttttgttgcttttttttttattggaagtcttatgaagatgaagtatgctgtgatgcgattgaaatgaaagcttcttatttcttattggcatgcatcggtttaatccaagtgtcctttgtagtcacgtaagaaatatttattttttttcatgcgactgtaagaaacttattttgcaagaattcataaaaagctcctaataaatgagcaaactttttgatagttagagaagagttcacagctcaaatgatgggaaatggaaatttaaaaatatctctacaaaatggtgagccatgacaagaggaagagttatgtgaagaaagaatggaaaataagtaaagaaataattgaaggatatgcaggggaacacataagtagcgagtccaggaacacatgaaaaaattgaaaagataggtcccagtgataataaagttcatagtgaaggtaattgaaaagataggtcccatcctttcttccttctagctctcttcatctcggtgaaagtcttatcaggcttttgaataggctgtatctcagggggtcggccgactgggctgagctaatgtccttctactgaaatgtcattggatgcaaccaaaagcttcgtcctcatagaatcagaaatcctttgacattgtctgtgaaggtaggaaactggaaggcttaagaataactgagaatggtaggggttcccgaatctcaatttccttcaacaagagtgaagccaaatggcttgtcgatgccttcagcgatttctactggctcaaaggtggagcaacgtgggggaaaaaattgctgaacggagaccgatgcctctttatcgctctctgctggaacagaaggggaacagtattagtcttaccagaggagaacggtaaatctgtcaagacgcatttttataccggagggttttcaagcagggggatggtagtgtgtgtagaaatccatctttgaactcctagaagtccctcttgtgaatccattcatcaaacccaacttatgaatgggctgtgatgtttcggattcgaaggttccccctcctgtttggtgtttctctaatgcccccactgtaactgcagagttcgcggccaggtagtggctggtggtgcaaaatccttttccaatgccctgaaatcggattccagatctaaaatacgagtagaacagaagctccccaacccgggtcttttgaatttcaaatttgaaatgttgaccctttcccagcactaggcagggtatcctctccctctgggtcatccaagtccatcctcaaaagatccaaatgaacttggaccgaaaaggacaaatggattgagtatattgacaccagcaaggaagcgggtcagttaaaagtgccctgctcaagtaaaccaaaactcaagtcaagaagcccaaaattcaagtggaggcccaaggcagctctttaaaacagtcgaatggccctgttttggggggtatgtctgcagagagtaaagacactttcacttcatcgctcgttgaagctaaccctaggcgtgtctgtatcgtggacatggcggctctgtgctcccaagataagtatgtcaattctgactctcctggtgattttgcttttatcactgagtttttggataaaaccattccttctccgcccttggttcccgattccaactcacacattgagccaacatttattgaagaagatttacccattccggtttccaaagaattagtggtgctaaatcatccactcctagtgtcggatgaatggagtgacacccaaatctacttgtcttgggtgcgtcaaaacatgaaaagcgtgagccaaatcctcagtgtcacatttgaaggttttgaggaccaagctcttgccctatttgcaaagttggagaaagaaacagaggaaaggtggaggacacaccacagaccaaaaaaccgaagaaaaaacagaatgaaatgggggttagggaactgaagagactccagttttcagtcaactatgacagtaagaacaggaagggcagaggcgaggaggatgattcagtaatgtcttagtgctagaaaaaatcatctcatggaatgtcagtggactaaatgatccaaagaaaagaaacattatcggaggttctgtctagatggaagctggtcattgtgtgcttccaagaaatcaagcttcaggacatcagcgagaaactcataggcagcttgtggtattttagttctgttgggtggaccttctcccttgccaggggcacttctgggagtattttaatcatgtggaacaaatacgttgtggaatgcatagagtgcttgcctggggatgtcactgcttcctgcctcttcattaacaatcacaatggctgagagtggtccttcactggcatctactgcagaggcaatgactctgagcgggcctgcctctgggaagaaacttctacttggttgtctaaatggggtaagaagggggtggtaggtggggatttcaatatggttctcagatgtggggagagatccaataatctatactctgcctctatttccaatgtcttccagtctcatattgacaatcttggattggtggatctttccttgaagggtggtaactgaacttggagtaattacagagagtcatattcaagaatagacagattcttaatcagcaacgagctaatgctggactatcctggcctctctcaaaaggtactctctagacccatctttgatcatttccctgtttgtctagatcttggtggtattaaatggggctcctcctcctttagaatcgacaataaatggctcaaactggatagttttaaaaccttggtggaatctgtttcgaagaactcagtgtgcaggggttctctcagttacagaattgcaatgaagctcaaaaacttgaaagagcaaattaaatcctgggctaagactgctgttagggaagaggaaatctacactaatgggctatcgacagaacttgatcatctggatgagattgagggagattttggtctgtctattgaagacagggataggaaaaattctctaaaactcaatctggaagctatctcttggaagcaaaaagttagggagaaatggggttaaaagaggggtataaaagtactaaatacttccattgccttgttaattatcgcagaaatgttaattatgtggaagagctctttattgaggatcttgggattgaaggtaataatgaaatgagagaaggtgcttgttctcatttccagaatctgtttacagaagaattttgttggaggccaaaactttctaaccttcagtttgataaactcaacaattttgctaacgcccagcttgaagcagtcttcacggggaaggaggtatttgactgcctgcgggagagtgatagtgataaagcacctgggactgatggcttgctgaaattctggggtacagttagagacgacattatggacttcttcacagactttcacaagaattcttagtttgtcaaatctctaaaatctgctttcattattttgatactgaagaagaagaatgcatcaaatataaaaaaattctgactgatcagtttaattggctgtgtttacaaactcctctctaaagttgtggcaaatagattgtctaaagttgttggctcaattataggggaaaaccaacaagcctttgtttatgggagacaaataacagatgcaattcttatggcaatgaggttgttgatgatgttataaggaacaaaagaaacagtgttttatgcaaactggacatggagaaggcctttgatcatgtatcgaccacatgctggtgaatctaggctttggctgcagatggagaagctggattagggaatgcatctcttctacaagttttgctgttataataaatggtggtcctcccaaattctttaatgcctctaggggtttaaggcaatgtgatcccctctcacctttattgctcatcattattatggaagccctcaacaaacttgtttcgtaggcccggtcattgggcctattggaaggaattcctgtgggtatgaatggtcacccaatgaagttttctcacctattctttgctgatgatatccttttcttctgtcaacttagcatcagtaatcttctccacctcagatgcatcgtcctgtgttttcaggctgcatccggattaaaaatcaatttgaagaagtctgaacttatcatgcttgataataactcttcggattcacttgctggtgttcttggatgtaagaccgctcaactgcccatcaaacatttaggcattccccttggtgctatgcacaaagacagcagtagttgggaaccaatcatcgacatctttcagcattggcttgcatgttggaaaagaaaatacttatctaaggggggcggctaactctaatcaaaagcactttatctaatcccccatctactacatttcggtcctcaccattcctaagaaagttgccaagaagttagaatccatccaatttcggttcctttggggaatgatgactctaacagaaacttctgcttggttaattggaatgagatcaagaagtcgatcaaagcattacatgaaaagtggatatggagattttggaatgacaccaatagtctttggaaaaaaatcattgtttgcaaaagaacgagactggataacagtctgtttgggctcagcctttggaagagcattatgcaatcctcccagcctgtgttaaatggctctaaaggggtggtcagtagaggtgataagcttcggttttggcaggatgtttggtgtggcactaagaactttcaaagctgtttccctctcattttcgctattgccaaggataagaccatgcttgtggagaatgcttacggggttagcttacccttggtgtgggatgttttagtcatcagaaatttgaatgactgagaggtgtttgagtatgaaaagttgattcaactactggccaacaccaaactcagtactgctgatgacaaattaagctggaccctaagtaaaaatgggcgttttccgctaaatccctgtacaggtactctgatagacagaacgaatccaactcctgtcttccctcataaaatcatttggaaaccacttactcctccaaaaatttcattctttgcttgggaagctacttagagatgcatttgcactgtggacaacctcatgagaagggaccttgacctggccaactggtatgttttatgcaggccgaatctggaatcttacaaccacttacttctttggtgtccggtctcctatgacctttggtcatccattcgtaagctgcttggtatctcttgggtaattgctgggtctgttaaggatgaaatcttagcttgggaagacctcaaaatgaacaataagtggcatagattaattcctctaacaattttatggattatttggaaagaaagaaattgtaggatttttgagggtaaagtatcaaactttgccatcatcaaggatagatggctccatttttttggttctactgtacttgttcacaaccttgatctttttgatgatttaagatctattgtagatattctcacagatctgtaaattctatatttttgtacatgggtcacgcccccttaatgtcatcttaatacaattactcacttttatctcaaaaaaaaaagaagaataaatgttattggcttgggtaatgtcatcgagaggaagagattaaggaggtcttgtctaggattggtccagatattgtctcatgcattgtcttattttaggagactaaaaggactagtgttgatgcgtgcttttgttggttcaattgaaggttctttctatatcttggttttttgggacattaaagggaaaggttattgatagttctcttgtttttatggtcctacacatcccagcactaggtctttctatgagtagagttatcttatgcgttgggtttatgcactcctttttggtgtgttagtggtgattccagtgtctacacagattcacatgagaagattgaggggtaatagagttatttctagtatgagggtgttaatttctttacccacaccagggtatttctcaggatccacattctaagatggaaggcttgtccagattttggcatttcatagataattgaaggagttttgagttagttatccgaaattgtgtgatgagtctcttgagatgttctctctggaattgagtgattttaaagtggcgaggagtgatgggggaccatctagcatacttttttttttttttcctttttacatatttattgttgggttattacattgttaataagtttctatttcttattatgtatgactatctagttgttttcctatttctatttggtattctagacagttggattcttaaacacctacaaaaacataggtgatactatattgtaaatgttgcaattgtttatgagtaaaactatacagttatcctctcgttgatggaatctgcttgtcaattagttccgatgtactaaatcaaaagagctttcagatagaactgatatatgtcctgtttattctccattccttcatttttgttgttttcttttttttcctagttatttgtccaatcatatcatattcaaaatgacctaattcatctcataagtgatgctatcttgctcttcaccattataccttttatcactacacagttgaacatcttctttgacaatgactgtaggaattcaaatccttgttcaaccttcagaaattttgttggtggctagatatgtacctaggagcaatatcatctcatttacaaatttaaatcaggaatgggttatatttttttgtacctaggctgggtttattgatctgggaacttgcagtaggttttcagcagtaaacaggttgcagactgtgtgcatagctgtttattcctcgactgtatggaagttgatatatatatatatatatacctctaatttcttgttttcatgtttacagcgtttcactcgtctgggtggcaagctcccaaaagg

SEQ ID NO: 8669 - DNA, 1880 bp, Carica papaya
  Intron number 1 from transcript evm.model.supercontig_166. 14 (locus evm.TU.supercontig_166.14) derived from phytozom e v7.0 (chr-ID supercontig_166; pos 76938 to 78817)
tggttcggcttctgctgcagctccaatacaaggtacgctttctctcgtcttttcttcgtcttcttcttccttcacttgtgattactaggtaagatctggctactgcttttcttcttcacatttctatggattcttcgtgaatgcaatttgatttagaataactacactctgtgtgtgcgtgtgctaattggttaacggtggagaatacggttagaggaatcgattgacgaaaaacaaaatcgttccaatcgtttcgttattagcatggagaacggtagtagatcttaacacacacacacatacaaggtagcggtagtgataatatactcttcttttcgcactgtaagcaaaacattaaataacatttgattactcgtatcattcattgcagaagaaaattgggggtacgcacttagatttctctttaaaaaaaaaaaccttcctcagctgtttggcgcttgaaaaatcaacttctcttagacttgttttacggccaggttgtaaccaattacaagatttttcaacttcatttctttgttcgctgcttctgcaaaagtttgtccgggcctaccgcggagatatttcttttgtgatgtgtctagtattcttgagcaatccccacttgaaacaaaagtgtcttccacagtcttccccgaccaaatcatcccaatcaaatgaatcctctgttttctcctcatttcctgctgcaattttgaccaaaaacctcttcattctttgaaaactttactcccacactctaattatatatgtaatccatcttcatcaaccctaatttttatattttcgtgcataaaaattaactgtaaatgaaactcgctaaagaaacgagcaaaggaaaaaaggaagactgggatgcggtgggtccctagggttctttttctcatcaatagactacatacattcccgccaagcgccaacactgagttgctttttaccttaatttaacaaaacgacagcgtagcagctttcagtatgctattgctaccgtgttttttttttttttttttaatcaccgtcttaccttctttttgactttcgagtctctcaagtcgcttggaaagctgatcccaaaacggtgcgaattggtcccacacgcttaacgcggattcttttctcaatcatttcttttctcgcgtaaaaagtgatgggcttacagtggtttcattttttagaaaaaacatgttttgctcttttttccccataaatatttagtatgtaatgtctttcttcctttttgaatttttatcagatgcctcatgataattgtttagatgttaagtgctgtacaattcttgtctgattaagtgatgggtgacggtatatttgccttttaatgtagtcaatatcagtatagtattttgtgataatgaagtatatctactcttgcattccctttatttatttctcgaaatatgcagatgccacacattctgtgtgatttaacgatgccaagttgtttctagctgtaacccataagccatagtttggatattattttttagtattgtagttcgaacgaattaagaaactttagaatttgtttaaattttttggacattctacaaatttttttttaattagtcatttctaagggtcatgcttggaacacatttgagatttatagacagttcattttgtaaagtcatacttacttaaacaagaacataagaaaaattctaaacaataagtttttttaaaaaaatttcgtataatctagaaaatggtgttttgaaattttattaattttaatggagtaaactgaagaatgctcagtcatgacttaatttttgtagataaaatttttaaagtttagaattgagaacttagtggggttctatttttggcaggtttggtagtaa

SEQ ID NO: 8670 - DNA, 1860 bp, Carica papaya
  Intron number 1 from transcript evm.TU.contig_31438.1 (loc us evm.TU.contig_31438) derived from phytozome v7.0 (chr-I D contig_31438; pos 4189 to 6048)
gctacaaaaccttcaacaaatacaataatcttcaggtaaaatatacatataaattgtctcttatctctccaaatattgcatgaaaagtttcactaagtgaccactatatataaaaaccttttctttcatttctgttctttttactaatttcttgttttttttttcttttgatctgaaatttggatattggccttccaagtgaataaaaaaacagtgtttgtgtgtgtgtgtgtgtacctatacacatcttatcttccagtattgcgtgagatatgagtactataagccctttcctttcaccttctctctttggtcatttctgttcttttcacccttttctatttcttgattcccttttgacctgaaacgttgtatatgtcttagccattagtttgagttacatccatgtcacattcaatgtgacatgaaagctacatagagagtcttttttattaccccacttgtttctgatttattttcttttttacttttatttttctggattggtttaaactgtagagatgaaagaagaatttctctcattctggctttatttgtctcttaagttttcttttctttctgcatgcttctcggtttccagatcctatctggacataactgcatgactctggttcaaaataagatttccattagtaaatttaatgaccatttttcttgtttaatatgtatatatgtatatatatttacatatatgtacgtatgtataactaatgaaattatatttcatcggggttttgatatattgaatatcgtgcaacactcagttgcaaattaatggagggttaaaagtaaagagactcatgataagatttgacagtgcttttccagggtcttcagatcatgatcatcatcaacaaaatctcagtatcttattcagtctgttaacaaacaaaaaattgcagagaaaaatttacggtgatcatcttcttttctcatatgtctgaaaaagaaacaccctggaaatcagatgagttttaactttataagaataaggaaaatttcatatcttgctgtttcacacgccaagtgaacgttcatgatgtatctacacacacataattagaattgaaactgtataaaatatatatgattaaaaatatctatactaattaatatagcctgaaagattaataacatgaatatcatgatcactttgctgcagttcttatatatcatgagtaaattgccacttggaatatttaccatattttaattcaatttccaacaatgaattatttcattgttgctcaatctcttattcttaatattatcagcttgttctattagttcatgcattacatacttaagtatatgcatgcacacacaagacgtttatgaatgtgttatttattacacatacatatgcattaccaatttatgaatgtgttatttatgagttctcagtcttatttggagatctatcaatatataatatgtttcgttttcatttagtaatttcctttccttcatataaatttctatttatcattgatttgcatctagctactgtcctttctatatatatatatatatatatatatatgtatagacattagatcagtctataatttttgcatttgggtgtaatacgcttcatttctatttagtaatttccttcatataaatttctatttatcattaatttgcatctagctactgtactttctatatatatatatatgtatagacattagatcagtctataatttttgcacttgggtgtgtttgcttatgtgggtgggtttgcttatacatctttagagatgtatatatatatatacacacccaatatatgtataacatatatataacatttttgttaaaactgtgtatgtatag

SEQ ID NO: 8671 - DNA, 798 bp, Carica papaya
  Intron number 8 from transcript evm.model.supercontig_26.1 27 (locus evm.TU.supercontig_26.127) derived from phytozom e v7.0 (chr-ID supercontig_26; pos 978923 to 979720)
tgaatttgaaggtcttaagttcacgtgctcatcaggtatttgaatcttctcaaagcatagtctgaacttgttgttttcttatatgtctacgatcttgagattgataagttcagaatttgtatctgatactaatgattcattaatcgtacgtttaattcattgaatggaataaagctaaaatgttattgttattcatcatgaataagtagtagttcattatagtacagttccattagcattttgtaggttataagtagttcattgtaacttcatcaaaatatttattaatggttaatcataccaaaaatacctttatactcaattttgaaaaattaaaaaatacctcaattaattaaaaaaattcaaaataccaaaacacatcataattataaatctataaaaatatttagatttaaaaatttttaaaaattgataaattaattgaaattcacattgctgagtatggataaaatggtgttaagagtaacttcgtgattaggctagattgtaatattctttcatgacaccttacacttgaattagtgttccaactttcttcagtagcagtaattaaaagtaattatgattaaactaatcaaacaattgcaataatggttgttgcatgataggcattacattcctgagatattcctaggttgtataatgaaacaaactgccataagtaatgcacttaagagtctgcaagctgccatacctttcctcatcagatgcttttcagcaatcatgttaactagaaatctttagcgagcttagatgttttattatttttatgcaaag

SEQ ID NO: 8672 - DNA, 1151 bp, Carica papaya
  Intron number 1 from transcript evm.model.supercontig_80.7 6 (locus evm.TU.supercontig_80.76) derived from phytozome v7.0 (chr-ID supercontig_80; pos 583451 to 584601 reverse strand)
tccccttctggtagtcatccgatttttatctatcatgtattggaaagcaaatggttttctgggctctttctttggtttttttttcctttttttttttctccttttgctcttgagttattgattattgaggctcatttgcttgttacctcttattctcaactgggtatgtgttatattaattcgattttctttatcattatacttgttttttatgctcatttgcttatgcatgtctggtttctctccatggtcctatgtatcttttatttttgttgggatcaattgtacggtcttgctgtttcgttggttgtttgatttccaagcttgtatttttaggattaagtttttttttttttttttttttttcttttttttttcccgtttctctgatatttgatttgtaggtctgttcctgatgctcacacgttcattcttctgggccgttcgtctttctatactgggctgttcattattctcttctagacagtctctttcagtttgattttctgcaagctgttgtgcaaaatgacttgtatgtgtttgttcttgtgcgcgatttgtatttagttttgtatattcttttggattctgttctcctgcttacatatttattgagtaaattgcacctctacataattcttagaatgtttagtttctgagtgtttgtttccgactttctgcagtgtatcttatatatccccctggctcttcagttcctgagttactctggcttggagtcctgtatatgtttatctgttgcttgatctatctttcttgtttagttagccatgaattatgttgatttagctgtaagccttttgatattggacttagtccaatacttccagttattttctcaaaaagtaggctgctagacaatctattaggccacagagaatccgtatgtcttactgtaatgctatttcctaaaatcttttcttggtaacttggtcactttttgttgaacaggaaggaatatatttgttagtgtgagtttgttgttctgtttctctttgcttctctggccattattattcatttcccatcctaatctggttattcttctggtttgtttctctagttggcagtcttgccattgatcaattgtgtgtttgcgtcataatatgcgtataggtgttcaaaaagagagg

SEQ ID NO: 8673 - DNA, 1404 bp, Carica papaya
  Intron number 5 from transcript evm.model.supercontig_117. 56 (locus evm.TU.supercontig_117.56) derived from phytozom e v7.0 (chr-ID supercontig_117; pos 553422 to 554825 rever se strand)
taatattccagtcacgtttacatcctgaaagtgaggtgagtattgtatatgcatctttattctcttaatattaatctagttgcttgttatacggtggaggttgcttgtagatttttggagttcagttagtagattggactcctggtttctgatggtttcaacatgaattttctacaaaaattttggcatgtaataaaagaaaatgttctcaagtttttaaggaattgcatgaatctgaatcttttattaaattctcaaattcttctttattggtactgatttttaagatagagggaatgacaaatattaagaatttcagacctatcagtttagttggaagtgtctataggctaattgtgaaagtattggctagaaggacggctaaggtgatagttaaaatagtgggcaagtgtcaacatgcttttgtagaaggaagacaaattctgaatgcgactcttgtggttagttaggttgtggatgagctgttattcagaaatagagagggtctcttatgcaagttggatatggagaaagcctacaatcatgtaaattgattgattatatattaaggagattgggttttggggataaatggtgtaggtgaattaactcttgtatcactacaacttcttttgcagtcatggtgaatggtggtctattttatttttgaagacctccaaaggtcttatacaaggtgagctattatctccccttattttttattgttgtcatgaaagtcttgaataaaatgttgctaaaagccagagagctggagtgatttaaaaatttagaggtgagtgagggtgaaggaggaggttgcttgatgatacttttagtgtttttttgaacggggtgagagggcaatgcttaacctaagattgtatttactgagcttccaagtggtttttggtctcaatatcaacttaaccaagtcaaagtttgtgagaatgggtgatgggagcgatgctcctaggtcatatatttgatatcatatgaatttttctatatgtatgtttgaaaaacaaaggatatgcttgtttttactatctgtactttgccatctatcttcattctgattgttcaaccattatttaatcaaatcaatttcatggaattagatatgcaataatttactaacctggtgaagtaaacaggtcgtatagttatacttttttctggcatcgtaagtaagaaattgtctttaatgaaatacctattttttagactccatatagcttatgatgttttcatttgatgaacaatagttgatctaccagttctcatatttttatttcacggattggttctgcatgcatacatcttcttgttcctttttcacctctgcctcagcctttagcttttgctatcttttagccatgatgttctgttctttttcagagcaat

SEQ ID NO: 8674 - DNA, 2625 bp, Carica papaya
  Intron number 4 from transcript evm.model.supercontig_51.1 5 (locus evm.TU.supercontig_51.15) derived from phytozome v7.0 (chr-ID supercontig_51; pos 210508 to 213132)
gaagatttactaggaaagcattgtccaaggtggttttattttctatctttctatccaattttttctttcttttttgaaaaatagagcactaacatacctgcagttcgtattctgattttgttttttaaatttcttttaaaaacagaaagaaacaattttttctgggggctttgaacgtggtagtatcatttggtttacttaagatatttgaattaattgggttaaatgtaagcatcatgtgaattttagcctagtcttctttctataacagaagttattcgcctgactatttggtggaaaatttactagggagcattgtccaaggtggttttattttcgattatttgttagatagaagaagaaatattaaaaaggtagtaagttgttacattcaagatagagaggataaggtatcctccagccaaaacagtgacatgaaaaagaaatagagtgaaaaaatcagaaaaaaattagtaactccttttttttcttcacaatagatgagcccaaaagaacattaaggttacgtctgaagaaaactaggaagagcaccctataccaaagtatgtacagtggctgaaaccattgcttgaaaattctagcattctgttacagtggtaagatctaaaatccagcaaaagtgaccctccacaactaataatctcacaaagatatccagctcaggtcgacatgcgcaaaattcccaaatgtcaaagacggtctaattaaaaccttttacacttggtcacagtgaagaaataagtggtttttacagagctccaggagcatatcaaactgatatcaatggattaagcttgttaggtttccgagcctgaagcaaaccattagcattaatgttgtttaggccctacgatccaataagaattcttattgttagagtgagctttccctaccaaaaggagtgagagaaagttatactttgtgttttagaaggatgagtaagagattgaaaggagaattgctggtgtcaaggattctaattttattcagctcaaggagagggtagaaagaataaaaaatgattaattgggaacacctatcctacaatttttgatagtagattgtttgaggaaataatagaatagatataactgggcaaaaaagttttactgttatctttgttgttttaagaattccataatctggagatcattttcttttgactgaatttagggatctagttgtcgttacatgttccgaggattctgtgtatttttaaatttacagtatatgacttttggtttttgaaagagctgaatgtcatcagttaaaaaaactgtagaagttcttaaccaatcacatcttctacattaccatacttctactttgacgcagatgagtatcataactaacaagcttttcaatgtccttaccgtatcttatttcattaccttctagtaatagaaagtaagcaataaaccataagattcttaagtagtagttgtcatcatactattgcctatatgttgtgggacctagagattctatctcatggatgatcagttatgtttgtgtttgtcttctaatttttgtgatccgtcatcgcgcatctcatgttacatgtagtttgttatgatgctatgggatagcaacactaacttttatcgaaagtcaattgcaacagttttttaaatttagtaatgtagggcttgccttttcctattatctaagtagataaagataaaataaattctatcatgtatttgatggagaaaatggttttttgagatactgggaccttatatactgaggcttttggttttttgaggtactcgtttgaagacaaagatttcgtaagatatagtaaaaatggcatatggtgatgtatatcctttgaaatccttatcttgtctgcatgacatcttctgaaggtgaaaagactttgttatgaattgtctcccaatgataattttctttcaactatgtgcgttgtttgacaactgcatttggattggattttggattttgtggcctaaatgactgggcagttggcaatcagtttgattggcctccattaggtgatgactggatctcatgaaacttaaagcttgagaattaaaggagaaacccacaaagaagctcatctcacttatccttctttccattttttggccatttggtagatttgtggaccttttgttccatacctagctactttgtccaaaggtcgtcctttccataatggatatcatcttgggcacctcatagctctcttctgattctcggttgtacccttttcttctccatgccatacttttatggtgtcatcattcctcaccctttttcctaaaattgggttacttgccggcatttttctaaaagaaactagatttctgtgatatctattgtgttgattgtttgaagaaactagcgttctttaggattttcgtattaatggttctctatctgctttctatctgtatgtgcatttcagactaaaataattctttaatttttctggtaacagttctgatgtacaggtgctgcttatttgcagtgctggaccttttggttctacttttttttagtgactctgcattctgtccagatcttttgcaatcctctgacttgttatcttgttttgcaggtggattgccaattatc

SEQ ID NO: 8675 - DNA, 5396 bp, Carica papaya
  Intron number 4 from transcript evm.model.supercontig_52.4 4 (locus evm.TU.supercontig_52.44) derived from phytozome v7.0 (chr-ID supercontig_52; pos 394280 to 399675 reverse strand)
aaaaggtgatgattctttaacttctcttttcaaattctccatatgtaaaatgtttttgtctgagtatacatgccttatttctggcataggaggcggtcaaaatcaattgttgctttatgaaatcattaggaaaaaaagtaatattcctgagcctctggattcgattttgatcttgaccattactttgggtcttcattgattgcagagtaagtgagaactaatggtagcatctataaactcatcaagtggagcagatactccatttacttttgtccttgtctttcatattaagtagctcctcctctaagcaaatataacaagttgttcagaaggtgggaggaaaaattaaaatatttcatgacaacacactatagggacgtcttttgtgcttttcatcaacaaaatttgctcaaggcattctaatggatcatgctacttgcataacccctaataggctagcgcatttaactgcattttctctttttaaaaggaaatttgtgaatataatctataggggagtactttaggaagactatgccctgcaaatgttttttacacaagattctgaatgacctttttcttcttctcctctgggtttaagataaaacatcctgctaacttgagttttagagagacaaccattcttttcattttttatatgtcagtggtcacaactctgcattaagttctgagagggttgtgagtgagaggtagaagtagaattacttctcccgaccataaggaatggggttgctggagtacatagttgtcaggtcctgagtgatggcttgttttggtgagtctgtccatttacagataaattcatgagacgagccctttcaagatatggatagttatggcttgggtaccttgttgctccaacatgccttccgtcaggcttcccttttgatgagtaagaatacccccagtttccattgttgcgtattcattaaaatttctttttgattcttttttatggtaaagaaaattgtattagaatgacagaaacgaaagttggaggataagatactgtcatcaaagaaacgaaaacatataacatgaagtcaccaatggaaaataagtttagacagaggaaaaaaacatcagtgtgaaatgcaacctattccattcgcatagtagacaaaggcaccccttgaataaaccatgaggcttgacccacatagaagccatgaatactactgtcccaagagccaaactgagggtaaagcacaatgaaaaatcctggaattaccatcctctgggccttaggccccttgtttctcccaatgccctaaagatcagaagatataaggcatgattggagcattagaagtgttatgctgagttagaaccaatccgaacagaaggaaaccatgttgacacttttcccttttgtccaattgattaaacacatttttgtctttctaacgatcattttcttttgatctgtttttgatcatgaaaggaatgaaagatctttctattgaggttaagtatttcagaatctcaattacggaaggtgatagttcattcctttaatattaacatatatgacttatctaaacataagagttttagaataattttttgtagtatcgaaggtgtgcagtggctaaaggacatgtttcttagtctaaatgcaccacaagggagtatatttcgcgcaacatttagagacacaaacagacatttagaagttagacggaatgctaatggggcgattcgtagttctgtctgaatattttatgggaggaagagtaaatgggataaatgttcctgaaggataggaaggaacaaggtggacgtgactaagcagagcccctgatggatctgttccaaattatctataacttgaaattaacagagagctattctctgttaattttggttaacttaagacaaaaagattcaatgcatggcaaaattttcaaagagtatttcaatacaatcagccagaaattatttttgaaagaattgacctacactccagaaaaagatgtctttcctgagttggattttcgtccaggtcactctttcttttggagactttctgatctgcaatggatggaaagaaaatgatggttaaagccgaagctcaaagttccgtagtgtaaggacacacatgattacattctactgtagtttgagtcaacggagatcgactgtgataccaatgtggatctgactgttaacgataacaatgatcaggtgaaaggtaaccacaatgtcgtttttaggggccagatctagatacacaaggagaacaattcagcaaaggccttgtgccttgtttcaggacaacccctaaattccatagctttgagtctgctatcctgatcatgatttttctatcctcagagaaaagattgatccttataggtcggttgtgggtaacgagggattcaagccccccaacagcatatgtttagcaaggtcttatgcctcagtaaccaaatcaatagcttttttaacaaaagaaagagttgtttctttttagcttggccactagcaagctttgcagtcttcctgaccttaaaatttttaatatcatttttgttttaggttgacagagaattactgtttttgtcatagaaaagtaatattgttctctctcccacatttcaatcatatagccgaagtcgacaaaaagaattagactcacttgcatgggaatgacatcacacaagatggtgtctccatatgtaccacagcggaaagaaacaatgcatttctgagttaccagaatcgttgtctcatcgatccatactaccttgtatggttgtggatctagttttatgagacatttgaggtgctctaccgttgagatgtacactgcattcatggaacttccaccatcaatgacaagcttttaggttttaggtccacaaattacaagtgtttggaataatgtagtatgacgctagtcatctttctcaatctgagagttgcaaggatgttggattttaagtaatcatcatcaagggaaacatcatcttccctatttgatgcatttctttcttcttcttcaattccaatatttaagttatgccttgataatccatatgacctggacgtttctctaattgccaatgaggtgatggaggatgttagaagatcaagaactaaaagattgttgctcaaactagatttcgagaatacttatggttgtgtcagttgggatatttttagatattaggggcggaaattttttggtgatagacaaaggttttggatttgggggtgtatttcttatgtcatttttgttgttttagttagtggcaaatctagagattggttttatggacggtgcaagttgagacaaggtgctctcttttcttcctttctcttcatggtttttgtcaatgttctcaaccttatattttcttgagaatctgagagaggggtgtttgagggtcttagggttgttcatgaaagagtggaagtgtcttacctttagtttgctaatgatacaatttttttcttgttcttaaggatattctgaattctacaatgtgctcatattgtttattcctcattctaaattctccaattccttttatcagcattaggctcaaaagtcttgaccatatccccaaaagtagaaaaaagtgtcttgtccaaaaacttccttattttgtggtttcaacttactcttgagaaaatgaagtttgtcttgaacttaaaacctttccaatcaaatataaattttattaacttctttacccatgctcaccataaataaaagatctgatcttaactcattaactcaaccgaatattttctttaagaagattaagaactaaacatatttttccttgatatacattgatattattttagacacaatattgctaattttaattgatttttcatgctaatagcagcccactagttttggcaatagtatgaaagctttatgttatattttatcttgataaaatatatatacaatgttctaaattaaatgaagtgaactggcccgggctaatttggaactaaaacaaaaaaaagaaagtctgcctaaaatttttagccttagtccatgggtttggaatacatgctcatgccttcaaaaaaatgtggattgggctgctagggatcctcaatttgataatgtcaattaaaaatgatctgatattgatgttgtcaattttctgctaaggaagcggctgatagaaaatcatgtgggcttttcaagttgatttgagactttgggagtgagccctctgctcgagatgtccagttgccaaaagtttgatgcctgagtggccattgagattttcggggtcaagtgttcaggggctactaaaatgtcttgggattgggtgtagatagtagctcttttggctgatgagcttgtgccaggtagggagttgtctcttgggacatgtggcatccattgagcgggctgggcatagcactagccagacctccctgctctcatatcatgctagaaattgaattgaaatattgaacttgatattatgttggatgaataattggtgtatttatagggatataagaaaaaaacaaccaagagtagagtttattttatacatcaactatattcagtccaacctatatagtatagtaactagataggaaagactgttcgacaaatatcgtactatactattattcatattatttagcacaccctagtggtagatagatatcatcaagaacctctctccattgcaatgataaggcttaaatgataatgttacacaggctagtgggtctctagtctttaaccttaaacagttctttttaggaactgaagtaatgaaagtggaaatcacatcggtttcaatttcctcattaaggtagaacttttgagatacttttaggatatccccttcacaatgttgcaacagatttggaaaacatgcaatgaaaaacagcaactttctatttaagttagaacttctaagataagtctaaaatatcccatctaaaattccacacagctgtcctgacttcctttcagaggaaggtatcactttggaaggacatgtttatgtctacttcgtttgtctatattctcccagtagcatgagttattgtttgactgtcaaattttattttttaattttttgaaatgaaatagcatgagtaattgttaccaggcactgaatgtcaaaatcaatttatttccttgtttagtgggagaattctgactaccagcctttagataaaatccaattttcatagagcgcctggccgtggtagattggggaggtttaaaaatcaaatgcattatttgcaagaattagttcaatatagaatctatttttatatggagcaatgattttttactgtgcctatcgccataatataacttctttcattctttctcagcttggttacgtaatctataggcgggtactgcgtta

SEQ ID NO: 8676 - DNA, 2509 bp, Carica papaya
  Intron number 5 from transcript evm.model.supercontig_66.8 7 (locus evm.TU.supercontig_66.87) derived from phytozome v7.0 (chr-ID supercontig_66; pos 812976 to 815484)
aaggtaaggcaggatatatatgtaaataatttcatcttcattgttttaacaaatagtttacttttcaatcatgttgaaatttcaaggctccccatcactgataaatccagttgtcagctttcacaaactcaattgccggtctttgctatgtatccaattcaacaatgtcaacccccactttttgcatttgacttctcctttcgctttgaccagttggccgcttatttctcgagttacctaacatttaacgcctactactaaacaccatttgcctccagcttattaaactttttgaagttaaaataataaccttgtttttatactttttatttttgtccaaattattcatttgatcaaattaattgtcatactattgaaatttttttgatattgttgaaaaattttctatttaataccctctacgttaatataatttaacacatgatatatatatttttttattttaaatattagttaaatgtcatgtcatatactgtatcatatctgatgtaatataaaaaaaattatataattattgattcaaatatattaacaaattctgtacctgtctaaattagtttaagattaaaaaaaaattataatcctaattcactaaatccctaaatgctaagcattcttctccgtcttattcctctcatgacacttttcttcttaggttccttcactcttcagctatcaatcatgagagtgtccaagttttcctctttgtcatcatataaagtttcattgtaattgtcatcactagaacttaaatcggtaagaactcacgtttttggggttttttcgaagggattagagtccctcttttagtcaagcgagaaatgttggtggtgtttctattatttagtggatctcctaacgtgagaatcgtaggtttggtcattgctaatattgtctaatcatacactcaactttctctagcgcttggatctaatagcctctaatgtggccactatgaagtttatttatgatcctaccccaagttatcgatggccactatgaagttgtcttactgttctctcaaacccaaacattttttcttcttcttctctaaacacatcaagattaccaccacctcttactctatatttaaacccatgaattccgctacatcctcatcaattcattcctattattgtcaatggtacaatcccctttcaaatcaaccatttaatttgcctactccatatattctccataattgaatcgactctaatcacccaagtgcaaggtaaaactatttgtggacatttcaatcaattttgttcatgatatattcgtttttttttttaaatataaatcaattcaaacaagttaatatataaatttttttattgttatgtcagatgtcatgtaatatatgacgttgtattaaacgtgtattcagatcagtcaaaaggcattaagtggtaactaaagtaacaatattaatagttattaatatgaagaggctaaagtcaaattttttttaaaaagtataagaactattttaatcaaaaaattgaagtaagcactaattgacacaaaaataaatgatacaagaaccaaatcatcattttatccattttttcaacattggtcttccgttaattaaaggtattaaaaagatttttactatctctaaatattaaagtttattatattttttgtatatacgttattattgacatttatgtacgctgtataaatgctttggattcttgtcaatatgttgacaatggagtttaaaaaaattcgatatttttgttgaaaattttagttttgaccttaaaatcgaagtaaatatttattatctattctagtatataccttgttatgtttaagagaatatgttatttttaccctattatttatttttttattgttcttgaaagtatttattaattgtatattttaattttttgaagatatgtattatactagttactttttgcaaatgcataatttggaataaatttaaaatttaacgaagtgattcatttgatgagaaataaaatttatttataatatgttttaaagttcttagccaaacactgatttgatcatttcaataggagtaaagtttcttaatgtgagaaagtatttcttctcaaccatgatgtatggatagacatatatttcttaatgtcgtatatgttgcataaaagaccagttcatattggagataaaagagttgcagatttggtaaaaaaaaacacccatcattggaaattcgctaaacttttgcagtatttgtttgtttcttttacttttagaaaaaagaatatctttgatttagtttattatgatgtatagggttccaaattgaaagtataggttgtaaaatcttgtgtcgttagattttattttacattttttttttttttttatatttcctgcaggactaataaaattttatacattcatgtctatttgcgtataattgggttggtttttctgaaatatgtgatcaggagcactggaacacattcatagtagaagacgactt

SEQ ID NO: 8677 - DNA, 2811 bp, Carica papaya
  Intron number 12 from transcript evm.model.supercontig_177 .20 (locus evm.TU.supercontig_177.20) derived from phytozo me v7.0 (chr-ID supercontig_177; pos 463158 to 465968)
tcaagaaagtcaaaatacttggagacaaggtcaaggtacaaagaagagtgacatcttttttatttatatattctttgttgatgtatagaaaagctgtttggtttctgtatggaagttctgttctgcaatgtgtatgaaagttttttttttttttttggaaataaaaaatataaaaagtaaattaaaaaacaacggcaccaagcgagtgcctctatttacagaatatttacaagtttgttagcatatgatgcatatgaaagttattttgtcaagtatcctgtttcattcttctttgtcagaggatcaaagaaacgtttaggaacgaatccttacacttattgtgaggaaatatagtttttcaatgtcaattgcggagcagttgagcatgttgacaataccacataaattggaattgtatctgcacataaataaacctgttcatccacattgtgtacatgcatgtgttaaatagaggctcttagagagggaggggggtgggggggggggggtggggggaaggtttaaagaaatgttcaagcagtagacattctaaattatgtaaatcccaaaaatttttaggttgaaaacgtctctaagagaagcatcacttatgtcccatcagtctttcagtttactgcctttgcaggaaccagtagtgccactctgttcttatttgattggatgccatgcaaaaacgacaagattgctcaatctttgacaaaattatcatcttctacacctcaaatcttttctcttatttattgttctaatgtttttgccttgatttgtgatcttaagtcccacctggcttatacatttaacccatagttacctaaaatgaggtatgttttgatcatggttcagggtttggatagaaatattatagatgcaaaatttgggttctgatgggttaggcttagttggtacattattttggttcagagttccactggagaacttattaggttcattatttggatcataagtaacagtttagtaatacattctgctccattggttcttgttctttttatgtgaaagagatttaagattcaaatccttttcatagctacaacaaatatactgatactcaatgttacaaattccgaaagagctgaatatcatattacaggaattatggaaaaaaaattgtttaatggactcttgttcttcgtttgtacacctatgtctctcactgtagtcataaataatttcaattttgatataaagtttgttaggatataaatttgtcattctctctttctgtatctttttcctctcgatatcttgggaatcctactctggcagcatgacttattcttctaaatttatggtctctaattttagatatttggatcaataaacaaaatgaacccaagcgaacccatatcccaaaccacttaaaaatttggtttgtaaattacaggagtgttgactgatctcggtaactattattttgacctttacggaagaatttctcagttcctaaatgtacagccttggtgctgttcgttatgagcattgatatgcttttgcctcctttcgtgcttatattacttattaatctccaattcttttatggaaactagaatactgagtttggttcaaattctaatgtcatgaataggaataagaatactacaatgcaaatgtaatggaagtttggaaaaaaatagcattctaaatccaagttaattccagtccaatttaagtatggtattttttgttcttcctttctcaataggtgagaatataaatttacggttgttgaattgaagatatgaatgaaatcaattaaagtatgtgtcaaatatgtaaattatgattgattttttcacatcaaatggctgaaatctaaaaattggaccagaacaaaatagggcagagataagagttttagaatattttgttattgtatattggtggcgattttcccttgggatataggtttgtggaggtgacaagaagaggcatttcattgatgcttactgtgctgctgttccacaaattgcaattgtttctttgaccaactttggaaattatatttaggaacaatgaaaaaattgtaattctagcatttatgttacgaaaaacttttttttagtgaagccaaaaccaaaaaataaaaatttgcctaagaaaatacggacttgaggatgatagtcttttagcttttcttccacaggctaccaaaaacaaaatgtcaattcaaggcttgtgtttggggctcttaggatccaacatttccttaaggagagaatatgtgctaggtcctttttactctggtgctggaggatactctagtgaagcgaagtgctgtccttgttcttcaattagactgtacctgtcttagccaacgattagtttctttctgtctatcaagtgaagaaggtaaaatgtacatacaatttaccttgaaagtcaaaaacgtttgtgttcaagcatgtggtatccaaaatagaagttcatcttaggtttgcttgtgaacttaccacctcacacctgtcccatgcgaagtccacctggtagctcttttatctcttcttgtgattaatgttctccacgcaaggcgctagtggatcttggttgaacaattgtaacttggtttttagtttgctgagtacagatatctaaattccttatgggttctagatttactatggtttttgtgtttgtctgagtacagatatctaaatttcttataaattctagatttaaccaccatgaatgttccaagtcatttcagctatgatcttactttttttacctcctgtgcagaactaaccttaattaattattgtcttgaaacag

SEQ ID NO: 8678 - DNA, 905 bp, Carica papaya
  Intron number 2 from transcript evm.model.supercontig_69.5 9 (locus evm.TU.supercontig_69.59) derived from phytozome v7.0 (chr-ID supercontig_69; pos 717470 to 718374)
ttctgcaagcgatccttctctaattcgaatatcaagtaaataatattgttattttacggatttatccttcatgtttaagtagatagtactctagatgtgaagctttttttgtgattttctcttctctgcggttggggaagcagtatctcacacggaagaaataatatgatgaaaatagtgttgtttttaaaaattggagaatccaaggacgatgatgcagtttgacctcttcgctttttatcttccaaatcataaaagcaactgtaacagaattttaaacgatcagggatataattgttcattaacaaggaaaaggaaatgaaaagatttctttactagttttagtgcaatctgcttataatattaattctgaatatttcaacagtgtgattgtgatttttggaaagaattattttaggaactaaaagagttagctcggtttgatgtacggatatatcttggtagtctttatttccaaaattcgtatatctaaattcatatgtattattatatacagtagtataattacctactatgtttttaagtatctatggaaatagtatataaatataaaatggcatatgtacatgatattttataagtatatatgaaaatagttttttatttgtaataaatgcaaactcatatcatctttagtatggttttttcaagcattgttttcattttcacttggcacgcatattcttatactggaacatatatggattttggaaatgaaaattaaataacatttttattcattaactgagcctagctttctgctcattttgttttgtgagctgaagattgtgtaacattattttcttttaatgtcgtaaactgttgaacaataatatacataatttgcagtttcagatacgggtagtgggatctgcttggaggag

SEQ ID NO: 8679 - DNA, 1210 bp, Carica papaya
  Intron number 4 from transcript evm.model.supercontig_13.2 73 (locus evm.TU.supercontig_13.273) derived from phytozom e v7.0 (chr-ID supercontig_13; pos 2461253 to 2462462 reve rse strand)
cagggagttgccagcactggtaagtttcttggactttaaccatccatctaactagacagaaactgattatgaggaaggtcctgtttctgctcctgctcctcaaaaagagacccccttctgtatttttacatattttccaaatggtttgactttagcggtaacttaattatactttaagctgcaatttcctagtcaatacaccaagcagtaaagtttgcttagcaggcatagttagctgcactaaatttttcctttccattttttttgtgactttggtttctgatattagtatcacatgatcttgtgaaactcttgcaattgaaacttatatcgtgaaatgtgttggctcctatagtttcttatgttatttaacaccaattttttgcttgtaatctatgagcttaacatattttccttcttttcatatatgatattagtatcacctgatcttgtgaaactcttgcaattgcaacttatatcctgaattgcgttggtttctatagtttcttacattatttagccccaatgttttgcttgtaatctatgatcttaacatgttttccttgtttacatctgctgctttggtttgatatatgatatcgtgttgctttttccttgatgttagggaagaagcattacttcatggtttttgacccatcttttatatcaaggtgcagagtgaatcattctactaaatacaatcgaaattacagcaaattatcatttggcttgctctgaggaagagcagtattagatgattagctctttcatttgcatcagctgtttgaatttcaaatcaaattaattttaccaaaattttctttcattgatcatcaactagtttggattgatttatatttatgctacatgcatgagcagtgtttactttggctttaaggtttgatgttttaacttgttgatgtccaaagagtagtgtggtttcagctcatttccccttagtgtcagactcaagccataagatcttgatctctttaaaaatttgttagcaaagagatataactttctagtacctttgaccagagtgttgtgctgctgcatgcttggtcagaatgttagaaatagttttttcagctgggaattcagagaattgagcatatgttaaatttttatgttagattggaatgtctaatcacgagcttttcaattatcctcagtatttggggttccagttgaggttactgtccagcga

SEQ ID NO: 8680 - DNA, 1724 bp, Carica papaya
  Intron number 6 from transcript evm.model.supercontig_10.5 (locus evm.TU.supercontig_10.5) derived from phytozome v7 .0 (chr-ID supercontig_10; pos 157123 to 158846)
ataaacctgtgactaacagtcgggacactcaggaggtagcatttctctaataacttatatattttgctggaatccttagtttattaaaatgaaacctttaatttgatgtaggacaaggagtcgttaaactaatttgccttgctgctataatttagaaatagagaaattttggatgagaaacagaaaaatatgagaaaatattgataggctggaagaaattagggatcagggttaaacaaatctagtgagaagtataacgaatgagataacttagatagaataacaaccagaagaacaaacacagagataaaggaaacaaaactcaaacaacataattcttgattcattaacgtctattattttttttcttcatagctaagagcctttatttacaattaattacagaagaaaaaagtataaagaagaagtctaaaaatattctaattcctatgtacttaagatctacgtaaataggaaagtaaagtataataatgcctcaatagcttaaaagtataaaataataataattcttgcaaaaatattttttaattgaaacattgtttctaagtaatatcttctgattctacatctttttatctatttggtgtgaactcggcatcaagttttgaagtggttaagcatcaaaatgagaaaggttcggatatgctcgtcagaatcttcaaaaagtgaaggcttttaataattttttgtagaaaaaatgaaaactaaccaaaattataggttaaatcaatgaggtaaattaaaatcatctgaagaaatctttttaatatcatcctcatttcgatggcaacaagaggtagactagattattgaaaggaggaagttgcttaaaatcattagcataaaagaaacaactttaacaggagccaatatttcttgagttgccacttgtagttcgagaagaattcaggctttatctcttctagtttatcagaagtcttgttaaaaattttaccccactttaatattctcatggagtcacccataattctttagttcttgcatataggttgaatacatactaaatactcattcaacaacaattatcatatgcatgaccatctaaagaattttttagtgcacacaacctcttctaaatatttatgttgaatacaagcttcattatgtggaagtatactaatacttctcatccattcatacagatcaaaaactgggacaacccatcacgagtaattgagtagattataatgaattgtaaccaagaatttgtctaattccatgcaagttgttacctttaactttaatatgcttgagacgagttatctaatgcccatgttttcaaattaaatttaaaaccaatagaatacacataggaacctgaatctgatggtcattccatgaagtataaaacaagagggtggagtgtgttctattttgttatagtattaactttctagatgtgattcctggtttccatcttaaatctgaaataaaaatgagaatcatctgcttcttttttgttttaataaatttgaaagaaaagaaatgctaaactaatcacacaagtcctgaatttctgatcaaagatgcatattaataatttctatttatacaaatgaaatcattaaccacttatcagttatttgaagtgacattatagtttctgctcattgacattttttttttaattcccttttgcctatgtgtatatattgcaggtcaaactggagcagggaattgag

SEQ ID NO: 8681 - DNA, 699 bp, Carica papaya
  Intron number 2 from transcript evm.model.supercontig_65.3 4 (locus evm.TU.supercontig_65.34) derived from phytozome v7.0 (chr-ID supercontig_65; pos 476166 to 476864 reverse strand)
tgcagctctttcgcggtgacacaattctcatcaaggtttgcattgaaaacacttattttatgtgtgtttaaaatatttgtatacacatgtagatgttgtagttgatttttgaaggtgtacgaacgtatatgctaatatggtggaggtttggcatggttaatctttgctgattgtcgaagcgttaagttagggtttcattaaggtcttaactattttttacttccttgcttttggacacgtgagattggtaaattggaattttaggtttgtgtttatactgtctggggatgaatgataaggagatgcaactggcgagtttcaaacttattctttggattttgatgaataaaatttatgtccactattacacctggtagtatgcattttcagtttggatttggaattcaagttgcttctgaacatcagttgatttccaattgatgtaagattttatttccattacaatggaaaggggaattcctttatctgaatgttttttatgaaagatttttgttcaaatcggaaaacgaatagcaagcgaacttcggtaataaaattgtggattactgttgatccttctgacctggatatgggagttccagaaagctggatgcccaagttcttatccgttagatttatgttttgttttatatttaattgtgatttttctattcagggaaagaaacggaaggatacaat

SEQ ID NO: 8682 - DNA, 1493 bp, Carica papaya
  Intron number 3 from transcript evm.model.supercontig_21.2 07 (locus evm.TU.supercontig_21.207) derived from phytozom e v7.0 (chr-ID supercontig_21; pos 2095343 to 2096835 reve rse strand)
tgcaggcagaaaggactaaggaacggtataagcaggtaagttttttctctctctctctctctctctctctttccttttttctccccttttgggaggggatttgattaggaataccatctttcccttttagaagaaaaattcttccacatattctttttcttctttcttctgcttgttaaaactcgaatgtaggtttcctaactgatatagcagatgataactataaagagagatcagaaattgaagaagactagggcaagagattgagttttcagaagtagaatgtgaaggggggaaagtactagaagaagtggaagcaaacataaaagaaagaccagaatactggaacaaactttgaaataatactaagattggaaagtaactcagtccaacataacttcgtatattgtggaaggaaagaaacgtaagagcttttgagagcatagagactaacattacgaaaattaaagtttaagtggatttatacttttggttctattttgttaggtcatgacatcaaaaattggaatgattttgggtgggtcatgaaccacttaatagaattgtaatatatactttggtacctttgtgaataattgatatttcaaccaaaaaaacataactttatatattcttgaggtgaatcccattgtataggcactgattagagtcaagttagaaaactactacaatagacatgatatcaaaactttctagatcataacaaaactcaaaatctagcaaacaaactaaaaaaaccaaaaaagttaaaaagtactaatattaataatagttacaaaaatattgccaaacacaagaattttctaatctaattaattttcttttctatatcactgatttcatcatcctttcactgcttgagtagttgaaaggccagttctacctcccaatttcatgcattctttgaaaaataagctttttccttgctaacatttatttaagacctttaaaccttaaaattattctttccaaacagtttgagagatttacttgctagaatctcttatattttacctttcctacttttaagagagataatacaactgagaggagtaaccctactgacttctgaaacttagctgcttgttaatatagatcagcaatgtggcatcaattaagtgctagttggctagctgcagtaaattgagaagtttatatagtagattgaggaaagagaaatgtgattaaggtgctggaaaagtaggaaatgaagaaccgaaatgcagagttgcaaattatttcctttggaacttccatgaacgttacttggaatgacatcttcatttaggttaggttacaaacttcctaaacttttgtttggctttttatacagatctatcatcgtgatgtttttgtagctacatagatgaactaatgtacaatctttgtccaagacaattttcagctgcatagagttgcagtaagttaaattactatcattactaagattcagtttatttttcttgcagcta

SEQ ID NO: 8683 - DNA, 1901 bp, Carica papaya
  Intron number 5 from transcript evm.model.supercontig_847. 1 (locus evm.TU.supercontig_847.1) derived from phytozome v7.0 (chr-ID supercontig_847; pos 1637 to 3537 reverse str and)
ctctggagaccaagcccattcaattggtggaagtaagctttactttatctaagttgttgttcttccttgcacagcatctagcaacaatttgagaaagataccttctctttgatttccgtgactatttatatttcagcactgcttaattttctaagtaaatgtggttgtgtatatatgcttatgtatttttgtatgtatattttggctgaatatttatgaatatgtttgttatagatatatgagggtcatcttactggaagttgtgccaagttgtatgccttaatgacattgctgttggtgtagttggttgatggtgataataaaaaattctaatggtatttggggtgataataaaaaattctaatggtatttggggtgcctaggaactggtggtttgcaccaatgaacattagacaaggctggtgtttcaatggtgtattcgcggggatacaatagtgattgatatcagctgggcattatatatgtatatatatgtatatatgtatctattaagatttagatggattttgcaggtattgaaatcttaatatggtaacttttatgtaggaatcaaaattagcagtatcatgacaagtatgcttgagggtcacttaaatgcttcaacctttataagttttatgcatagatatttgaatgatgataattaccacataaacagaagctttaaatagtaatttgaacataggataacctctgaataaataagccttgtagaaaaatgaaaatgatatatttttaatacgatgtgtccgcatcaagaatttctagtcatggatacacaactttttgttaattatttgaacgaaaatgattaagtcaggaagatctgatagaaaattttcatttttgcagcgtcctttgacattagtaattagcaagacaagataaaaatcttcagaaaatctggaaaatttacgaggaagaaaagccttgtcttgtatcttcagaatgattttgaatgattgcagaatttccaagcattttagcctttgcatgtttcaaatggcttggatgggattaaatcgttgaatatttaaaattttcagccatgtttcattggccatgattttcaacttatgtgcatgatctgcttcaactaccaagtaaattgcagaagccaatgatggatggcttctttgctgctgcagacctgccaatcattaagatggaggtctgggtaagaggacttgtactgggggtacttatgcagcctgtcttatggagcaaacttccaacgtgagaaaaaaaataagctaaaggagaaagtagattgctggtggttcctgcaatatcaggcatgaagtgtagttcatgcctctttctagctatttattggtgatttctcttttttgttaagatcatgtctgattgttaattctttgatcataacctgaatgaggcaattatttagttttcctaattgccggggaaatattataaaaatagccaaaatcaatattcttgtatagtacataaccatgctttttggctttattttactccttggaaattttttgtaattaaagtgtcctgaaatcccaaacattcaatagttcctcacggatgatggtcttttaaaaagaagcctgctagagtgcaaaaatttgttctatccagtttacacattatgtctagaaaactgtgttaattccatatgttatattggagacactctactttctcaaagaatgtagcaggtcgatcatttctttttccagcatatgcattttatatatcttacacggcatatgtaggttttataaaagatcgtgcttgtatgcatgcttgcaatgcggagaattcatcagcttgtaaattctttctaaaaattccctgaataaaggaggatatcatgtttgttgcatatctttgtaggggcc

SEQ ID NO: 8684 - DNA, 466 bp, Carica papaya
  Intron number 1 from transcript evm.model.supercontig_49.1 21 (locus evm.TU.supercontig_49.121) derived from phytozom e v7.0 (chr-ID supercontig_49; pos 857641 to 858106 revers e strand)
attcatctgtctctcctcaggaagccgttcccacggtaagcttttatgcaagtttttctttgaattttgtagtagtttctaaattagccctaattggattttgttttccctttttgtgtttacaaatcttgatcactaggtgttcttatacaaaattatgcataggtatgtagttattttatttatcgagttttctgagtcgaaaacgtttggtgtaatcgagatggaggtaaaggcgtctccttcatacctcttcaattgtgacccatggaatatgtcattaattctgtgggatttgaatttgagatccatgatttgttaggttttgcttaatcatcctaacacgctaatttatcagcatagttgagtgaacttcttaccagagttaaaaattggaacaggatataggtttatttattttttcccctctaatacagcatgcactattacttgtcttgttagacaa

SEQ ID NO: 8685 - DNA, 1410 bp, Carica papaya
  Intron number 2 from transcript evm.model.supercontig_81.1 28 (locus evm.TU.supercontig_81.128) derived from phytozom e v7.0 (chr-ID supercontig_81; pos 653226 to 654635 revers e strand)
gaaggaggaggtatgtggttccctcaattaattttagttccctgtaatatctgtgtgctggaaagaatcttggctcctagattttgctttttgccttcttgaaaatgatggttgaatcaataattcattagtattttatttgaggaagcagtattttatttccaactttcaactgttaaaataagaatggcgtactctgtggttttacttctaatattgctgtgatattacctgctgccacggcagggctcgtgtttgtttgattttttcttttaaaaaatcaaaataaatatacctgataatgttgtttatcatcatggttaccaaatcaagattcaaattatgaattgaaaccttattctttgaattgagaaatgaattgagttctaagatttggaacatagttctttaattgaacttcagtattatgtgtgtatataaaacaaaaagagaatgcttttaagaaatttaatatatatttgattggcattggaaagaccataaagtatttccaatcaaaatgatttaatcgaaatatttattttttttaacatgtcaacagttttgtaacctatattatccttgaaataataagtaaatcaaaatgagtatctgacctatttaactaggttcatatttcacatgttattcgcttattatatctctactgctctttctttttcaatagattttgtttttaatctttatcaaactttaagttattttttccaatatataacaatgtgtaacttatttagtatcaaaaactcaatgtaggagctaattaatataagaattaagacaaaacctagacgacccagttgatatattatttttctccttctcattagtgttaattccatttttctataccgctatgtgaaaaataaattattttttgctctttagacattgagtttaggttcaagtcggctaaactaacatttactagaattaacctaaacttatgagtttcaaatgacgcataaaattctctcctacaaccacttgtggatagatttttaatggagaatttctttttgtagaatatgttataggcttataacaactgtattcctaaatgattttggtataaatccttttctttgaaagcagaaaatgaactatgtgatgtccgcctttttttttttttttttttttaatttttgggttcttgtataagaatttgttaagaattatactttccgttactcttctattctaagatgatagttttccactcttctagatattgtataattccttatattgtcaaattgattgtcttgtcaattaatttggaatgctcattgaatacaaaagtattatattttgtgtctttcttttcctgctaatactttgagaattatactctgatggacttaacaggagcgagacagttactggaaa

SEQ ID NO: 8686 - DNA, 9546 bp, Carica papaya
  Intron number 11 from transcript evm.model.supercontig_32. 147 (locus evm.TU.supercontig_32.147) derived from phytozo me v7.0 (chr-ID supercontig_32; pos 1817944 to 1827489 rev erse strand)
ttgggaaggcgtcactttattttagcatttgagaggtaacttattctcccgtttttctttttgttaaaatcatttgtttgtatatgctacctgttcaacttttgactctctttacatttgttaaaatattataaaatattccctatacataataatatgattatttttccaaatatgtaaacataattaggaaaaaaataattagggtaatttatgtaggttaccatatatgatccatttacatgtatatatatcactactttcatttcaataaaaatataagaattattcattatttttcttccctaatcctttatatggtatcagagttagagttagggtttgggttagagttttaggggtcaaattacatcagaagaagggttaaacaacccattctcagcgccggagaaagacaaccaccgatctctggccagttcaaaatgcggctagtgcggtgatgtacgcgagagaagtcgaggaagtgattcgcacggcgatttgaggttgcatgcggcttgattgccggagaagagcattcccgtgcgtgttgggttcccattcaaggatagaagtaacagaggagctcggtcattcggttctatgcacgaaactagaaggccgaagatggaaaaggcgcggcggagcagcttgcgcgacagcaagtgattctccactctctggtacgattagggcctttttgtgagcatcattccggattagggctggcattgaagttctatggtgatttccggtcgaaaggaggctgtttagtggttgtaggcagcggcgtgtgtaactctggtggcgacacgtggctctccggtggtggcgcatgtagcggcgcaggtcctctggtggttaatagtgaggtcctagtagggttgttgatgcccgtgcgtgaagaagtgctctgttttcttaaattttccattatatttgtagtgttttacgggtatctctaactattatgttttgggtattctgagtggcgtataataagggcatataaaacagtactgtaagaaattgtagaatctgaatcggaggacacagactgctaatattgttgctgctactgctagctcatattctgaaagaactgttatgattttagctaataaatatgctaaattcactcaatatcagaaatttttaaataaattttttactcttattgaaccagagaaaaaatgtcttatctcctcctcaaacagatgagtgattgattctggtgctatagatcatatgacaggtatttttaatattttttttagttttcgatcatacaaagtactttttcctgtaactgtagctgatgggtcgacatataatattgtgggttcagcgaccacaaaaccaacattatctattattttgtcatctgtattaagtttacctaaacttgatttcaatatgatttatgtgagtaaacttactaaagatttaaattgttatattacattttttcctaatcactgtgttttttaagattttatgatgaaacaaattattggtaaaggaaatatatcagatgatctttacattcttgatacttaggtacctcaattagttactgtaagaagctttggacatgactctaatctcgtgaaggtttaatggagaagaagaagaagaagaaaacagagaagatgaagaacgataaagggagaaagtagaaaacttttttattgatttatgatatgcttacaatcgatggaaggggaccctttttatagcctaaatacattaaataaaatcattattcaaggcggaatcaagcttgctggagttgcacgactggaatcgcgtgataatgatgatcgacgtcgtctacggaatggatttggaaggcaaaggcgtcgactgtgaatcctgttagggttggtcaaccctaatcccagttgttctgcatttttgttattatgcccttttgtgtgtgtatttccttttttacccttctttctgtaataaaccttgaggggtttctagacaataccctcgcctagaacagtaaccttgtcctcaaggttgagatgcagaaattggtgttataaatactcataatcttcccatgtgcattctttggttggagctcctttctaacggataaggacttgatttacgagttgattaccccataatatagttctatgttgtaagatttattggggttgtacactgatgaagtcttccgtggtctgtgaggctaaagtcttgttgtgtatttcttgagttgggacacgtgaaaaactgggtgaatccttgattcttcggttaataggagcttgcatgctacattctcaattttctgagaggcttggaatggtccatagtatcggatggataatttggagtctcgtccttcttgagtgtttcttgtttgaaagactgtagttcgagcaatacccagtcatctacttcaaaacttctctcactttgatgattctccgcatattgcttgattttggcttgtgcctgtaagagctgttgtcgtatggtcttgttggcttcttcgcattccgctaggaccatctctacggaaggtaatgcagagtcgaattctatggagttggagaaatgtggaggtgggtatccgtagagtgcttggaaaggtgtcatcttcaaacttgaatggtatgaagtgttataccatcattcaatcatagttattaaccatttgacgcaagtcttcggttgttagttagctagctatacatcgtaggtacattttcagaccttgattgagcttttctatttgttcgtcagtctgggggtgatatgcgatactgaagaggaaatttgttccaattgtcttcattagttccttccagaataaactggtgaatattttatctcggtcagttactatgacctgtggaaccccgtgtagcttgtgtaccatcttcatgtaacttcgtgctacttcggctgtagtgaaggaatgtcgcaaaggaatgaaatgcacatacttggtgaaacggtccattaccactaatatagcgtccttgccctcttatttgggcaattgttcaatgaagttcatggatatgtgggttcaggcgtgtggtggaacaagtagtggttgcagtaatccaggagtggaaactcgttctattttgcagcattgacagatatcacattgttagactcgctgtaaaatttgtttctttatagtaagccaataaaactgttgtttgaccctctcataagtagctcgaactctagagtgatcccgtactgctgaattgtggcattgataaagcagttggttgtgaagttcctttttgtcacccatgaccaacctctgtttgcatctcaatatgccctgttgtagggaaaaaagttatatgctattagggaaaaaattatatgctattaggagaaaccattagttctgatagcagttgttgagtgaagggatcattggggtaactgtcacttttttccaccatccaagcaggtatggatgtggagagggtgtataagatttccgcttcagggtcatgggcatccctccttgaaagagcatttgttaccttgttcgacgacccttgtttgtattggattgtgtaattctagcccaatagcttcaagatgccattttgttgtaccatgaaggaaactctttgatctaacaagtactttaaactacgttgatccgttctgatgacgaatgaggttccttctaaatagtgctgccattgtcctacggcatagagaacgaccatcagttccttctcatatattgactttgtctgattcttgggactgagggccttgcttatgaaagctataggttgattttcttgcatcaggaccgctccaattcccttgttgcttgcatctgtcttaaaagtaaaaggatctccgaattgaggtagtcgtaggaccgagctggaagtcatagctgtctttaacaattgaaaagcttgctccgcttctgaattccattcaaagacaccattttttaacaaattggtgagacgttagacgatgattccgtaattttatatcaatttgcggtactatcctgttaagcacagaaaacctctaaaaaccttaatcgtccgaggagtggaccagttgatcatagcttcaatctttcgcgagtctgtttttacctctcgacctgagatgatatgccctagatacttcacctttgtctaaaagaaataactcttggattgctttgcatacaacctgttatctcggagtgtctttagaacttcgtttagatgaataaggtgctccttctcagtgatagtataaactaagatgtcatcaaagaagaccaatacaaatattcggagaaaagctttgaatatgtgattcatgagagcctggaagatagtgggggcgttggtcaagccgaaaggtatcaccttgaattcataatgatcctaatgtgttataaatgccgttttgtggatgtcttcctcatcgaccctaatgttatgatatcttgctctaagatcaattttagagaaaatatgtgctccatataattcatcaataagatcatcaatgatgggtatggggaacttactttttacggtcaaagagtttagttctttatattccacgcaaaacctccatgtacaatctttctttttgacaagcagtaccgttgtagagaatgggctacagctgggccatattaatgagtccttcaacatttgttgtatttgcttttctatttcgttcttctgattgaacaaatacctatagggtcgaatattcatggcaacattatgtttggacaaggtgatgacgtgatcaaaggctttggccggtggctagccatggggttcctaaaagacatcctaatattgtctaagtagtgcttctagtgctaggatgggcatctcggaagtagataccttctataaaacttccattattagaaatactgttccacattcgaccgcttgcttatgtttgacccaatgtttcacctttatttctcttgtcttgaatgtttcccggaagtcacaactctgtaataatatttgtaatttttataattgaatcgtatcgttgcatggaggaagtcaaacagcatagtcaaacatcattgggccgaattgtttcatctagtcgatccttaatatcatttcataccctctcagtgaaatgatgcagacattgtagttgaacttgtagccttgcatggtccacatcacatctggacattcaaagtgattagatattttttgcccgtttgcaaccataagtgttaagggtttactgctgaccacctgattcttgatccatttagaatctccttcgtctaggaagggatgtgagctttcactatccagtaggatcaacacatcatgatttgataattttcctcgtattttcaaggtgctccctgtggtgaccccttctattgcttgtagaggcagagtgccagtaaggccatcgctaacctctttagcttcctcaaggcagtgggattggcagcaaaaagaacttcaaacccttgtcttcctgcatctgcgacatacgggaaaggaagaagaccttcacccgaatgggtcttggcttcctttggcctggtcggcaatttcgcttcagagcagctcaagtatcacactgagctgtcagcatgattcattcatgaatgctgatagctttaaatcgacttcttttatggtaagtgatttgagattttctagttcagtcatcggggccttccccttcgaccgtgttcgagtggcgataccggtgtatgattcagccggttttagttctgataccatcttgtcagaagtcttaggcatgactctgatcttatcaaggtttaatgaagaagaaaatagagaagatgaagaacgataaagggagaaagtagaagatttttttattgatttctgatgtacttacaatcgatggaagggaccttttttataggcctaaatacattaaataaaatcattatttaaggcggaatcaagattgctggagttgcgcggtcggaattgcgtgatgatgatggtcggcatcgtctacggaatgaatttggaaggcagaggcatcgactgtggaatcttgttaaggttggtcaaccctaatcccagttgttttaagtttttcctattctgcccttttgtgtgtatattttctttttttatcattctttctataataaaccctaaggggttttctgaaagttgtctgctataatattacctctccatttaaaacacattgtcaattgggacatccatctctacctgtgtttaaaaaattatgtcatcagtttcatgatgtatcctcattgaattgtgagtcacatcggtttgcaaaacatcactgtagttcatcaggttcaaggatcaatagacgaggtgagtctgcttttgagttagttcatatgatgtttggggcctcttgtcctgttctgtccaaaactgggttcaagtatttcattacctttatggatgatttttctcacatgacttgaatatattttatgaagaatcattcgaaagtattttttcacttttgtgttttctgtactgaagttaaaatacaattcaatgtttctgtgtatgtattgagaagtgataatgtcaaaaaatatatatcagattcatttcagaactatatgactcaacgcgggatccttcaccaatccttgtgcgttgatataccatctcaaaatgtaatcgctgagagaaagaacagacatttaccggagacaactcgaaccctcttgttccaaacataaatccctaagtaattctgggctaatgccgtttccacagtttgtttcttgattaattgtatgccatttacagtgattgacggggatgttctttacagtcttctttttccatacaactctttgtttccgatgcaacgtacgatatttggtagcacctgttatgctcgagatgtgcgacctactgtgacaaaattggactcaaaagtcttaaagtgtgtattttttagatattctcgcgtgcagaaaagatacaggtgctactttccaaatctcaataaatatttaatatcaactgatgtgatttttttagagaatataccgttcttctccttattgtccaagtctacaagtcaggaggcggacgacgagtaacttatctatagtttcacattaggtgcttttactgagcaaacagataaaagtattcctccatatgatgtgtctccagctctacttgagtaagttgaggatagtattcgtatacctctaatccaaatatcaccaccaattgtttatatttatttcagaagacaacaaactgatgaaaaatgtcctgcaccagatccgtcgtcatctgattctgctgcacataaccttgatcttcgtaaaggtaaatgtctgtgcaccattcctacgccaacttatcctattgctaattttatatctaatgaccatatgtcttatttgtcttgtgttttaattgcttttatagattcaacctctatgttcaagacagtatctgaatcaccctgattggcataatactatgcttgaggagataaacgctttgatgataatcatacctgggatctggtagatttacttaaaggaaaaaaggttataaggtgcaaatgaatatttacaattaaagtgaatctagattgctctatggcaagacttaaagctcgactggtagcgaaaggttatactcagacttatagaatggactattctgatatattctctccagtagccaaacttgtctctattcatttattcatatatattacagcctcccaaaatcattccttacactaggtaaatattaaaaatgcattttttcatggtgatctcttagaagaagtatatatggagtgaccacttgggtttattactcagggggagtacgggaaagtctgtcatttgaagaaatttttgtatggtctgaagcagagttcttgtgcgtggtttaataagtttagtgaggtaatatgtgagttcggattgaagaatagtaagtgtgatcattcagtcttctatagacaataaacaggtattattatactttttattgtttatattgatgatattgtgattacagaagatgactatataagaatatcttctcttaagtcattcttgcataccaaactcaataccaaagacttgggataagtaaaataccttttgggagttgaagtaataagaaataaagaaagaattctgttatcttagagaaaatatatacttgatctacttgcagaaacagtaaagctgagagctaagtcatgcagtatactaatggtaccaaatgtacatcttacaaaagataatagtgatttccttgatgattcaaagaaatacaggtgactagttgggaaattaaattactttattgtgaatagtttagatattgcataccctgtcagtgttgttagccagtttatgtcggcacctacaatcaaatattggaagactttggaacagattttgtgctacttaaaaggttatttggagctcaacatagtgtttagaaatcatggacttactcacattaaatgttttacaaatgctgattggggtagatctaagattgataggaggtctattacgggttattatttttttgttggtggaaatctcatatcatgaaaaagtaaaaagcaaacaattgtatttcgatcaagtgcaaagtccgaaaatagagttatggttcagtccacatgtgcaatcttatggttacatcatctgttagatgaaatgggtttgaagttcacatctcctacaaaactctgatgcgataatcagactgtctttcatattgtctcaaatcttatgtatcatgagagaaccaaacatatcgaggttgattgtcactttatctgaaagaagatttaaaaaaactttatatctattagttatgtgaagacatgagaacaatttggtgatgtattcacaaaacttctgaatagaacgcggattaagtatcttcgaaacaagttgcgcataatcaatatttatgctccaacttgatgggaattgttagaatatttcttatacataataatatgattatctttccaaatatgtaagtgtaattgggaagaaaataattaggataatttatgttgattattatatatgaatctgtttacatgtatatatattcctactttcatttcaataaaatttcaagaattattcaatatttttcttccctaatcttttataaaacttaatgcttttcgaaatttttacttgtccattttgtcacaaggctggtttaagtgttaacattgtgtaattatagtaacctggaaattcatttggtaaaaattgaccattgaaaaagtggagggacatgtaattcgccaaaggattagatcgaaaggtacttgatcatgctgtaggtattatgttatatgcagtacaagttgtgtattacattcttgtggtcaatatgattggtattttctcaacattgaaaatattttcgtgtttgttttctcttttttctttcttcaagatttgttctttctaagactttcttgtttttattcaaaactgtgtttcccagcgctgcctctgga

SEQ ID NO: 8687 - DNA, 5650 bp, Carica papaya
  Intron number 10 from transcript evm.model.supercontig_71. 57 (locus evm.TU.supercontig_71.57) derived from phytozome v7.0 (chr-ID supercontig_71; pos 854364 to 860013 reverse strand)
gtacttaacctggtaagtaattgatgagatttctatttgtctttttgcaagttctgatatcaaatatgaattttatgtcattagattgtagaagccatgttgtaccacctgctctcttctctcaagtgaagagcattggggccacattgtgtatgtggtatagcattttcaacaacaacaattctcaatgagttgctgtgacaatgtcacaactctaaaagtctctcattctctgcctctctctctcccccctccaccctctcctcccttgtccagctcatctttgtctttaaactttgggccagaatcctcccttcaaggtttttatgacttttctccacttagcatgccttgcttttctcgtacgaaagtgctagtgatagaggggaagtcctttgacattgttcccaaaggaaaaactgatgacattgctcttcctggtgtcagaataggctgaagggcacagatgctaccaggacattagcatctccaatcttcaacgcaattaggggaccatattatttattaatcttgatagctagcctctctttatgtctttctttctttttcttcctttctttttcctttcttgttggatttttgttttgtttttatttcttttattgcttttgggaggatatctcattctcctttgttgtattttcttctcctgatcttaatatattgttcttattctaaccagaaaaaaattcaaagaatacatggtataaaactaaaaatctctaatcctactaaaaaggttttgagcctgatgaaaagtcctttcgcttctcttattcaagctgtcccagtggtcacgtagaggctctccaaaaaaatgaaaaaaaggagttgctattgatcctttaaggcggattgaacagttgccacaatggtgataaaaaacgaccctgtagatgaggagaatgagaaatttgtctttgcccctgaaggaataaatatctttccagtatcaaatcttatccaacacagaacctgctatggctagattaagtcccatgaaatcaatggccaactcccttaacagcccagtccaagtgtgttgcagctcaaagatgtctgtaagcttcagctttcttggataatttgcattggttaaccaaagaaacctctagactaagaatcatctcccagccagcttcttctgcaaaaagctcctcttgcaagtgagctgttgtgttctagatagttttgcaagggaagttaggtaagctcgcatcaacattactaaatagagatttgtagaaacttttaatctcaaaagatcctttagcatgaaacttctgctgaagtacattgttaatctctggctattcttatttttggagctagaaaggaagcttgattctcacagcagtaagcctatgttgctacagaatggtaaaaagaaacagaaggacaacggatctaaggaacttaagcgcctacaatcttccataaattatgaggttcgaagcaaaaagactaaggattctgatgtacaagttactcaccccaaatgatcgacaaaatcatatcctggaatactagaggtcttaatgaccagatgaaaagacacaccattaggggctgtctcagcagatgaaagtcaaactattatctgtcttcaagggacaaaaatggaaataatcacagaaaaaacaattggcagcatatggagaatggtcgatgtggaccggaaatttcttcctgccaaaggcgctgctggaggtattttgattatgtggaggaaagatcgaattcaatgccagaatgtaatatcatgtgatatctcaatctcttgccttttttctaacaacaattgtggtccttagtatttttctggtgtgtattgctgaggtaattcgactgaacggtctttgcttgaataagaattatctcatgtcagaaattgttggggagacaagggtattgttggtggggacttcaatatggtcttaaggacctctgaaaggtcaggcagtaacagttcgtgtaatgacattgatgagttcagggccttaattgacaagcttgagctaaatgacatacccttgaaagggggttgatggacgtggaacaacgaaaggagccagccctccttttctagaatcaataaattccttatctcctctgatatgctcctggaactacccggtgttaatcaagtggtcctaaccagaggtacctcagatcattttcccatctctctctccatggatggaatcaaacggggcccagttccttttcgtctggacaacaaatggctgtgtctcgaaggttttaaaaatcttgtctctgatatttggaccaacaccttcaatgaggggactataagcttcagaattgcttccaagctcaggatacttaaggaggaaataaaaaaatgggtcaaggatgctggcataaaagaagagtggtaacctgtctgaactggacagggaaagaaaatctcccttgaaagctgatttagcttacaaattacacatgaatgctatttcctggaaacaaaaagtaagagaaaaatggcttaaagatggggacaaatactccaaatattttcatttattagcgaatcacagaagaaaagtgaattatgttgaagagctcatcatggacaacaacaacttcaaaggtaataaggctttgagagaaggggccaaaagattcttccagaatctatacaatgagaaattcaatcttcgtcctaaactcgacgacctcgtcttcaacagcctcaatgatactcaaaaagtccaactggaataggtcttcatcgaggaggagatttggtcttgtctaaaaaattgtgaaggggataaagccccgggaccggatggctttaattttagatttctccgaacattttgggaggtatttaaagcggacattattgaattcttcaatgattttcattcccaaggattcttcgtccgctctctcaactctactttccttgtgttgatcccaaaaatggctaaacccagaaattattcggattatcgtcccataagccttattggttgcatctacaagttgctttcgaaggttttggctaacagattaaccaaggtaatcaatcatattatcggtaactgccaacatgctttcgttaatgggagacaaatagctgatgccattcttattgcaaatgaggttgtggacgacatctttcgtcacaacaaggaaggtattttgtgtaaattgggcatggagaaagcatttgatcatgttaattgacaattccttgactacatgctccacagaatgggtttcggtaacgggtggaaaaaatggatcaatacctgtgtcataactaccagaggattaagacaaggtgattctctctcccttcctttttttattattgtgatgaaggtgttgcacaagcttttggagagagctaaatcacttgggttaattaaaggtctgcctgtgggaaacaatgcaaatactattgcggtttcccacttgttttttgcggatgacacactgattttttgtcaaccaaaggctcgatatttcatatttttgaaatgcactctgttgtgtttgcaggcggtttttgggcttaaaattaatctgcaaaaatctgaattgaccaagttggggagctgcaccatgggggactctttctgtgacattcttgactgtaaaaaatctcctcttcctattttttacttgggtgttccactgggatctaaacataatgatttcagatcttgggagccggtgatggatatgcttaacggcagattatctacttgaaagaagaaatttctgtcaaaaggtggtagattaacactcatcaaatgtcctttttgtaatattcctatttattacttgtctgttctcaatattccttccaaaatagccaaaaaattggaagccatccaaagcaacttcctatgtggtgattctgatagtaggaaaaactatcaccttgttaaatggtcggatgtcaagaaacctttgaggatgggtggtttggggttgagatccttaaacaaacttaataaggctttgcttggtaaatggatatggagatattggaacgacaatgacagcctttggaagatggttatcaattgcaagtggtataatgagaatccccttgatctttcatacattaagaacagaaattatggtttgagtatctagaggaatattttaaacatgtatggtgcagtgttgagttgctctaaatggtccattggtaatggaacaaaaatttgcttttgggaagatacatggtgtggtaccgaaaaactcatggacagattcccttttatctatgccattgctacgaacaaagctgttactgtaagggaagctgctggttttgatggcagctttttatggaatgtcccattcgcaaggaatcttaatgattgggagtttgaacaatacgaatctatactttctactttggtcagtagcaatctcactaacagagacgacaaattcttgtggaatctcaagaaaaatggtctcttctctgttgactcactgttatgttttttagatggtcaccatcagtatagtccaagaacctttccttccaaaatcatctggaattctggcgctaccccaaggatttctttcattgcatgggaggcagcaaaggagaagatccttaccttggacaacttgatgaaaagaggtcacacaattgccaacagatgttttctgtgtaaaaatgctttggaatcttgcaatcaccttcttttgggttgcctaattgcacataaactctagagtatgattcttgaactgttgggaacttcttggattatggctggcaacgtttgtgctgaattaatggcctgggagggtcttggcagcaacaataaatccattagactcattcctctcaccattttttgggtcatttggaaggaaaaaaacaaaagggcttttgatggagtcgagtccaatttcaacaaaattatggataactggtttcagtactttgattctaacttacttggacgtaacctcgatttttttgaggatcttggtgacattgtagatattttaattgagatgtaaattttgtacatggttggtgctccctttgcaccttacatcaatacaacttcatacttttctttcaaaaaaaaaaaaaaatttggctattctttgggtagattttcatttgttggggaaagggcaatttaaacatgcccttgttgactctaggtatctattgttggctgtattttgggtccctattgcaaactaatttgtgtgtttatccaatgtttcgaaattttgacttaatagcatggtggtcagtattcatcaaatggcatgatgtccaggttactgtattcaggagttccatttggttctgctagtaaaacctgataattacttgatgaatgataatgttttaatatattggatatatgaatttttatgttctcggtaagtttgatatcagatggaggcttatcaagactatcttgagttggtctgttatttgttgacttgcggcttctttgtgtaatataagaaagagaaagatgtttttatattgccttaactaatttagttacttcatgcttttttgaaattctttaaatataatgttgggaggataatttgtgcagggaattagtggtcagccgttttctggacctgatat

SEQ ID NO: 8688 - DNA, 1532 bp, Carica papaya
  Intron number 1 from transcript evm.model.supercontig_28.1 19 (locus evm.TU.supercontig_28.119) derived from phytozom e v7.0 (chr-ID supercontig_28; pos 1744580 to 1746111 reve rse strand)
gattcaggtatgagttatcaaatatgtattgtgactatttaatatctttttcttcaatatttattaaggtgccactagacatgtatgtatatttatatatttgtttgcttattagagtgctgcgtgagaaatgtaaggtactttggcccctgcttggaacttttaacttctatttgctcttgaaaaatactctaatcgtctctccatcctccctcatcagcattatcttcttaaaacatcctacctctttcagcttcaagtctaatgaattttgtatgcaacataccttatcaatgtgttgctgtcatgataataatcgggcatatatcttaacagtaaaaatatttgcttcggcaatccaataactcttccttcattagttgtctctgatcaaatgaaaagaaaaaatcctacatattctcccatatgaaatacgctgcctgccgagttcacaaacttggtttcttgcttctgcattgtaccctacattcatgttgggccttcattcctctgattttctttctgttaattggtattcttgatattataaaataatttaaagggtattgtagaaaaaaagagaggaataaattttttattccactttcagaaaattatatgcttttctggaaatattttttgtgggtaagatttaaagcaaatatgagataggaaggagtagatgtagaagttccagcacatgtttcgctgtttaccaaatacgttgatatttcaagccttttaatgagaggcctataggatagaggacgattgtcaatgaaagagaaagatatactctgcagtttcttggtcaaatacctttttgtctcttctaatctgtaacctgatagtggcttcttcaagtgtttgctcttttgattcctgtttttggggaaaatttaaatcaaaggtaaccttcactaccatgagtattaggttttcctgattgcagtttcctttgtgtttatacaaatagatcggcattcaatagatagattgtaaaagttatgagttgcatatctttgtgcattattggttagattttttagttctttcatatttactctgttctctataatttttctcatcttgcacattgtcaatgttatatgggctagccttgacgatcatgtttaggaaaacttctcagtgaagaatattaaaattcaagattcaagtcatatatgtttatttacgctgcaatgcataaaaccatactatttgagttttttgacagtaaaaactgaataattttaaatttgtagtttccttcgagtatcacacctgatacgtcaaattgtatacaagggctttttcctgtgagcgtgaagtaaactcttcttgaatcagtaaccaaatttatgcattaaggagcttcgcggtttttcatttgtcttaaattctttgaatttaataactgaacatctttcataaattttttctgtggttatgtttcaaaatcttctactataagttggaaatgtgcactcaatgtaggtttgcagttgctaacggaactgttggagttggga

SEQ ID NO: 8689 - DNA, 3258 bp, Carica papaya
  Intron number 10 from transcript evm.model.supercontig_14. 256 (locus evm.TU.supercontig_14.256) derived from phytozo me v7.0 (chr-ID supercontig_14; pos 2852018 to 2855275)
tctggctcttctaacttcctcaaggaccacgataggtaatttctactctgaagaatagtagagttgtagaggcagtaccaagaaaaggaactgattacatagggtcaaaaagagcaacaggactagcttttatgacttgattcggtttagctgttcttacatggataggatagatatattacatattgtgatgaaagaagttactgttagtagcctgactcttttttctttcagaaataaagtataatatattcaaaagcaccaaaggagtgcaaactcattaactaaagtatttataaatctagcaaaattccaattagagcctaatggagtgtatatatttttctttatgtgatatattatgtccctatcatgatttaattaggtggtggaatatcccataaatcatggaattccaagataattaggtttccttttatggtgcatgagtaagaacatgaacgtatataacctcatgtaatcattcaataaaaaatataatctttctccatgccatcaaatcattaataaaaagttcagggtttagaactaaaaattcttaaaacctattaaaattacattatatgctcttaaaagccattctattcatctcttcccaaatagccaagaaggtagccaaagagataagttttagtctcttatcaccttggatgtctctccatgccatatctcttcccatactcaacctgccgccagccaactcacacccaagaaactgtaggcaccaatgcctaaatctgataagtatatgggcaccacaaaagaaaattatttcatgattctgcactcttgtataggtagcttctatttactaaaaccttgcttaatcaacttatccagcattaaaatcctttcacctacctctttccaggtgaaaaaagccactctaggatttgtcttaaccttccaaatcaaattggctgggaagtcattacgagatattttccccctattcagatgccgataaaatgactttacttgagaaggtaagggaagagttcaatttccagataagctcatctctgtgggcttgtgacccttttttttttttctgaaagatgtctcagcagtcttagatattcatggatctcctagtcatttagattccttaccaactcaactgactactactctctcccgttagagctaagaacgaatattttaacggcagcatcctcgaagtgaagtaggtaaagatacatggaattaatgaatcaaaaatccccccactcccccctccatccactcatctctccagaagctcactatatccctcgaccccattctccatttaacacaatcctgaaagtcctctttctccatgagcattttcttccaagacccacttcatacggaaccctatgggaataattgaatgaaccactgccatctttagcatgtttagcacataaagctctactctaaaaactcccctctccctaacaaacctcaaaagccactttcttgaagagttctgttgaaatcgcccaaacctcaacactgtaatggttattgaaccttgtcccaagccacaaggtgaaattttcttctttcttccgaatcacaccacaagaaattgcattggattctttccagtcgtggacataaaaaatatatggatatttccatcctgccaagcgagattcaaagtggttagtcactagtccccttgttggtgtctctttgaactttgcccttaatagaagacccaaatatttaataggtagtctcccattttttcaccttaaaatgtcagccaacctccctcttcttcacaagcccaagttgctcaagttccaaatttgacagattaatcttgagcctcaagaccacttcagaaaagactaatacacacatgtttcttgagaagtgccgtaccacttgattcgcagattataaagtgttatgtggaaaaaagaggtggatagcctctgcctttctcaaattgtcaagcccttaaacaaatccacctccttggctgttgagatgagcttgttgaatgcttccattactatactaaatcacagcagggatagagggatccccttgtggtaatcccttaaaggccttaaaagaaggaagatgaacctccattcattaccgccgcgaatgatgaagaggtgatacaggtcttcatccaactgctctatttttcaccaaaacccatcatgtccatcatgtagaacaaagacctccatgccacatggtgataagtctttttcattttcaatttacgttttttccacccacccacgaaccctcccccctcctccccccattctaaattgctgttaacaaccccatttactattgatgttgcatttaggatatgtcttcttcaacaaaagcatgttgcctcttgccaacaacaatgcctgccattatgttttcttaaaaaatgaatgaccacttttgccattgttattgccaaaactttcgcaatagtcttataactgcacttaccaagttataggtttaaaatctttaatgttagaaaccttgtctacctttgggattaagacaaaaaaaagttgagttcaggctctttacatagaattactcggccaatcattggcataacaacaaaataactaacttgttaccaagtataatgcaactggtattccagctcatattgtctggcatgtaactatattctaatggttatttcctaagaggaaatgataagaaaactctgcctgtctggcattctacaacacaatttgaagccttgaatgttgccgtttaaagaaatgttaaatatttggtagcttttttagtgtttttttgaatgggtgctaaatcacctttatatactttcttaaccctttccgaagtcgggctcagaattggatttttattcatctgttatagggaagccctcagatatgcagttgcatgacgcaactccggactgaaatgggacatgaattggttgcctaagactaggattccgaaacatgattgcctgactctggtttgttgctagactgtctgtttttagctgtaccagacatgaagataggcatgggaaagcagtcaaatatttctaaatgcatataaactgataatgtggtggattagtagaatgatgggttgcactaatcttttagtgtttgagtatttcctattttcttaaattgtttatctaaagatctattgtagacctatagttattcatgctgggtgacacgtttctggattgtcatccataattgatattttttcacactccag

SEQ ID NO: 8690 - DNA, 955 bp, Carica papaya
  Intron number 1 from transcript evm.model.supercontig_153. 21 (locus evm.TU.supercontig_153.21) derived from phytozom e v7.0 (chr-ID supercontig_153; pos 504584 to 505538 rever se strand)
ttgtttgccttctcacctcactgctattgtcactggtaatgactcctcatttcttatatattcaaacaaatcatatatacatatatatatgcttatacatctcccttttattctttaattttcaagcttaccacacacatacacacataaaactactgcatggaaatatatatatatatatatgtgtactgtgcttttgatatttttccagtaagtaaattctattatgattttaaaattaatatatttctgctaattaaattacatctatatatataggtaatattttactgaaaatgtgtgcttaacctcgctgatttagagagttaagtgtgattcatgattttgcataatatactctctgtgaaattgtcgagaacattaatggttcagaatctgatcagatatccaacttctttggatattcttcgataatctcgagagaaagtgttagatcttcattaattaaaaaataactaacaaatatacatatatatacacgtttacacactcagtggataatgtatatttatatgtgcatatataacaaattcttttaagattgcgttcgaattaaaaaaaatgtatctctgacgaggataatctctagagcacattgttaatttttattgtatattaatgatctcctttagtattctttagttattctatgtgttgataattttatatggtttcttttcggctgcgataatatttggttttgtctcttttgaaataagatcttatgatctgtccttgttgccgatcgactggatctctttatatatatacatatatatatatatagtggtatataaaattaaatctggatgttattaattaagtctatatataatattatttcctaatatgttgttaaattttaaatattattatcatgaatttatgaaaatttgcaggagcaacatcaggaatcggagcagaaacagcaaga

SEQ ID NO: 8691 - DNA, 2068 bp, Carica papaya
  Intron number 1 from transcript evm.model.supercontig_34.2 10 (locus evm.TU.supercontig_34.210) derived from phytozom e v7.0 (chr-ID supercontig_34; pos 1958593 to 1960660 reve rse strand)
gctgcagaggtttgtttatattttttcctggaattctcttatgcttttagaaatgtgaaattacatgctttcgtttctttttcttcttattctgtacaaaacttgtagggaaatttttttattgaaataaaaaacttgtatgcgaaattatatagagaaaacgacagtcacatgcaatggatatagaatttattccatgatgtttcataagaagcacacgtgggaaagatgggaatactcaaacgttacgtttatgtttacaaccacttcttgacaacgacgaaaaacttacaaacaaacacgtgaatgctacatagccaccttttatcgcagtctttgttttttattaccttctttattgttgtcttatttcatttctccaaaatattgttagaaattccagcttctgaacagccaaagagaagacggtttaaaataatttcagtgattactcttgaggcttcctatatgtatgcatgttttgcgttttttctatacgcgatacctgttgatcaggtatatttctgatagccagttatcggagtaaggagtcaaagcccaggaaaagaaataggtaggatcccaatggtaattattgttcatgctgctgaatctgttgtttctattttccttttcttatttaggcaaattattaatatgctcccatgcaattcagtcttttcctagatggcgcctggaaaacttgcccgaataatgccctgttgtttatgccacctattcagggtggtattttgttaatataagaactgacttttttaacatttgtagttcaacctaatatctgtatggatctctaacttttgaaagagaccatgatactgagatgctgagatgttcatcattgtgttgaagctatagcagggttgtggaaagtgttttatatatatatatatctatatatatgcactgtacatcttcagttggtctaatcagtcctattatgataacttgaaagcattacagtgtcatccttccttgccagtggatttttgaaatcaaatttcaaccattcagttgatataatgattttatcttttaagatttagttttatggaatttaattgtcaataatttattttaccttagtttaaccaaggcacggtggatttttgcaaacaacagtaattaaagttgatatgtctgtaaaaaatcctatggttccaactctcctcatcttatcctgaataaaggaagaaagtatcctttttgtgctttttaaggctaaatgctcttgacattatgaactacttttctctactgatcctaccgttctccgtcatatttagaggagttaacactctgcaattgggctgcattataaaaactgaagtggagcatgttcttgatataactgaagtagccttgttccacgcctgtaagataaatattgaaaaagatttcatgttaagcagatagtgaaagcacaacatggcatgttgtttgttgttgtttctgtcagagttgtatgttactgttcttattttcttttgaactgactaatttagctgccttgcatactttactactgaaagtacctatgttatcaggtcaagctatttaaacaacataaaatgataattttgtaatgtaagaaaatgtcttttttttgtttttatgcataaataattctttagcaattgtcacaaagcttttcttgatattgattgcctggagtgtatttcctgcgcattaggtgtccatatgacagatattaattaccaaagaatgctgtttcctaggacttcattttcttctgcaacagatggacaaccagaaactatgctgtgctactataaaccatgtgtagttaagctctctctcggctcagggcaaccattttggacttattagcaattccccatagatatcttctattctagggattttactttacaagtgatttttttgctttggttatctcatttatgcaagcatttcaaaatttattggcatgaactccaaattcccttgatacggtgttttaattactgttgtcttttcatggtgtactttattttcttccgttagctgcctgggcgtacagata

SEQ ID NO: 8692 - DNA, 1904 bp, Carica papaya
  Intron number 6 from transcript evm.model.supercontig_97.3 (locus evm.TU.supercontig_97.3) derived from phytozome v7 .0 (chr-ID supercontig_97; pos 38904 to 40807 reverse stra nd)
ctatcgggccagttgaagggcttgcccttaattttgtaagggaacagcagaggtagtccacctagttcttatggaggtctttatataggatatttaggaatagtttaacatctttgtcctataggaaagactggttgcagcaagaatcgctgcattattaagcacatgaaatttgatcttgaatttgcttatccaaatgatggtggaacatctcggtatagctcacttggtttcctgtgattgctttaatgataatgaatcttgtatctgcatgagttccatcaagagctggaacttgtttatgctgctgctgctcaactggggattgggagtactgatgtacaagataaaaattacatttttgaattttcagacaagaattagtccatgaatggttctttgatttgcatgagagaatttagttttagattttatctagactaagtctgatttttcttttgtcaagtttttgtttctaaattttttttagtagatattctctcaggtagcacatttctaaattttcagacaatagctacttcatgaatgggttatttagtctgcatgaaagaatttagttttagattttatttagtctataagtctttcattttctctttgtcaagtttttattcctaaattctgttgaatagatgttctctcagatatgtatttgcaattataagccattccatttgttttcgtcctttttgatattgctgattatgcaaagattgttttttttctaacaccatatagccatactttttaggaaaagaagatatacagatcctgccaactttactttgcgctgtggagtttgccagattggtgttgtcggccagaaagtcatgtatatatactcatattagtctgtttaatttattaaataatgtcatatatacaaagaattttacacaaattcatttacaaatgagttactagttaaggtggataataactagtcaagtcaattttaagtggattgtcttttagttcatcattatctgaatttagcattaaactaatctataaattttagtggttttgttgtcaagatttgatttatttctttgtcagcccatatgtatctagaaagaaataaggttttctgactgaatttttttattttttattttaataatatttcactgatcaggaggcggtagagcatgcacaagcaacaggacatgtcaattttcaggaatacagatgatagtcggacaaaaacaactgaagaagacaagggaaatgttcattttctatgaggtcattgaattatttgctggggaaattgactgaatgatctggtttagattgttgatgacaaggaagaaaatgttttatattcattttacccggtactctgttgttgtaaacacatatcattttgcatcagatgacaagggacagtgtcgtttttactgaaaatggtgaaatattcacttgaaaatgctttggacttttagagagcatattcatgcgaaggactagctagtttcctcaccacagcacatggtaaaagacccggtggaaagtgaatttatatttggaatgaacaaataattttggtgaaatttattcgaaaattttagtttaaacaagtacttttttttttggttacagaagaaagaaaaacatagcagtaacaaaactaggtgttgcactctaggccatgatacgcctaggagatcatctctggtgagggtgagaagagccacaaaaggttgagagttggaaatagaaatcgggggacaccaagaaagcatggttggtcaagaaatcagtacactagttcccttctctgtaaacgtagtgaattcgaacgacccaaatcccatttaaacgcattttgatggtttgtaccagattgaagctgacattggtgtggaaaggctcgttga

SEQ ID NO: 8693 - DNA, 480 bp, Carica papaya
  Intron number 5 from transcript evm.model.supercontig_12.3 03 (locus evm.TU.supercontig_12.303) derived from phytozom e v7.0 (chr-ID supercontig_12; pos 2782422 to 2782901)
atattggtaggtattttggctgtcatctatcttattctctctaaattatctctgggtgtatatttattccaccactaggtgatagcaacttcattcaggatatttatgattgttcccatgtctgctgcatgcatttgtctgtagatctggtatgtttaatgctatcacttattcaaagttcagattaactatgcaaatgcataaatcagagtgatcttctttttggaggatgctttagtacacttagtttgtaatataggttgtataactcaaagagaggcacttaatttgaaatatagattatataactacaataaacatttttgttaaaagaatgattgtcacatttatgctacattttgttaaaagaatgattgtctcatttacacttccctgtttatatagaatgattctgtgcttattattctcccttcttttatcgcagactcatcatctggaaatcaaaactcaagtgctcgt

SEQ ID NO: 8694 - DNA, 2673 bp, Carica papaya
  Intron number 7 from transcript evm.model.supercontig_157. 4 (locus evm.TU.supercontig_157.4) derived from phytozome v7.0 (chr-ID supercontig_157; pos 25866 to 28538 reverse s trand)
gtccttctggtcttaacacggtgaacctattaaaggttagaacaatattgggtttctatttgcatatttcttttactgatgttgattttgttagacatctcgaaactccttttttgcccatgatacatttacttctatgggttcaaggaggagctagtaatctaagcttaggtgcattctccttttagttgaggtagtctttttttcgaaattacatttgattaaaagcaaggggtccaatgaggagaggccccggatggtaatattctggatgtggcttttagtatgccaggtgggttctttgtgctgatgtgcattggagactatggcctatttctacgttgcagatgctatcgttgtaaaatctgggaagtgtctgatggagggaacattatctttctgagcaagaaagacaaccctaacaaggtgaaattcaactatagtgtcactgttgctgcctcctaggtctaaataactttcctcagaagcaaatttagaataaaaatgctctccccttgaatgccacctttgcatggaagaggatgggaagtggcctggtccaggatcaaggcaaatctagtagaaaaatgttctctctttgattgccaccttgcatggaagacgatggagaaagaaataaggagggctttagatcctggcgatggacaattcgaggaagagagcgattggatatcaagttaactgtgtgcaataaagctccttttggaaaatagctttagatctttacagtagaaaaagagttgtggaggaggtattggtggctagatacatattggataatctttggtgggttgaaagaagctaaggtcatttcttggaatttggaatccattttcttttgacacattgtttatgtggagagacagaatctccttaagcaccttcttttgagtcttttatacaatagcctcatgtatggatggatgtgacatttaactgaacatgcaagatatggacattgctttgggggaacttttgaatgggtagtctaggattagaaggccttgatttgatgactctcaactacaataagtagtttgatgttaggtatttctttgaagctcttgaacatgtctaaccttctataaggaatcctaggctttgtatatttcaattaaaaaaaaaaggaatcctaggctttgtatgttcaatgaaaacatattctgatccaaattttggtatttatatttagtacagaatgttttgatgtgtttatatttgaattgtagtaaaaaataaaacaaaatatgaaaaatgataatgaaaatatggcacgagttaaaaagaataaaaaagttatttttcttgtgtttataattgagtatgaaacatacacatcttttttcttttttaaaataaaaagtataaaatggtatattaatatggggaccaagagggtgccaacccacgtgtaaaacaatttaaaatctatcaacttatcaataagctcctctaaattctccatcgatcgtagagaatgacccaataacaaaaaaattaagtgcttggaaccatttgttattaaaaacatcaaacctattcacatcatccatcctatcaaaagccttcttgtttttctccttccacactgaccaaaaaatagtgagcagtatcaagtctgtatatttactcctactcctgatgcctctccacgcctaggtctcatctcttactgatcccttcatcacccaattgatacctaacagcccataaacaactagacatacacatgttaccatctatatttttataaggaattatatgaatttagagaatggaaagtgaaaacattttcatgtacaaactgaggtctattggtctttggaatctattaacaacttgggaaaggaggaaatatttagtaaatctattcaactcttttgtgctttagcttgtcttaggttaaagctggtttcttgtgcatggaggtgtgtacttgggaggtttaaggccttaaaggacatcatatttggttttaccatcaatattttagatgagttgaggagaaagaaacaaggagagcttttgatattatggagggtttcatttaccataaaagagagaagagttcgaaactttaggccttatttagttgtagaaaaatgttttgaattttattttccaaatttatgtatgtgtatatacaaaacatgtatagttgttgagcatgaaaatttaaggtttgaagataaatattgaaaaatatgatatggatttgaaattgttctgtatatttttctttttttcataactaaataatttttgtatataaaaatatatgaatttagaaatacaaactcatattaatttatgaccaaacagggcttaactttttgtccaaaacattttttttttctgatttgatcagtaggacttgtagtctacatttttttaaaaagagttttgtcatggaattaatcttgtattcattgatagaaaccccttggtatctcattaatatattattttgcttcaaagaaaaaatattcttcttattttttgatgaagaagtatgcttgtcatttgcattattcatttacagggtggtttatccgaacctacttcaatgcctctatgaaaatgtaagaggttgatataatttagataatattttcaggttgcttcaagtgccttaggctttggacctcaaat

SEQ ID NO: 8695 - DNA, 498 bp, Carica papaya
  Intron number 10 from transcript evm.model.supercontig_10. 161 (locus evm.TU.supercontig_10.161) derived from phytozo me v7.0 (chr-ID supercontig_10; pos 2130127 to 2130624 rev erse strand)
aaagtaagtacattctacaatttgttttaaatgtaaagaatatgtagtatcatggcaatgcatggagttcataggaatgcgagttcggtctctaaattttaaattttgctcagataccttatctgaagtggagagtcttcccgtgctttttgttgataattggtatcttattaaatgagatatttgcaaaacgcaagcaaaaatatttctgggattttctttgaggaagatccctgtcagggaaatataatattagtttttgtagaaaccaattactcagaggaacattatctatttctggcaatttatattctattgctgtaagccacatggatacttctgtaagaataataattggtttttgttcttcagatcgttaatttaactaataacattaagtaaactgtcttaattctgtttccactatcagtgctattacaactgatttggttggattatgtcttgttataggtttagcgacagttatcgggataaaat

SEQ ID NO: 8696 - DNA, 1614 bp, Carica papaya
  Intron number 7 from transcript evm.model.supercontig_137. 23 (locus evm.TU.supercontig_137.23) derived from phytozom e v7.0 (chr-ID supercontig_137; pos 493273 to 494886)
tgaacaggtgtgaatttttttaacaatttcattcttacaattctatttttgatgaatttttagccttggtcatagattgtttgctagtttaattgtcttcaatatatgtcattttctgtatgttgtcttttcctcagactaaagaatatggttgtactgaaatgccataaaatcttcttttgttaatagtatttccattaaatcattttcactaatatttttttttaatttttttattttatgtcgtactgttcctcagattaaagaatatggttggacggaaatggcataaaaagttcttttctttatagcatttccaaatgcttagttcgtcatatacaatcctgttttattcaatgttcttggcaatttaaacatctagatattggctaatctttgtatggaacaaattgtttgatgttctcatttgtttttgtttattttccattcgattctgtcaatttttagttctatttcttgtagttttcacatgtataattagaatacagtatgctgtgccgtagtgaacacacctcaacttgaatggtaagaatttatttttacttatcataggagttgaattccactatcaaagaattcaaagagggagtggtgataacttatacataaaaaattatatgttaatggtacatattaagactaatatgagaattagaattgagaatttactaggaaccaaattaggaatgaaccaaaagcagagagttttggaggtaaacacattaaacctagatgctttaagttaattggaaattatgtatttgatgactcattctttctgcagtttattgcagagagattagctattctccgttgaatttttgttagttctttattttatttatttatttatttttggggaggatgtcaaatcgtcatggttgtatcttcttttgattactcataggaatagtaatagtctaccttggttacttttatattttctagtttatttatgttttgtctttataattttttctgatagaagaagaacatttattaagatagaggagaaaaatacaaagaaagaagggaaggatatcctccagatgtttcagactacagagattgggaatagtattagtatttcctattattaggaatagtatcagtaatcttattatcattagtttcttattttattaaaaagtggtattcctaatcttactagttttagtatttcctagtctatttgagaaagatttatttgacactatatatacactgcaacctctttgtgattgtcatttcaattatttggtaacatattttgagaatttctcttacttgattgtgtgattcaactatatcctaagtgtgatgcctaagatccctatatatatctaagtttatccccaaatcctaaagtcggtaaattaatgctatttgtcatacaatttctttttcttttattgatatttcttttgttttaaattaaaattttggaaattattactaaattgacacatgttttgtgctcatcgtctaggtatgaatatttttaactaggttttaaagcgattttcttatttttccctttcattcctgagagttatagattgcaggtgagttacgtgaaagaggaattcttgc

SEQ ID NO: 8697 - DNA, 1380 bp, Carica papaya
  Intron number 4 from transcript evm.model.supercontig_6.9 (locus evm.TU.supercontig_6.9) derived from phytozome v7.0 (chr-ID supercontig_6; pos 35651 to 37030 reverse strand)
tgcaggtgaagaagcagcagacaccattgttgaaggttagtaactcttatctgagaattgttgttgctcatcactcttatcatttgcatgagctttcaattggttaggtaatagttcatacctttggtcatagaagagtaacatgcttgagtgttttcagaatgcttttactcttaatagttgctttttaaataagcattttactttgaaaaccaatagaacataattatggatatctgatataaaaactaagaactgtatttctagctaatctataagtgtactggtatggataagattaggtcttttagtaatattaggatttcatttatagttttaatttttttaagtcaataagttttcgagtcggatgctttcatctcagttagattaggattttatttttaagcattgtggatacctatctaagtttacttataagatcaggtcacgagttagtagattatggtgagattcctctcaatacttcagttgtgacttaatcatgttttttaagtgtattgcctacaaacccatcttagatgtgatgcttgaggatccaatgtgtgtctcctagttattttcctgtttttctccattttaggtgtgacatctaagaattctttgaatttgtcccaattcctaagtagacaaatcaatactcaactcctaagtctagttgatataaccaggcaagacacaagtgaagtgaacatgtgacagagagagagaacaataaagaatttactggaggttgagaatgtacttacatccaagagttaccagcaaagttttcaagatgaaaacttccatctaacaactaggactttttcatgtgtattggattaagaagaaaacacaaccttgccagaatacccattgatgaaagaatgccttgggtaaaaaatactgtattgcatccctctgggaattttttgtaagcagtaatctctctaaatacgagtaataactgaatatggcttgtatggaaattgttaaatttcattagctgggcagtggcatttagttgcgctattcaaaacattgttttcttttgaaatttagactatggtaatcattgtgcctacgtaaactgcatgatcatgaccacaattttcagtatgtacaaagagattcgagtttcggagaacaatctatcagctctttggctagtactctacttctatgctagtagtctgtggccttacatgtatgtagatgtagatggttctcattcagtttttgccaatcttgctttgggatcatctgttcatatccaagtgctaatgaacaaattcatgcttctgtagaagtgggaaatgtccccttgcaaaccataatctattgaaacacgcatcttgtggttgcaggtgaaggcgt

SEQ ID NO: 8698 - DNA, 1088 bp, Carica papaya
  Intron number 1 from transcript evm.model.supercontig_128. 41 (locus evm.TU.supercontig_128.41) derived from phytozom e v7.0 (chr-ID supercontig_128; pos 303995 to 305082)
gcaacggaggagatcaaaacaaggtaggtaacttttctggttttgttttgttttttttttatcgctcgctgtgatgtgtttctcttccgaattcccgaggcttttttcgattataagcgctgacctgtttttggaaattttagggattgtcaatggctaggttttccgggattttaataattgacctgtcctttccggcttctgcagtttacgattcccaattctgtaacaactgtatttctgaaatttcaaaactgttaaaggatcgttccggtttcgtagtatctttgcttttcagtttatcgaggtgtttccgatgctggatgttccggaagttaaaaaagacttcggatcatttctgtgtttgcttttgtttctgttggatactcaatatttgggggaatttccataattactgaaattttccatttctgatcattatcgtagtagtttgagtggatcaccttacagcaattacctctctgttcataaacaaatcaattaggccatctgctgcttctccaattttgacccttctcatgttcatttactatttttttttatctgatttagttcaaccaatttactgttctgtacttgattataatttggtctctgagtccttgtcagttggtactggatcagccgctctgttccgaaaaaataccttttgttgatttataggttctgtttcaacagtcatggatctcttacttacctttggatctttgtagttaattgaactgtttcttttttgttttaggatctgaaccaatctactctttcttcttctcctttcccctcttgggatcaattctctgtctgcttttcttctgttaggattattctgtcagagggtataagtggttcaaaattgaaatcaaacagaaaacaggttaatgcttttttttcctcttttttttgaagaaaacaatttgagtagaaacttaaaactttgattctctggttataaaatttcttcaactgtttgtgaatttaaacttgagtttagccttctaccatgtaaacttgagttttcctgctgaaactcagaaatttcaggaaaattctggggaacaagtcatcga

SEQ ID NO: 8699 - DNA, 1374 bp, Carica papaya
  Intron number 1 from transcript evm.model.supercontig_9.28 8 (locus evm.TU.supercontig_9.288) derived from phytozome v7.0 (chr-ID supercontig_9; pos 1978313 to 1979686)
gtggacaaacttcggtaagttctacttcactttagtctcaagtatcaatttgaactccagtatccatttaatcttgactggtcagtttaatacatggaatgtgcttgtagattcatcatatgatgaacaaataggaacagaggatgtgtattgatcagttttatgaatagatggccattgatctatgatggattaaaagttaagcaaagctagcaagctgcatatgttatgttgaagaataagtacaacagtttgtttggatcaattattgtttcattctgtttgaattgtagttctaatttttatagtggtcttgattgtaataatttgttgcacctgagctattctcactttcaaagaattcaagatggggttgaagataaacatattatgttgtaattatgtacatgaagatcccaataaaaattagaataaggaattagttagggaacgaatgagagttgaagaaaaggagacccaaatatgaataagtaggaggattttagaatatagataataaaagttgagccctttcagaaaacttaggttccatttgatatataaaaacatctttttgtttttattttctaagtttaaacatatttcattaataaaattttgttaacaatgaagagaatgataatgaaaatgatgatgagattaggaagttttaaaatgttgtttatagtgttttctaagtaacgattttaattgtgtattgatgattccacaaatacacaactcttacttgctttcatgaataaaaaatgcataaacacatttgaagttggaaaataaaaactacaaaatcgaagggagccttaaacttttgaaaacatatgtcaaccaactctatgataaatagtaagtagaaagtctattaaagatacaaatagaaatgctgagggatatgattgtaaacaagaaaattctcttctgtatgttctgtttaatacttgatcatccaaactttgccttagttgaaactgaatccatatccagcttagcatttacaccaagcactatctgaagttgccagctaaaagaggtctcctgaaaagattgaatggaactcaccatgcacattcaccagagccaagttcttgactgtattagtgtgcaggaaggtcttcaatcccctaggtgtggcaagtcaacttttgtgctgcattaagtattgctaaaagagaattgtatggttgggctgcaacaagaagggagaagttatatggttatgatgcgggtaatccagtaattttcctcggacaactgtggggggcggggcggggggagggagaggaggaaactgagttcaggtggattttttgagctctgcctaaatcatctctgacttcttttttcttatgtgacagg

SEQ ID NO: 8700 - DNA, 1247 bp, Carica papaya
  Intron number 3 from transcript evm.model.supercontig_132. 15 (locus evm.TU.supercontig_132.15) derived from phytozom e v7.0 (chr-ID supercontig_132; pos 182297 to 183543)
tatatttgcctttgaggtaagttctctggtcttacaccatgcaatatttagcatattaaactctttgatactagtgtatttgatcaatatttcaagtaggaggttataggttcaacaattaaagactagctcaagaccttccttaaatgggattctgtttggagggttattgagccactcgctcttcattagggttgtgatgacaggctcactctaagagcagtagcgattatgtattaaaaaatattattaaaaatgtcatgtattatgacttaatgatgattcagaatatctcaacttatttgggaagtgtgtagcttgatattatgtgggaaatttatttagtttctattctagcattagttttttattatgaaatcctattatgcttgttgcgatgtatgattgatgcctatataaaggttatctttaacataatactggaaactagcatgtgaattaaactctggacgtattttctcgtaattgagtatccataattaaggcctttaggtgttctcttcaggttttcggcttttcctttttgttcctctttcatgagggtctgccttattctctcacttattgtaatcttttctgtcttcttaataatactttttcatcgcaaaaccatttttactttctttcatgagggtctgccttattctctcacttattgtaatcttttctgtcttcttaataatactttttcatcgcaaaaccattttaactctctttcagcttttcctttttgatctatgtgattttccagtcacatttatttatttttctcttttctattcagctgtgctctatcaactagtattgaaattatatcctagaaattcatgtggttttcattcttataggatagatcactcatttcagctgtgctttatcactagtattaaaattatattctgcaaaatccatgtggtttgaattcgtatatgatggatcactctgttattattataattacctaactttcatgtacttctgggcccgaaaattctggcatacactcaagaatattcaagttcaaataattgaatatggataagaccttgtatagttcaaatgtcaatcagctggggatatgtctaacaacttgtaatcatttattagattttgtggagtccagatgtgttttggtatgtgtttgttatcctttttggatgtttgtagataaattttactttcatggtgcaggagtttgtgcttccaggacttcattcattccttct

SEQ ID NO: 8701 - DNA, 4996 bp, Carica papaya
  Intron number 3 from transcript evm.model.supercontig_36.1 23 (locus evm.TU.supercontig_36.123) derived from phytozom e v7.0 (chr-ID supercontig_36; pos 973866 to 978861 revers e strand)
ttggttttctaccatttgtaagggatctacgtgaggtatgattcacaacctttgaacttgcatgtttccacatttttcttttcctgtaggaaggatggttgtggaactaattatgaatattagttagatgaacattgtcatttttttgttcttttttgattaacatttttctacatcttgcatatttaggcaggattaatgattctttttcctactgacattaaaaaattggcaaattactttccacctcatatgatctggcctggatgcaaactgttagaatattacaaaacatattatgaagtattaatagggtgatttatgtttacatatataaatctctcttctatgtatatatatccctaactctatgtaatgaaagaatataaatattcagaatttctttccctaaatcttacataatattagagtaagggttagggttttaggagtcggattacatcagattaaaagaaggttgaacaacccattcccagcatcagaggaggacaactactaatttccgttcagttcagagtgtgatcagcacggtggtgtgtatgcgggagaagccaaggaagcagttcgcgcagcggtttgaggctgcatgcggcgggattgccggaggtgagcatcctcgagcgtcttgggttcccattcgaggaaagaaggcacagaggagctcggtcatccggctctgtgcacgaaaccagaaggccgaagaagggaaagctgcgacggaggagatcgcgcgatagcaagcgattcttagctttccggtgcaatttagggcgtttcggcgagtgtcattccggatcaaggtgcacattagggttatgtggtgattttcggccgaaagaggaattttggtgttttccgatgacgacacgtgaactccaatgggagtgcatgtggcggcgcgtgagctcttgtggtggcagtgtggttctcttgaattttcgtgtgtgagaaggtattctgttttctcaaaaattttgacttatttgcagtgtttttcgggtatttctgactattgtgttttgggtattctgaatgacatatttcttataattcctaaattgaaataaatattgtctgctactactactgtgaacaagggcatataaaacggtattgtaagaaattgcagaatcgtaggatacaaaccgccagtattgttgctgttactgctagttcatcttttaaaaaaattgttatgatttcagctgacgagtatgctaaattcactcagtatcaggaatttttgaataaattttctgttttcgctgaattagagaaaaaatatctcatctcttcgaacagatgagtgattgattctggtgctacacatcatataacaggtaatcctaatatgttttttggttttcaatcatacaaaacacattttcttgtaactattgctgatgggtcgacttataacattgtgagatacgggactataaaaccaatttcatctattaccctgtcatctatactaagtctacctaaacttgccttcaatctgatttctgtgagtaagttgactaaagatttgaattgttttattgtattctttcctgatcactgtgtttttcaagattttacgacgaaacagattattagtgaaggaaatatattaaatggtctctatattcttgatactaagtgccttggtcggttgtctgctctagtgttacatctccatgtgaaacacattgtcaattaggacatccctctctacttgtgttgaataagttatgttctcaattctatgatattcctttggtggcttgcgagtcatgtcggtttgtaaaataccattatagtccgtcaggtccaagagtcaatagacgagctgagtctttttgacttggtttattttgatgtttggggcccctgtcctgttgcgtgtaaaataagttttaagtattttgttacttttgtagatgatttttttcgaataacttgaatatcttttatgaagaatcgttctgaaatattttcttacttttatgttttttgtgctgaagccaagatacaattcaatgtttctgtgcatgtattgagaagtgataatgctaagaaatatatattaaactcatttcagaactatatcactcaacacgggatccttcaccaattctcgtgtattgatacaccatatcgaaatagagtcgctgaaaaaaagaacaaacatttatttgagacaactcgaaccctcttgttccaaatgcaagtccctaagtaattttgggctgatattgtttttacaacatgttttttgattaatcgtatgttatctacaatacttgatggagatgctctttacactcttctttttccaaacaattttttattttcggtgcaatctaagatatttggtagcacttgttatatgtgagatgtgcgacttattgtgacaaaatttaatccaaatgctctaaaatgtgtatttttgggatattctcgacttcaaaaatgataccggtgttacgctcctgatctcaataaatatttggtatcaattgatgtggttttttcagataatatatcgttgttctccttattatccaaatctacaagtcaggaggcggacgatgagtaactcatttataattttacaccaggtgtctctgttgagcaaacagataatggtatttctctagatgatgtgcctccgacctcactgagcaagttgatgatggagatgctccatataggcttgcgctacttccatcatcatctgattctgcttcacaggaccttggtctccctattggttttcgtaaaggtaaacgtcggtgcatcattcgtcagctaatttatcccattgctaattatgttttgtatgaccatctgtctctctcgtctacttctttcattgtttttatagactcaattttcatacccaaaacagttaaagaacttgtgaattattctggttggcataatgcaatgcttgagaagataaatactcgataaaaatcatacttgggattttgtggatttacctaaaggaaaaagggttgtagggtgcaaattaggcttttcagtcaaagtaaactcagatggttcagtagcaaaacttaaagtccaacttgtaccaaaaggctatgctcagatttatgaagttgattattttgataccttttcaccagtgacaaagcttacatctgtccgtttatttatctcaatcgcaacatttcacaattggcctttacaccaattagatatcaagaatacattccttcatgattaccttttagaagaagtgtatatgaagcaatcgactgaatttgttgctcagggagagcatggaaaaatatgtcatttgaaaaaatctttgtatgggctgaaacagagtctccgtgcgtgttttgacaaatttagtgaggtaattctggaattcgagctgaagaagagcaaatgtgattactcggttttctataaacagccaacaacttgtcttatactccttattgtctatgttgatgatattgttattacaggtgatgattgtgcagtaatatcttctttcaaatcattctttcataccaagtttcacacaaaagacttaagtcagttaagatatttcttaagagtagaagtaacaagaaataagaaataacttttcttatctcagaggaagtatgtacttgatctacttgtagaaattggaaagttgggagctaaaccgtgtaatactccaatggtaccaaatggtacatcttactaaagatgatggtgaatcttttgatgatccggaaagatacagacaattagttgggaaactgaattatctcacagtgactcgtccaaatattgcatatcctgtcagtgttgttagtcaatttatgtctgcacctacagtcaaacattgggaggctttagaacagattttgtactacctaaaaggtgcttcaggacacactcgcattgaatgttttgcagatgctgattgggttggatctaaaattgatagaagatccagtatagattattgtatttttgttggtgagaatctggtatcatggaggagtaagaagcagattattgtgtcccggtccagtgtagagtccgaatacaaagttatggcctagtccacatgtgtagtcttatggatacaacatctcttagtagaagtgagtttgaattccatattacctacaaaactctgatgtgataatcgaactgctcttcatattgtctcaaatccggtgtatcatgaaagaactaaacacattgagattgattgtcattttattcgtgagaagagtcaggagaacttgatttctattggttatgtgaaaacaagagaacaattgggtgatatattcacaaaagttttgaatggaatctaaattgaatatattcataataggttggacatgatcaatatttatgcttcagtttgaggggagggggagtattagaatatcacaaaatatattacggaatattttatgtaattattagttgattttttcacattaattgagtgatttatttttctatatataaattcctcttttatgtaaatatatctctaactctatgtaataaaagtatataaatatttaaaatttcttttcctaaatcttacacaaaccgtgacctgtgattttttaagtttaacacaatatgatttttttttgaaaaaatacttattcaattttgtaaaattctttagaggatatctgagaacatttatacatcatgaacatgaaaatgaaaaaatttaatgctaaaaaatcaaaattaggggtaaaataaaaactataagataatagcttaaaactagttgttttatatataataacaagaaaccaatccacataatgctcatcacaaagaaaattacaaggtttcagttgcaatcaggccaaaccaaagggggtgaacttgtaagttgcccctaaaaaaaatgaagtcaagctaagactattgatctgcggctgaagcctggcattaagtattttttaattctttgtagaat

SEQ ID NO: 8702 - DNA, 5811 bp, Carica papaya
  Intron number 1 from transcript evm.model.supercontig_131. 16 (locus evm.TU.supercontig_131.16) derived from phytozom e v7.0 (chr-ID supercontig_131; pos 153361 to 159171)
ctgaggtttggttctatattctcttctgctggctgtttcatttctgtgttttacagataaagaaaggaaatgctaaacgatgtttgtgaagtagagaaagggtctagaaccagactccagatgcaaatgggcaatttaatgaagcattttagaactcgattactgagggttattgtatgcttttggtatcgtatattaatttagaatataagtacattgactaaacatattgtagggatagtgaatgagttgagcaacagggtcttaagagctaccgaaaagcttttttcttttttttttttctgggttgtggaaaaggaaatattgttggaaagaggagagaaaaaataacaataccattgcagaagaggcaagagttcttcccaataccattgcagaagaggcaaggacacctctagagaagccatggtctttgtcagaaaaagaagcagaaaaaaactagtctgccccaaaagaaatgatagtaaaatgaaccttcaaaagtctagcgttcgtgctctaaacacaacacctgcaacccagcaaatagagctcatttccaaagcaccttatgatgtatgaaaaattagagttagtttagctacttcaggattttggagatagtaacttgcacatcaatatggaattccttagatattaaacctctgtatcacgctttaacagtttaactatataacatagttagaaattaagaaaattttaggggggaaagcaatcataacaatctagatagaaaggtgagactctctgtggcattactaagctagtcaagatagttgttgctagctatgatagtaaattagatcttgaggtctttctagattggctagttagcatggaaaattactttgactaatatgggataagtgacgtagaaagagttcaatttgttaaaacgaaattgagtgagtcagctaggaagttttgacaagttgtctagctaaccgaaggcgtctagagaggcctcccttagcttagtggcatatcgtgaaataaaagcttaaagaaaagcacttaccaacctatcataagagataattggttgaccaactactgatcttaaaaagttgatctctagtgttagtgactacatgtacaggtttgaagagttacaatttaggtgcggtcttcaagaggaatcctatatcaatgttagtaggtttatcaatggacttaggacaattttttttaaagaaatataattaagaaagaggaacgatacaaaaacaacggataagatatccagctgaaaagacaactagcaagaagacaaaataaaatgatagatgatcacgtgttgcatcccaattcctatggaaggcagtaagggagatgtcagagaactttccatgtgccttgacccataaggaaggcggaaaatttattttgtcccattatactgtgtgcagaaacgatcagttgtcaaatattggattgtttctttctaccaaattgtccatagccctgcaaacgaagatcttttgctgtcttggtttcttccttacccctataccgttaatattggatttgatgaatcattccgatgttagaacaatcttactagtgcaatcgtcagcaaatgacataaatcattaggtcccaaaaatactacatatgtgagatggtccccaaatagcactatggattaatgaaagtggaactaaaatttgtttataatagaaaatatcacacacttatgttttacaaactcattaatatcgcagtgtaaattttcaaattgcgaattcttaaataatgtgaagagataacatttaagatggagaaagatgagtgctcaaattttttatagtgaaggcaaatcttgtatgtgaggttagtagtaatagcagataaagatcccctagttgcatctaagtagtagaatccatttttgactttagtacacttaattatttttttcaaattttggtcctgaaagtcacaagaagaagagccaaatattctttaagagttctagttttatgataatttattgaccaacacgtgattattagaaaatttgggaatatgtaatatattttttaggtagggttaagtttaatgtcgtcattgccctgcaatagtgttgaaggaaccatctgtagtgacagtttttttattacttaaatatagaatatatgtgtaaaaatatttagaaatattgatcatatgatatgtcactcttgagtctataattcaagaattttaaaggattatctaagatatttagttcttgaaagtagaagtcatacataagtgcgttagtaaattggtatctgtttgtttctgcagggactcaatcgagcccttagtctttcaatctcactctgtatttactacatctaagtttcatattggattgctctataatttggtaacgtgagaaaatattggtttgcactgagtcaacttagatcacgaactcactaagtcaactcgaacctaagactcactgagtaaactgacgggttctttgcctttcaagtatagtggtgctgcagatggatcaaggtcggatttggtaggtcatgagctaaggttgtgacaaacagatttgagtcacagcagagacaagttccgttgttcgtttcaccgagttagggctttgagtcccgtttggttcacaatagggagttgtgtgactagggatctgcagctgatgtgagcctagggttttgacaaggttgtgtcaaaaggtgtggcgcaactagatgtgcggttgaaggcggtcgcgactcagggatccagtgtgcaggtgtattgatgtgtttgaggctagggtttctagcaatgaaggctaaagtaggggctagagtctggctgaacagggtggcgctcacagagtgacatgcgactggagtctagcagctacaaggataagagagcaaggttgtggccaatcttatggtggccaacgactggaagtgattattggagcagggaacagagagcagttatgagcatgccgtgggtagctacgcacagttggaatttgaacgagggcgacgtacagttgtggtgggcttggatagcaagcttgtggtgcgcagcagtgggctgtgcacctggcctttttttttttactctcagctatgaaggccagtggtggttgttgcggtggccgactatgaatgctgacccttttatgattttctttctttcggcaatcaagacttaatggagtttgtaaaagattagggtttcttaacctaggactttaatactatgttaagaatatttttttaattgatttacattttattgaatattaccactttaaatgatgtaaaactcagaatcaacaatataatgcaaaaccatacaattttaattaggattagaaaacttaatttctaagtaaactctccatatttaacccgctatcaatatgtaataggaactaaggtaattggaaaaattaaagaattgaaaaaatatcataagactactttgatatgttgaatcaatttctcgttcaacgagaaggatgaaaaatatcgtacttgttgaaagttaaaaattttgtaattttattattctgaaacttgatatttacaactatgaattaaatgtctatttatagttataagccatgtgaattataaggaaacaaatctcctattttagttgtaataaaatatatagaaaattaaatcaaactaaagtaagaataaaattaaatcaaaaagattataaccataatagtatagatgggccatccctttgtggaaaccttttaaatggtggagatttcattaattatagcggtatcttcctttatagacttgagatttaattttctcttttcttgaaagattgtgattgatttaggaaaatcttggaattaattgttgattctcccttggatgagtgatcttgtgataaatgcttttgatgttggtttctttattttaaggatatgattttagttagaaacattgaaaagaggatatgatcttgattctcgcttgatggattcccgaaattccttgattttagttttttttttgccatatgagagagatatagagaaaaaaaggaaactttcctcattgagagaaaaatctctcttgagtgggaaaaaaatccctcaagggtaggaaaggaattttcttcacttcagctaaatggacttgttctctttctttatggacttctacctttggcccaagtctttcttcttcatggatccatcttttaatatagacttgaaagttttccttgaatttattggcccatgttattgtgatactccatatataaagtccaaatacattttgaattagattcatcataatcctttctccatatgaaccttgcttggcttgaactggatttttaaactaacttaaatggatcaaaccatgagctctttggcttgaaggttccaagcaatccatgcttacatcactatatatacaggttttgtaagacagaaaaaggaatagacaattaattagaatttattacaagtggtgtaattttacccttatacccttgaacctgatttgtttctcctctaacaccataatttacttccttgttgatactctgatttgcctcatttttaacaccttgatttacttcttctttaacactatgttgtctaaaaactaattttggaaagggaactttatccaaaaggaacactaagttagtcattgaggcacacattggtgcaaattatgtaagctcattgataaaggatctactatggattatcgtaattttcttggaggcaatcttgttgcttggaggagtaagaagcagaaaatgatcgctagatcaagtgcagaggcagagttcgaggcatgacataaagagcgtttaaatttttatggctcaagataactttgaaatctaaggttcagatggaaaggaccgataagattattttgcggtaacaagtctgccattgacattatttagaatcatgtgtaatatgacaaaacaaagcatattgaagcagatagaacatttataaaggaaaagttggatagtgaattagtttgtactcgtgtacttacaaaatgacttagttgtgcaatgttccaagaacttaactcgaagcttgaagtaaatggtgcatattcaccaacttgaagaggagtattggaaaatctctcaatatttttttaacattatgaaataaatcttcctaaaatataggataccgattaggtaatcctagtaatatggagatttggtttgatatgattttatttattttatttgctgtagttaatttgatatttttttctttgtgaaagctttatgtaccctgtatatgctcattctcaatttacaagaaattcaatttatctctaaattctaaattgttagtgaagacatttcagagcttgacatataatgtgtttttgcctggaattatagtcttttcttatgaggtttttcatttttccacataacacattgttgccttgaattataatcctctggtgcaaggtattttctattgtttccatttcagctgtaaatctcatggcacctaagtgaggatgatagttatgtattgttaacttggcattccttctgttgatagtaggtggataaaaggatcaaacttatcataatatgagtgcatgtgtatatcttcattccatcttcttttctttttcatttgtgtgtttttacttattgcctttgggcagtgggtcatttcttctctaccttcatctgcaaacatgccttcttttagttttcttgttaattcttttttttttttcatctgcaggtaaataaggtgaaaacgttatctcctcattggga

SEQ ID NO: 8703 - DNA, 4064 bp, Carica papaya
  Intron number 1 from transcript evm.model.supercontig_152. 68 (locus evm.TU.supercontig_152.68) derived from phytozom e v7.0 (chr-ID supercontig_152; pos 708864 to 712927 rever se strand)
aggagccgcccaggcgtaaattcaaatacattccggtacttttatggtggtttgcttcttaattttctgttttgctatctgggttttgcttatacttggtgtgtgatatatatatattttctgggtgatcttggtcgttcatcttttgggaggtgatctgggttactttctcggcggtatgaacagtgtttagggttttggtctttgttttttgtttttcttccttaggttgctgaaggaagaattgggttagtgtcattgcttggaaattgaaggaagcggaaagaaaaatatttgtgggatctgcatttgatagaacatgagacttgttgatacagaaaaacggattctttgagtttacaggttttggttggtagatttggttgatttgctaaaaaacttgggtttgaattttgttacgtttgaactagagactggaaaaagatgtggttgattggatttgttaaaatggtattgattgtatttttatattttctatttaattatattagcttgacatactacacagaaaaagatgtggaaaaagaagcatattggtttttttttttttaatctggttttaacttctagacaataagatgcaagtttacgaggacataaacatgaacttacctgatgggaggtcagttctattgcttggccagattttgacagatgtattttactttgtgtaaacagaacattatcgtattataatcttttctatcttaagatcctccgttatttcatttttttgggggcagggagttttctttctttaataaaagcattggggaaagatgtctctttgtttagtgaaaacattggggaaaggattaaaacttttctgagaaaatttagtcttaaatactgatcgatgtccattgaagaatgtatttaggtgctattttacttctgtgttctaacaacagctgttaatagttgaggaataggcttaggaagcgtgcttgatctaatccttgcaatgactaatcgatttcttattaaaaatttgaaagttgtattcgtgttgatgcactcttatttctgcatcacctttagttggttaaaaccaataaaccaatagatttgcaagcaaaactcggagatcttaggattgcgtgcagtattattcatatagtcttatctgaaatccaatgaaattataagcagcttaaataagttggaagtagataaactttaagaatagttagctggatatcagcccaaaataagagacactgagaatttttgctgatttttcccttcctcgtgatattgaggttaagtctatagacaattgaaggaaacttttggagggtgtataatttagatgtggttcttactgtatgggctttagtttgaccattatcataatattaacctcttgagccattttgcttcctcactgaagctccttcacctgaacagaaaaattttatgatggcgaattaaaaaaatgcagcacagatctctctctatttgttcttttttaatatattttcccatttatcttttgtctatctcgctcacccaaagaagagagaaaaaacttccgttaacgttaacgtatacaatgcttcttatgttgcactgaaagaagtttatgttaaaaagatgtgttttagttgctacagttaaaagcctgctgtgaataagtcttttttagaagatcatatatattatgattttttttaaaataaaaaatgtgaagtatatattgacaaagtaccaaaagggggtaccgcccatgtacaaaaaatttataatatagttaggatgtcaataacattttcaaaattctcacatctaataatgtcatgttctaacaaaataaatccaaaataatgcaaccatctatttttcaatttatacaaccctatctctttatcctcaaaagctttgaatttatctccttcgaaagcaccccaaaaaatggtcaatggaataagtttagccatgtttctattaatatgtataccttcccacgcccacatttcctctcttacagatcccgacatcacccaattgattcctaataatatatgtaccttcccacgcctatatatattataatttgaattgcattaaatatttttttatttggtaatagtatttattttccatgaaagcgaaatttgttgcttccttaaagcagctaatatatattttttgcttagctaatattttcaatgaaaactttggaaatataattaagaaatataccaaatgccagttttgcaaaaggaaggctatattttgaagaaaagaaaatataactccaaaagtagaatagtagaaagcctaattttatcatcttgcttgaacaagatttattatatagggtcatacctctatgacctcgagttctaataagatacgatctcaagtttgtgaatgaattgtgaccgtgtggtcgaagcatgattagtggcatgatggtcttggactattgatattgtagaggattgttctcagtcaagatttgaccttgactagggtggtagatggttgtttggcggactgaaaagaaacaacaagttctaattgtgttggttcatctcacattcactcctagtctctacaggcaacctctttcaaatatacaatgtggattttgtgatccaaatgaatcatctttttttgcagaggcaagagaataacaagttacaattttgtgtttcagtagaatatgtaattctactactgtgacattcataaatgaaatagtcactgggggattaccattattttcttttacagttatgaatcttgtatgtcttctttggtaaaggaatttgttggggtcttagatggccagaggaacacataaagactcttagatgaaaatggaaagagatataactctagttcctttgaatacggaagattttacatgcaacaagggcttgattcatatcatcttgacttggttatgatttttttccaattttttgtgaaaatgatacacttgaccgaatagaaaatgccgagtcaaatcttcttcaggtaaataaattggcttgatttggattcggagactcgtacatttttatataaccatgtgctatggcttgaatcgttagtcaatcctctttcaattaagagcagttggcaattaaattccaaattttttcctaccaatttcattccatatccctaatagtacaaaaggaaacacattgaaggcaattgagaatgtggaaaattttcttttacaggaaaattacctcctgattcaagaggcacttaattttttttccattctcttctgtcattgatagttctgaaaatttgcagattttcttccttacgtgtttcagtcattattaagtctaatgctgtttctgattatgggggtgtttggtttgacctatttctgggtcaaacaagcttataagctggtctaatccaaaaataagttacacaggtgtttttcttgggccatatggcttatagttcagtgaggtatacactaaaagatgagctgtaaatctacttgttttctttggcttaaaagttacgtaataagtttgttttttcttcccgattttttccagaatgtcctaattaggaattacaaaatccctattcatgtcctttttggtcattttaacaacttttcaactttgaaatactctgttaccaaacactcacaaatttgtggaacttgtaagtccaattaaaatacatctgattaaagacattttacttattcattcaaaagtttgtaagtacttgcttattatatgctttctaagaccttttgagaagtaaaagaatcacattcattctaattgtgatgcgattttgtgatcctgaattttattttgtttactttgtttaaggcacaaacaatacttttcccattctagtgattcttgtcgaaaaaagatagagtaatgcagaattaagttcaaatttttctgttgattcttttgcctcaggcttgacaagatacttgattgtaattattctccagttagactttatgattgaatggttatttgggctattttgacgatgcagattgctttgctggaggaacagaaaatagaagctac

SEQ ID NO: 8704 - DNA, 641 bp, Carica papaya
  Intron number 3 from transcript evm.model.supercontig_380. 3 (locus evm.TU.supercontig_380.3) derived from phytozome v7.0 (chr-ID supercontig_380; pos 11498 to 12138 reverse s trand)
gtcttctctggttgacaaggtaaataaattaacccatcaaaaattttcatattctgtacttttttttttctttttgtggcacctaagtgcatttgtactagttgtagctgatattctttaccttccatgcaagtgcttttaaaaatttaaagatagaccaatcatcatagagctttgtgttgagaaatttgatgaagaaacaatagctaaggatgatcgcgttttttgaaaagtaccttgaagatctgattgaaataatgctcaggtcaaagtatacaaacaatccagactgtaaaaagtaaaaggctatggcctattaacctgctctcactttctttcatatgtgggaaagaatattttggtgtatctttctgttagtgtgcctcaggcttgatgtaactttttttttcacttttctttgttaaactgtttcctttttagtatcaaactttgcttacttgtttgaataatagatctttgctgttgctaggaattctactacataggattattgagagaatatgtggtgttctttgtcttaaatatgttaatttttcagattcattcatttcctttccatgcattttttgcttaggataggttatattatgttcattcattctaattaattcatcagggca

SEQ ID NO: 8705 - DNA, 1793 bp, Carica papaya
  Intron number 2 from transcript evm.model.supercontig_97.1 3 (locus evm.TU.supercontig_97.13) derived from phytozome v7.0 (chr-ID supercontig_97; pos 107267 to 109059 reverse strand)
taaaaaacctgtaactgcacaacaatatcagaaaggtacgtgctgagttttagtgatatatatgtatagattctttgctgcaattgctatgtggatgttttcttttgtttatgtttgttgactttcttcacgaatattcttgtagtctgtatgatagtgtagaataatttgaaagtgctaagctgattgctccttcattgtgcaacattttataagttggtggtcagagtgttcttaaaagcttcccatctttcagttcagttgaagataggcagaataacaaagtcatttccttccaggacttgcctttctaaacttgggcgcatttttaattatgttaaaacatgcaaaaacttatgtaaaactcatgttttcttaaaacaggacgccaagaggctctcattttaggggcctggaactgattacagatgaaatgattccaccttaatgcgtggcctcattttaggtcagttattttgtttacaatgtgaacttctttcttcatttttacgggtagcacttttttgctacattctcgcaaattacttttccaattccttacttatgaagcgttaccgttcaaattaaattcatttcatttcccagtcattacagttcctttccatagtttactttatttaaaccttaagattcttgccttatttcctcatggctcaggtttttcgctaattacatttcacaaagtattatccctttttctcttcaattttgtccctgtgcaagcctaatttcattttgcaaggaattttgttctagattttatatttacgggagttatctgttagacgttagactgcatgaagcagcactttacataattgctttcttttttactttgtaacatgctcctttaaggttttcttactttttctgtttctaatttaataatcatttgatgtcacgacatttggcgatagttctcatatggaatatggataaccattgcccaaacaagaaagtctgataggtgatttacatatgcgttctgacgtggtcagtaaaaatctccaatgtagtgtcctattacttatactgaattccctgaattcaactgttatttcatgctcttccagttgcatcttgtcccaaagccttgtaccatgcggctttcaatgaaaatcgatgttatccccactactatcattaaatttagcttcaaagaaatagcatatgtagttttccttggagaaagtgctgggccagcttagttgataaattattgatttttttatttcgttggaagttagtaaagcaagaatcctaccacgctggctagtgttcatttagcttttttcttgatgacatagcgcatgcttcattcttttatgcagtgcctgatcagttgccctgaaatctctagttccacttagtttttaatacttcttcattgattgctccaaatttttttaccatgcccagtgatggttatcctaatttctaggaccaagagttttatatttttgctcatttttgtttgactacgggatattctcgtttgttccttaattgctgccactctagtttatagcaatcttgttatttcaaaaaaaaaaaagtttgtaggtatgttgtttgcttgtcatttatttcgtctaaggtaatggtcttgtttgtgttgggtggatggtttggtatgtttcattggcaactacaaagggaaaccttaccctttgtttcttgacgacgatttcttttatattctgttttatatttgttcatatgaatttgtcattgcagctacctatcagaaccctcaaggaaatccaggcgag

SEQ ID NO: 8706 - DNA, 1407 bp, Carica papaya
  Intron number 3 from transcript evm.model.supercontig_17.1 12 (locus evm.TU.supercontig_17.112) derived from phytozom e v7.0 (chr-ID supercontig_17; pos 1440939 to 1442345 reve rse strand)
cagggcagcaacgaattcatccatttgcagttaaggtactgtaagtagaatgtcattcgctggttaaacatggctcatattattcaataaaactatttcaaaacaaaatattattgaataaagcaagatcttattcagtgcagttgaagttaagtttgtatatacttgtgtatcttattacctgcctgtggtgtgcttttacgtgaatttggcatgtgtttggttgaagcgaactatcgcaagtattttggggtctaattttgacaaagaaaagtttctattgtctgataatgttgaaacccaatcattattatttccctgaaaatattgttgagtaggcatcttgagaatcacttcctatttatttgtagttatctcaggtttttaggtcctctgagtatggatgttcaatgacatggcaggaacagaaacaatcaggccccataaatccattaaatatttgggaaaattttaaatctgttgaggccattttgtgagttcttaagcttttttctaaagatgcctttgaagtggaagtggccactcatgtattcccttatcatgggcttggaggcgactccatttagcaatctccttaggaaaaccacaatctcacgtcagagaaaattgccagactgtcttatagatgtctcagtagcagaaactaataaatctgactccagtataacatttgtttaagctttgttcttaacttacaaatccttctatttgagaacatatgttgctcactgagaaaaccactggtgaggctggagtctcttgtgcaacaatcaatccacaattcttaagaaacaagtcttgtaacttcttgtccagacttgtatcctgaccggatctatgttaaccatttataaatgatgaatgacactttataactaaacatacttggaaagtgaaactgaatgatgtttcagtgcactttttttttttcttgatcataggtggctaatgacactggttagagttagtgttcttcccttggattgtttctgttttgtgcttcaaccttgttactaatgtctaccttggttgatgaccatgaactaccttgctttttatggtgagaatacgtcacttgctttagccttctttataataatgtctctgcattgtcagcatgtttttctgtgtaccgactgtcttactgatttcgccattcgccaatcatgacaagctccttctctgactcatgagatttgatttttttcgacaggctaatgctctattatcgagattatcttgtcttggttttcaatattttggcaatttctgggtcaatgatgagtgacattcctgaaatcatatttctgcagtaacaatgcatgtcttgtaccttcaaatagactagtttttcatctagttcttttttcccgatgcgaatgcaga

SEQ ID NO: 8707 - DNA, 4549 bp, Carica papaya
  Intron number 1 from transcript evm.model.supercontig_2.54 (locus evm.TU.supercontig_2.54) derived from phytozome v7 .0 (chr-ID supercontig_2; pos 991529 to 996077 reverse str and)
ccatttatctcaaggagaaatatattctggcaaaggtaatcactttcttttcttgccttgaaagaaatgcatatcttgattttgcatgagtagtgaatcctcttttaatttaaaattggccaacgcaattatgtgcatgcttgccaaaacatgtgcttgagcttgcggtaagcatgttcactgggattaagaaattatatttgtgaggtctggcaagatgtgaaactacaattgaccaattctgtcataattttgtattgactttaatacactaataaaggactggtaattatgtttgtggttgcttgaggatgcaagagatttctaggagctttcttgaaacaatacccagcagtttttattttacattacggcatacacttcaatcccttgttctactgtttaaccttttcatagagaaaaaagaaatctatatatactcaagtcatgaatctggtgctgcctagatatgaagattttgacatgaatatttggttgtctaaataatgtaatattttttcctatatagtttttactattaattttttataattattcagaattcttattataaggaaaatttatttatttgtatttaagaatttttgtatatatatgagtcatttgtaacaccaaatatatagtgaaaataaagtaaatatttttctctaaatttctacagaagaaaatatcaataaagcccgcaaggtcctcattacagtaaagaagataacacttgaataaaaaactcagattctaaagccaaatgttctaaactctatcacagaaaagctatatcttcaaaggctcttttgttaatgtctttccaaatgatgcaaaaagtagtcactgggataagagcaacatgaggtttctttctttcttcttgtcatctcaaatatcctgccacacccatctccacagcaattgagcaacaactacatagctcaaactaaggaacttaagtactatacaacaaagctgataagcaaaaggtcacaacaacaaaagatggttcgatgtctcaacaaccctcatacaaagaagcaaccaccaaaatcttaccctctcttcaaattgtcaatggcgatgattcttcttttgagtttcttccaagcaaaattgcactaacatgtaattgaacaaaattgctagaaaaggaacttgaggagactagaaaaattgggggagtggggagatggggttgcataatcaaagaaaacaagccactaacatgtaacttccacactcaagcattaaccccattaggatgtatcctatatagaaaaggaacttgaggagactagtatattcttgtttctcctaatcattaatgtttattacaaggttcacctactacacgacatgacaagttgagacataatataaatcactcacctgagcttcctttctcctcagcgaaaaagaacccacaagaaaacgacggtctgcaggcccatcatcacaacctcactacttcaaactttaccctcctccttgatataaatctcatttggctgtagcttaagaacttctccaagccaaagttgatactcttcctttggccccgcaccatgcaacattccggaaggcttagcccagcaacttctcttccaacacaaatttggctcaaatcaccctccactaagaactaccatctattatgaatctccacaaccttttttccattagcaccttaacatattagagatttaataccccacgtcttccacattcacattttatatttgataggagggtgttattgttgtatttcctacctatatgccactaattggtattttttttctgaggaaaccactaattggttttgaagaactaaagtggctcaaagttatttggatataggtcacttgacagcttaagtgttggtgaacatattggtagatccaaaagctattaagtgtatattatccaattattcatcaacccaaaatgggtacaagtattatcatctatctaccaaaaaatattttgttactattgatatcaagttttgatgagaattttttttttcatgccgccctatcttcaaggcgagttattgtcatccattgaagatagggacaaatattttgtttttgcttaacttcctcaccatctcaatcgtccttgtacgagtccaacctgtacaacctaccaaatcacctcaattccatctcaacatcctcaaccatttgcaccaatccatgaggagaataatgaacctcaagattcaataagattaagttggtacattgaagattaagggacttggattccaattctatgcaagttcaaaactcataacctaatcataatgaggtaaacgcaattctaaaactttctcctcaactagtatgtggtcatgagcttcctattgccattaggaaagatacaagagcatgtactgaacacctattgtatccattaatgaagttcctgtcatttgagaaatttttacttttacataaaagttttacacctattgtatccattaatgaagttcctgtcgtttgagaaatttttacttttacataaaagttttctatccattcaaatttttaatatttgaggcattatttgatgagaagtggatgagagaggaaatgcagaccctagacaagaaccaaaaatggaaaattattgacctaccacctcaaaagaaataggtgtattttattaaatattacaacctatatatataagttggagatgttataattagattgagagaagcttgtatccacctaataatcaggtgcttttaagcacctgaaacaagcagaacggatggcagtgcttatgggcagcttaaaagtacttccaaatgatccctaatggaccgagctgtagccaggactcaaatctttgatatctggagagctgattccaaagacaatctagcttttgctcatattgttgagattcatatttgtagagagtctttaaaactgatggactcttcaaaatccaggttgataatctggatacataatgtgtatcgcttcttttggccctctcttttcacctttggatcagcagatacagtgaataaatagatgtgatagattttgatagaaacatcagcatagcagttgcttcccttttatccttcttttttcttctttcacatctgaccttatggttgcctgcatatggctctccttcccctatcccaaaagaaccaacgaaaaactttgacaaaggtcatgataaatttgacttactgcagatgtaatttgtgtttttccaatatcctccagctattggcttgagcatacaaaacaataaatagaatgtgcttttatcttcagtgttcaaatccaatgaaaggaaaaaacgaagatttttcaagggaggataactgtacagtctgtctctgagattgatggactgataactcatcaggaaccagctcttgagaaacccattttttctatgttgcatggtacatcatgtgcatgtctccatatcattatttttctatcttcagattataacttgaataagcatggcatagctttgtcgcaccttggaccaaaacctaacaattttttgaaatcgaaactgttcctaaaaaacatgaagctcaagttaaattggtagtgagtggcatctatatctctcaaacataggttaaggctatatccaattctttctacttaaatcattgattttctatcaaggcgacacattacaataataaatcataacctaaagctcagacaattaaaaattgcaccagcacacaatcattggagtggcttgtgtttgatatcatttataatgtcttcgaaccaagattgacacaaaaactttttaggttcgaatcactagctttcaaaagcttaactcatgcttttggttgtcactaacatcaagatgtatattcttaacatggaataaatatattgtagccggtacttctgatcctacaattacctgcaataattcaactaaaccaaaatttaatgaatatagtgaatatattgaaaactgtttctcttattgttacaagagtaaacaacatatctgcatgtgtatggtatttcatggtgtctgatgatgaactttttggtcttctttgcagaaaactgtatgcagcctctttttaatattaaagatggttgatttttgttttgttgttctacttgaaaatccaaataggaatatttttataggtttctcagattactaaagatttctcctctattgcttcatattaactgtggaaaaacttattttaatattttgtggatgataatcttctgctgcttcacttggtttggagtagttggatataatagattagctacatactaacataagtttggatatggaggattatgtatgtattcatcataaagaattccatttactctgttatgatccataaatgccattttcaagaaacttgtgtcaagttctattttgaaaggtttaatttgttgctcatatcttggaaaatctgtgttcaattctcatgtgactttgtaaaatttttggtactatatgtggagcctaattttgtttgcacctgaccagt

SEQ ID NO: 8708 - DNA, 1409 bp, Carica papaya
  Intron number 10 from transcript evm.model.supercontig_166 .41 (locus evm.TU.supercontig_166.41) derived from phytozo me v7.0 (chr-ID supercontig_166; pos 344540 to 345948 reve rse strand)
aggttggtgatttctactgatctttaagtggcttttttctaccataaaaaaaatatgccaatgaaatacttttacattgtctgactcgttttcatcttgggttattattgttttggagatctgtgtatttagttacttttaagaaagctactaagtgcttcctcagaaaaaagagctattcaatgagaacaatgagtaatccttgaagaagaggtagcaaaagctagaaaaggtcttcaggttatctcaaagatggatgcttattgtgattaccttctgaagcttgtcacatcaactcacccttgtctaagtcattactcctttcaattttcctgagaattgaggaactgtaggcagatactcgaccatcttattctttcttttagaccccattgattgatgaaaaaatgacagtagtaataagattagcatcttatcaggattgaaccttggatattgaactttttcaggacaaaaagagtcgatacttaagaaacatgatggacaagattttgaaacttttattctaatgattacatgcttccccgagaaaaaaaatcattttcatagtgagctgttatatcacttcagcaattctgccaatgttattcttcaatgatttaaattttagttctattttatctaggtctgttcatttctttctccactcagggtagccatgagtcactaatgaaaccatcttttgttcttgtactttttagcacattttgttgaaacatatctgatttgggcaaagagagcttcaacagaatacttggagaaaattgacaaagaactaaaagatcttatgtctggaaaagaagagtaaatacttgacaaatgggaaggccaattaaatgagactactgtgttttggcagtagggatgtgtagtttgagtgagaaaactaatggtaatctagcgaaccaaatttaaggttttgatactatctgatgtgaggcaaagagaggttgaacatgatacttggaaaaaattagcgaagaaccaaaactagatatatcaaaatgttagtaatcaatcaatatcttaataatgtttgtagaataatcataaaagtgcagataacaactaaattagggtatcctatatagggtttaaaacaccacaaagacaagtaaacaaataaatcaactaaataggaaaggctaattagcaaaaactcaataatagaaaagaaccatgtaaaatcttccttttccttttagtataaaattttccacaagcttcttttcctttttggctctacatcagtttgtttgatatagaccttcttggtggtgccttgagcttttgactattctagttatctttctctgacctattttagctataactattttatcatgcttgtagtttctttcatctcttcatccactgagtggtcactt

SEQ ID NO: 8709 - DNA, 5345 bp, Carica papaya
  Intron number 2 from transcript evm.model.supercontig_29.1 0 (locus evm.TU.supercontig_29.10) derived from phytozome v7.0 (chr-ID supercontig_29; pos 80146 to 85490 reverse st rand)
tccctccaaaaggttcactgctgaagaggttctaggtatgcaataaacaagttgttgataaacttgcaggtaaaactgataaatctgttctaggggctcagaagtcaaacttaaagttagagagtatggttgatatcttatctagttgatcttaggtattggatgtcatatttgcatgatatcaggtactaaaggtggttgatatgtaattaatattagtaaatgaagctaacgatctttggcaagtttctgaatgcagccgtatctgaaaaacagagaagttatgacaggggataagtataaacgaccaaaatatgattaaaatttaaaaatattaaaatgtaatttatccttgtcgctatttaaaataacattacaaaaatattagggtgacataaatcaattaagtggtcataagttaacataaaattttcaaatcaataatatatatatattttcaagaaaattttgccctcttttatagctatctacttctcctttatccatcgcggggcttgatcttcattctccctttcagcctctctctttaggagtggaattataataaattcaaattagcataattttactatacaaagcaaaataataagatcttaaagtgaacttatttcaaaagtaagagatgattatgtaattgtaatgttatgtattattagcttatttaaaaattagtacctaggggtatttattagtctagaaccagactgaaccgaggaccgaataaaagttgtggtctagactgaagaatgaactgttttattttggaatggaccaaaattggactagaaaatatcggtccagtccaacctggaccgaaatggaccgaatttctgttttttaaatctgtgaattaaaaaattaacaaagattgttcttttttgttttttcaaaatttaggtttaaatttttttttttgtactatggtttggactgaaaaccgtgccaaattttgcagtccacctataattggtttgaggagcagaataagaccatccctactaatattataggcttactcggtgtgagtttattattttcaatttattcatgatctataattagttattctctataataggtttttctagttaattaatttatttttcctttttagtagaattcttatattaacttaagaatttctattttgattgtattatgatatctataattataaataaagtaacctaactttgtaattgggaagaccattcgtatgattatgatacaaccattgagttatctttattattgagattcgagatatctcattttggttcttaataaagtttctccaagcattatgtccaagttctgtttgtcctatatagctggaatcaaagaccaactttcatttgtctcgtaatttttatcaacctttccaaccaattgacaaagaaggactaataactttagaggaaaaagaatcctgaaagcataagttaagtctcaacaacaaaacccagtgtttgagaccatatggctgcaagcgttcatttggccaccactaggaggtgggtgttattgccaagcccattagcttcggaagtgtgcaattggcaccaaacaccaaatctcagcatccactgttattggaatcctcctaacttgttagaaaacctgaaaaccgttgttacaattgatagatgacctccttcctgacatcgacaccagatctagaactgaggcctctagtcgaattcctcagtgaaagattgacgtctgatgaccaccaggttagcttgtggttcccacggctcacaactgcacattagtgttttggagttccgaatccttctgttgatcagatcaaactgatttgacctaatcctgtttgaatactctggttaagctacttctagactggttcttgacctttcaaccaattctcaaagtcttttagcatgttctttcaatttttgtgctcagtttggtcaaattcacactcgatactcgtcttttggacatattgattatctggcaagtaaattgatgtcttgtcatgcagtcaaccaaagttatgtaagttaaattgtgcatttaaatccttaaatggcttgatggaagacagaatagatgtaatgctagtaacattatggtgttctttgataaggggcttgaatgatggcaggtggatagttacatgcttatgaaccctccttattcaactagttaacttcttcatcctttcaacaaagttattattgtctattgaaagtgtctatagagccatctaagtcgatttgcaatgtacttattaagagcattggtcgttgatcaactcctcaagcactctaatataagtgtaaaacttgtgaaaaataattgattctgtattgagaattaagatatctgataataattgattttggttgtgaaaagttcattgtcaaaatattcaagaacttcctgaagtttatccaactataatggaaaaatatgctctcatatcttgaagcaattataactactctattacaagaaaatgtttacatattgattgagttgcattattcacttatggagtgttctaagagataattgaaaagtttcagcgattacttatgggttagttcttaaaccatctttgatgtaaacataaaacacgtcaagcattcctctataggattacagtaatgtagtgaactttatatcccatgacctacctctttctatggaacaagatgatgtcattattattgatgattaaacaaggtaactgagaggatcatccttgaccatccaacaaaacgataacaagttaataaatgaggtagcaagaagattatgaaagatgttgtgatttctactgtacaaattgagttacctagtgatggatatattgatcaataatgttgtcgaggtcgaagatgctaatgttttagttgatttgaagaaaaggacccacttgaagatactgcccagaaatttctttggctcttaatggtaataaggaaagtttggctagtttgcattttatggattttatatagttcctaattagtttagtacttcggaatctttgatgttggaagcatttttcccccacaacaatctcatacttcacaggctttacttatttggaagacaagttccaagtttcatattctttctctttaaatattttaaaacttgaggttgagtttcctccagaatagttaggatgagttagaattaaaagattttaaaatagttatatatcaagaataacaaatatttatgtaattgtaatgttgatatattatgaagatatctttagcttattctagaactaatacccatagatttactacaagtgtgagcttattttattcagaaaaagcataaatgtgagtttattattgcctaactaattaggatctcatttatttgttttctattatactttattctagtcaattaacatattttcttatttaatagaattcttagatagacttaagaattcttatttttattatattttggtataaatagggtatcgtaatttagttatttggttaactattacaacatttggttattagtttgattattaagattcaagatcttcaattttatttcttaataaagtttcttctcaagtattgtatccaaatcaataatcaaattggagatcttgataactcaacacttgggaaacttcaaaacactgttagagagattatttgttcatgttgaccagcttataagcttagcaatacaccttcaaattctatctaagcattctactaaaagaaaataaactaattaacaagattaagttatactaaagaataattaaaatatgtccaaactaaataggaaatagtaaactcgcattgagaataagtttatataggtaccggttcttagaaaaagctaaataccttaataatatataagcattaaaattacataaatatcaattagtattgaaatataaccactttaagatgcttttgttctgcatcactctacctcttgcatctattaaatatatgagcataataccaaacacagcaaagcttgtttgttgtgcttttttctagtaatcgtcgcctttaattgatcaaccaaaccatccacctgatatgaaccaacctgctcttcatctcccacattctctcttctcttgatatctttatttcacttctcaaatttatttcccttctcatcaaccatacttcttattttttctctgaaaaatgaaattttaatattttttctcttagtacagcttagtatagtactgagtccttttctatattctattcacgatcttttttaatttgaatttttctatctgaacaatggtaattgggtcattttctatctttataagagaatggagaaagaggaaaagactaggcaattaatttgttgcacttgaatggagcatgattgattctttttaccccagtacttcatatatcaaaaaaagtaagatagaaacagagactgacggccttccaaacacatgttgattggaaaattgaagatcagtctctgtttccttatatataaatatgaagaagataaatagaatttgaatgagggaaaaggatacctaagtaaacactactaaagtattaatgaaatttcaccaccaacggtagtgttaattctgtaaaagtgaaattgtgtctagatcacgtcaatatatttcgaaagtgcagtcatgttaatttttacattaaagccaggtttcattagtaatttttcttaaataaatggtgtttctaaaaaaactgctcaaaaattgatctagacattttttgtttttgggtcattctcttcattctttaaagaagttagggaaccttcttgactctttgattgttttgtaaattttttgtaaatatgcgggcacctccttagtgccagtattaatacataatacacgttttatttttttaaaaaaatgatctaaacatgtgtataaagtatgcttcacgaatataatcgtcaaaccgttgtgtgtgccactctcaccatagagagccacagacttcattattacatgacaataaattggtggctaaaattgccttgttagtgcagtttgaaagttctctaatttgatattataatttgtgattgaaagtagtagatattggtatgaaattaatcagttatctaaaatatctaacacctaccactagggactggtgccactttagcactcttataaagggcagtaccccatgctttcaattcaatcatgtgaattcatgcttcagaagccagagaagatacttctattctgaacctctttttgctcatcatgttgagtactgtcctttgtagctcactcctggctggaggattgctcagaagttgct

SEQ ID NO: 8710 - DNA, 875 bp, Carica papaya
  Intron number 5 from transcript evm.model.supercontig_208. 13 (locus evm.TU.supercontig_208.13) derived from phytozom e v7.0 (chr-ID supercontig_208; pos 327234 to 328108 rever se strand)
ccatccattgaggtacaacttcttttttctttcattattattattattattattattgtaaaaatgtaattttaatttctcaaaatgaattttagtttttaatttgtttttttgggaaaacttatcagctacttcttttataaaagaaaatatatctaaaagaagagagtacctttgagtaataatgtctttggttaaaccctagctaacagacatattaatgaaggtagacttgccaagaatgtttatttaaagctcttagaaaagatacatagttgagtctaaggcaaaaaaaaataaaaataaaaataaaaataaataaaagcctttgaaaagcttgcttgatttagacattctcaagacgaggggtaaaattatcaatcaatctacgaaggaaagttaaagggttaactttgtaatccttttaaaaaaaaacatcagctttatgttaattaatttaaagcttggtaatttcatgataatttataataagattaattaattaagcaaaataatagattgattaatatatatatatatatatgtgtgtgtacataggaagatacatgatattattggagaaaactgtaggagatcactttcaaaagtgtagtagtactacttatactcaaagtaatgtttcttttcttgtgatatatattctcttgttctctgaatcaaatatatatatgtccttcgattattcccacatcaataagattaatcaattaatttttccatcaaaaaaaataattcaaattgatttattgttatttttctttttttcaagaactaatttattgctttgttaattcaaaaaagaatgaattaattatgtttatttcttaatttcattaattttgaatttgagcagg

SEQ ID NO: 8711 - DNA, 5070 bp, Carica papaya
  Intron number 16 from transcript evm.model.supercontig_32. 131 (locus evm.TU.supercontig_32.131) derived from phytozo me v7.0 (chr-ID supercontig_32; pos 1631657 to 1636726 rev erse strand)
gagcagtcaatctctttcttttacttgtatcataggtaattttaacactatgcttgttggttgtcatgtggctttatgatgattactactcaggctactttattttggaatggttcccaaaatatttggtaactttcttcttttattcggaaatctcaataactgttaaatcatttgaattagtgtttttgattagtctacctgctttctcttatactatttcgatctctaacaatacagtgtggaccctcaggtccttgagggtttacaactgtaaatcctattctatttcgaatttccttcagattgtttactaagtcataatttggttctctttctctctctctcttaagaaagcaaacatatctccaaggttaaagaacttttgtttggaccatgatcctaagcagaatttttttcaaagataatgaattaatttaaagaaaggagggaatacaatatgcaggaattagttatcctctatcaaaacggaaaaaaaggggaaagatacaagaaaccaaagaaaatcagttggtaattgcgagtgttcttgtatctttctctatttacctattctaatctaactatgggctcgttaagaagatatgggcttgttaaaaagaaaagtactcaaaactttaataattttcttcatacataaatctgtttgagggacatcaatatggatttattacaagggaagaaggaggtaattactcttgaagttatccaacttatccagaatctaatagccaccatcttgccttgacttattccatcttttactaccaatacatacttacaagatagactggaacacatataattatttactttttggtacataattcttctattgggtacagcttctcttccttttctttctcctttggtacaccttatcaaaaggtgttatcttttcaccgttaccgtccataatgtcactccctataaattgcatttgtcctcaagtgcaaaggatgggtgccagagggcaatctgatcagcatgttcccatgatgactctgctggaaaaggtccttcccagttaataaggacttcatgttgtcccttgtgctcatggaaatccaattgagcttgtggaaaaaggagaggagctccatgctgagtgtgaggaagagaagaagtcacatgttgctggccataaaacttttgagaaatgaaacacgaaaaattgagaaatgaaacacaaaaaactggatatattcattggttggtaaatctagtctgtaagccagttctccaatttgtcggagcactgaaaaaggaccataaaaatggggagctatgagcttcaacagaaccatatcaccaacctgaaaattgacttcgtgatgattagaatcataagattgtttcacatggtgttgagcctatagaatttgggtgcataggttcgttaaaatcttatcaagtgtttggagttcacaatctacagcttgtccttgtgataagctcgaaaagcataaatggagttaggtgttgggaaaccgtagactaccttataaagagtagcgttaaaagaagaatgaaaatcagagtattgtgagcatatcaacctattcaatccactttactcaatatgtaggatggtcacctttaaaacagaggatatacatttttatagtgcatttgaccacctcaggctgctcatttgagtagggtaggtagaactgaaaaaaaatttaatgcctctaatatagaagagttccttccaaaaaaggcttgtaaatatagcatcacgattacattcgatggactctggggatcttgaagatgtggtcaaagaaaaggcaagcgactttaattgctgtattagaatgagataaggaaaccaagtgagtatatcatgataaacaaccaatcaccactaagaaaacatttttaccatgagatgtaggaagaatctccacataatcctcggaatatcagactaaatctgttagggaactggtagcagttgcagaagacctgcaggttgtgagtggtccaccttattacttgacaagtggaacaagagggaacaaagtcatttatgtgagatttcattagtttccaaaggaaggcaactgaaatcctccttaatgtctttcaataaccttcataaagctgattgtgaatggtaggtaataacagatcccaaaaggaaaatttgccctctataaaaaattaagtcgtcatgaacttcctaatgattggttgcgtcctcaaggttcgatttaagagttaattaagtgaattggaattgttgattgcatcaccaatgcaatctaagttatctagatagggaatgaaaattgcatggtagctagattttagttcagatcttctagaaagtgcatcaacaacaatatttcgcgtcccatgcaatattctacaacaaaatcaaagcctaagaacttactagtttgctgttgttgaatggagctcaaaagacaatactttgttaggaataaaagagaagagtagggtaatttaggaatatcgcttaggaaatatgcagagaatatccaagggattatgcagttaatatccaaggaaatatgctggggaatatctaatccagaaaaaaagaaaagagtagggtaatttaggtatattgcttaggaagatgttagagaatatccaaggaaatatgctggaggatattcaatctttgtaccaatgattggcactataaatatgtaaacagatttctgcatgaggcaatgaaaaaagaatttagtgattacttatactctctcattctcttctctccgatctttttctctcttcttcgctctttctagcttttttctaaaccctaatgagccaagagaaatttaagactgtgctgattagtttaatacgaaattgctgtcccaaagatacgataatgatatacttgttacactttgcaaaggtagaagaggatgcactaaacacattctttgtgtatctcatagtttgtgttatttgataattgctcactatttcataaaaatttccttacaagtttgaatgttgagtttatttctaacacaatacataaggcatgtgaaaatagaaagaatctatgaatatcaaaatgtaggcatttgagaaaaattagacatgggaaatggtggatctactcaaaggtaagaaaccggtgtgatttaaatgagtgtttattatcaaatgcaatgggatgagacaatcaacagatatcaaatgcactggtagccaagatgaacattatgcaaattttattgttattaattgctcattttgactgataactacaacaatttgatgtaaaaaatacctctttgcatagtgagttagaagaagaatgtacatgaatatttcactagcatttgatggagaaataagacaaaataagctatataaactaaaggaagttctgtacatactcaagcaatcaccaaaagtatggtttgacaggtttgtaagggtgatgatagatttggaatttaagcagactataggagacgagactctgttcatcaaagctcagagacaagaggagttacaactctcttaatatacgttgatgatgttattgtaatagaagatgctaaagaaaaattgatacttaaatagtgtttggaaagaaaattaaaattaaggaacttaataagttgaagtatttcatggaaattgaagtcgctcattcaaaatttggaatttttatttgtcaacgaagtacattcgtgacatgttgagggacaccggcaagttagcatataaactagttagtactcatgtgattctaataacaaatttgggatagttgaaaaagatatgccaattaaaaagaaatgtattaagattagttagaagattgatatatctatcccacacgagagtatacatctcttatgtaatgagtgttataagttaattcatgcattcctgttgattcgaataacaaatatggaataacagaaaaagacatgccaatcaacaaaaaatgtaataggattaattaaatgtagtaggatttatcgggagattgatatacctatcttacgcaagaatagacatctcttttgcagtgagtgttataagttaattcatggacagtacaaaataactattcctacaagcagcgtacaaaatattgcattatcttaaaaggtcgccttggaaaggaattatgttttgaaagaatgatatattactcctagaagtctatattgatgtaaattatgtaagatcaattgtagacagaaggtccatcatataatactatatcttttttggaggcaatctaatcatctagagaagtaagaaagaaatagttttgagatagtgcagaattagaattctggaaaatagcacaagtggtatgtaaactaatatggataaaaaagattttagaatatcttagaatcaagtgagaaaactctatgcgcctatattgtaacatcaaaacggtcgtaagtatcactcacaatccagtgcaacacgactggaccaaacatagtgagatcgatatatattttatcaaagaaaaacttgaaagcagtctaatatgtaccccatgtatgcctaacaattctcaactaacagataagttaactaaaaattttaagtaatctagtattccaaactcttattagtaagttggggatggacaatatctactcttcagcttgaagggaaatgttaaaaaatggtaaattaggttaaatggaatataagggtaaatttgaatcttttgtaattaattgtaatttattttttatttcctttctagttttaacaaatttatataaagggtcttaatattcaatagaatacacattaaaccattcttaacaagccattatgctttagctaactaaaaccttggtttatgcttactcttgtttgtcatttttacatgttgataaaaacttcatttttttttaactcatcagttgtccattggtaatttctttcaagtaaatgcttctacatggtatgcttgctacaaaacaaataaaaaacctcatgttatttattttgctctttattttcatttcagcatctctgctgggcgggctgtatatcttgtttatt

SEQ ID NO: 8712 - DNA, 1092 bp, Carica papaya
  Intron number 1 from transcript evm.model.supercontig_104. 100 (locus evm.TU.supercontig_104.100) derived from phytoz ome v7.0 (chr-ID supercontig_104; pos 681457 to 682548)
tacaatcctacatctcttatcgagtcatcacgaaggtaaactttttttttttagccaatttggttggtatttctcttgcggttgttgtacggggattagggttttatgcgagagcaatggtgatttgagattataactttggttgtgtagttgttgagtctgggattggtatatatttgcaaaattaagtttgatgttttcgcgcttagaattatggagatggcacagaactgttaattttagctcctgatttttcattttgagaaagatgcgactgtgtggaaataatagaaggagagattgtttattagtcacccaaattcggatgtgcagttgttcatcacccaaatttgtgatttatgtgatctagttgtattgcggtggctagccccttgaacattgatggtcatgtgaatgaatcatcttgactaggtggaagtcctccatgcccaaaaatttagcaagttgggaggacaagttttaatttgacggaattcatgagtagtgtacatgctgttatgtatatcggaaacgaagttagctggacttatttatgctaataacaaacctccggcaattcttagaaggaaaatgcaatgaatatgtaaactggattttgtctatacttaggatgatatgtggatttaaacgtaagtttaaaatggtaatagtcacatatggaagctgttacagaaacgagggctcctgttatgtatcaaagaatcaaagaataaatattgttttgtttgtacccataggcctagtctagcagcaggtgcattttttcttatagtgtttatgggttaaagagaattgaagagtaattcccattattaattggtctaagtaatagccttttaagtgtgttttcttttgtgttttgtcctggtgcatgattgctggaaagtttggcgtttgatggataggtttgtataacctaattgtttttttctcttccactgtgttttagttttactaggttttctgaaaataatggatctgcgaactaagcaatttatgctatatttcatgttcaagaggctgactgttttggcagactaactttcctgaataccaagggccagagaagat

SEQ ID NO: 8713 - DNA, 1355 bp, Carica papaya
  Intron number 4 from transcript evm.model.supercontig_286. 6 (locus evm.TU.supercontig_286.6) derived from phytozome v7.0 (chr-ID supercontig_286; pos 24902 to 26256)
cagattgtaagtgtctctcgctcttttacttttatgtgtgttttctttatcttttcaatttcaaaaaggaattaaacttgttgcatttttactgatttaaacattcaccatatttatggacttcgtcatattgagcacaaaatcatatcgcaaaccttaccctcccaatattgggccactaatgttggtaagacatgcatacaatttactacaccatgaaggtccttttaattgaaaacaaaaaaaaaaagataagataaagatcttaaagtcactttgcagaagcaagcaaatcttttttttttttttttttctcaataataataataataataataatagtaattacactattgttttgaggaagacttactaccttcagctgacaattacgtcaagaaattaggaacttttttttaattttttatttttaaaaaaattattcgaaaatttaatatattgccatgcggtaaaaatttcataaaaatttttaaaaaattaaactccaaaaaattttaaataaaatataaataatgcattctagatttttatacatttaaaggaacttggaattcgatgttttcaaatatttcgtttgaattctttacgatatcaaactttaatattttttactagaattcgatacgtcttaattaaattaagcagaatatttagacgaatttgaaaaaaaaaaaaataatattttgttcaatcgtaccccctaaaaaagaatgataataaaaccatgtaaattatgattgcattactttttctagaaataagtttttaagaatgtactctcactgtccctgtacacaacttaaaaatactataatataagtaattggttgtgttatcttttaattactttaaaacttttgaaataatttgtgacagatttatatatacatacatatacatatatatatatatatatatttatttatgtatgtatgtatgtatgaaggatagaatatttgacctcaaactactaattcttttatatgtatcaaaatttgcaattttattatatcttttacgatttattcatcaattattttatttattaatataactttaaactatctaaaaaaaaaaaaaatcaaaaaaattcttctttctcattctagaacttttgtgctttctttaaaatttgatacaaatgtatttttagaatctagtttgcttgttaagagagtattataaaaaaatatatactaataaaaataatgaaatataccgtcttatattaatttaactttttaaaataactaaccatgtttaaatatttaaatcaagttagtaagaagtgcggttcttgtgtgtttgttttagacttggtattggagctctag

SEQ ID NO: 8714 - DNA, 4694 bp, Carica papaya
  Intron number 5 from transcript evm.model.supercontig_67.5 6 (locus evm.TU.supercontig_67.56) derived from phytozome v7.0 (chr-ID supercontig_67; pos 796808 to 801501)
aaaagttggcatctttgtcaggaattcaattacgggtaaatttgagaaatgtcaaagtcctaatagttaattttactttcctttaagtaggtaaattaattgttttcttcttgagccttctttctttttgtaattcttgtttgcccattttctcttcatgccagtaaattttgttctcaaatttgaacatgcaacatgtagcacatttgacagcaatacttaatattgagctaggggaacaatagtttcttttacagaaacgggaagaagatagaggaaatattactataacacgttaagctatcttccagctagactaaaaagaaaaaacatacaagagaataaaaaaaaccaaagcatcaatacaatatagcagcccaatctctctgaagtgtagaaagactaacatccttaaaggaagcatttacctctgctcaagaagaagctaagcacacaatcccatccaaaaatgttattaacagtatagagcgctggtcgaaagttagtatttctctctgaacacctgcaaaagtacccctgccttccaaattgtgtgatgctctataatcctccccaaatcacctaaaaatataggaaaaccttgaagtttttttttttgggtgggggggggggggggggggtgtgctgcgaggtagagtccctattaatgaatctagttgttggtttccatagaaataaatagatatagtttgactgtttcttgctttttctttctttttttcttttatttcaaaacaaagtttcttgctttttcttccttttacctatcttaaatctaagttgctcataggtagatataaccatctcctgaataagtactcaactcttgatagtttctttcatattcctctcagaaatcatagatgaaaattactataatagagaggatagaagcagtttcttgttttctcagaacataggaactgcctatctttgtccttgttccaaggcttagtcaacttacatgataactgcctagactattcagctgccactacaatatgcacactgcaacagaaaatacttggcaagaaaacacgtggacgttggaccataaaactaagaaaattgaacatgaaataccgaatcctccttccttctttggtacactttggcaaaaggaatgatcttcatatttttaggatccctagcatcactgccctcctccaaattgtgcttgtcctcaagcacaaaatgggatatcttaggaccatatgatctgctattcctatgaagcatgaactgatgaaatgctctcccaatgaagaagaacttcatggtgagcctgacgggtctgcaaatccaactaagcttgtggagtggggagagtaacaccttgatgaatcaatcaagaatggtaaagggtccataaaaacaaggtgttaacttttgaatgcatttggcagtcacagaaatctgccagtagggttttgagttgaggaccaaattactcacattaaaattgacagaatcatagaggtgtttcatccaatctggtgcttggagaggatgggtatgttttcatccaaacctgtagtgccattcttgagatcaaaatccgctgcctccaatctagatagcttagggcaataagaaaaaatatgtggagcaggacgtccatataccatatcgtagggagtacctttgagggaagaatcaaatctagtgttgtaagaattttcaggccaagcaacccaatccatccactctgtaggactcgtgaagtaacataaatacgttttaactgtataattaatgacctcagtttgactatcagtttgagggtaataagctgcactaaaagtatgtgtaggaccaaataggcagaataattctctcgaaatagacttgtaaaggcaacgacagtcagtgataaagtccagcaatcaatgttagttgaagatgtgatcagagaaaggaacagtatgatgaaataagggcataaagtgagcataattagagaaatgatccattacaataagtatgacacttgtaccctggaagttggaagaccttcaataaaactgtcacataccataattactgcatttttgcaagtctatggattgctcaagtaacaaagaatgagtagagtatcattttcatgatgattgtacttgcaactttcctcaaactactacgaaatttttctttatctagattattaatactagatcctgataaattacgttcctacttcaattgagaataagaacaataataaatttgattcgtaaattgagattaaagaaaactttatgatttcagtggctaggggtacttgatgtcacttgcttttatggttatttaatttcacagcatgttaattattctagccttttgatcttgagaatcgtggtagctgattctaatctcattccactcccaggggccagataaaatgggatacttgtcctaagttgttccccttcccagatgctgtacaaactggtcattcaaccatttaaccagtatttgtattttattaattaatgaaatacccattaagttctattcacttaatcagtcccaatgttatattagccttctgactccataattattatttgtgattcctaggttatatatatatatatatatatgttatcaacccgcttgaatctttacaatatataccaaatagattcccttaggagattaaattctcgtgaagtgcaagaaacagaaagatcataaaggtgtaaataaataacgctactgatttttatttcaaaacaaaaataacactaccgattcaattaaaaaagcgtaatagtttcaagctacatcagtttcctttctaagaaaattagttagatatgctttaactaaaatccaaacagaagaaataaaccatggaagttctgcttcaatataaatcataacttaaagataaacaacaaagatttgagaattaaacgaaaattaagaaggaaagaaaaagccgtacttggtgctcaagcctcctctttttcttctcctgagaagttttaagtgtatattaagtagggtaaagacatatgacttgctcatagaaatctttatatttaggaacctcatattcaataaaatacttactttcgatctctacagtttcctttattctaacgaccttctctcaattccttctctcttgcctttaaatgctctccttctagagctacggaatatcctagggagagttttcctgcattcaggtgctgcagaccaataaattctcattggagacccatattttgggtagatctaggactaaactccagctctgttggcactacagccagttttgctcactgcagttcctaggttcgcgaaacatggccttttcttcctcttttccttgctatagatgaaagaaatttggttaaaacgccttggtttgtgcatcttttttgtttttgacttttttcatgctccagagcttcatgacgtggaccgacccaaagtggttaagaaataccaaataagtactcagttaattggaaaactaacaaaaatcacctataaaatataatagtaaaaatactctatcaaaaatcaagagaaattggaccaaacttgatgggaaactggtaagggctatagtaagctaccaggttgaagatgatcaactttattgcattaaaaggtagaggaagaaccaacaaaataacaaacttgttgctccataccctgccaaaagaaatcactagaaaaatcttcaatgttttttggtagcgttcatgcaactgtacagaagaccacaccattatgaataagctcaattaagtcaactcggctaactgcttcagtgtggaagactccttaatttctgcataaatgttcgcaaaataatcaagatatggtgtggaggttgcagcacaaatctcctctagtttcctctgcctagatagggcgttggcaataatgtcttcacaggcaacactatattccacaataaaatcaaatcccaaaagtttactaatccaaagttgttgtagagaagtagtgatatgttttttgagcaaaacctttatgctgtaatggtcagtcttgatttaaactggtgttgccaaagaataaggctgccaacagcggatagcctttacaactttttgttggcagctaagtgtccatgacacgtggctagatcccttctaagtatcccttctaaagccaagggcctgccattttgttataccactgccctgatatccacttttacgcatcaagcgagaattttattatcattgtctgaacattttttttttaaaatatcagttatcacatgtttgctgtgaatataataaaataacaactggaaaatatttccatgaggcgaatggagggttgatcttcccctatattcttttcctggtcgggagtatctcttactctagtgtactctttttgtctcttttctataatatttcttttgttgagaaaaagattatccttgtcttctgtttactgttacctggacttgtgtatttgagttgcgtctccttgatgcttccattttatgctttttcttcaatgaaagtgtgtgctttatgtagatgccaaagaatttgtgttaactaattgtttgtagtctgaagaagtcagtatgttgatccttttgcttgaggaaatgctaaagtacctttctgtctcactcttcttttattttttattttttaaatctagacagg

SEQ ID NO: 8715 - DNA, 5110 bp, Carica papaya
  Intron number 10 from transcript evm.model.supercontig_30. 148 (locus evm.TU.supercontig_30.148) derived from phytozo me v7.0 (chr-ID supercontig_30; pos 1930238 to 1935347 rev erse strand)
ggtttatccaagttcaggtaccttcgtgttcctttaatcgagagtcactttttttctccccctatcccccctccctcctccagcgacgttttcctcttagatgttttcctctttttctatcttaaaaaaaaaaaatttctaaaataatttgttttctgcagtttaaagttgtttgttcatcattgggccatgtttataggctgtagctggcatacatgaactttggatataacgtgaaatcgttaagatgagcatttaggtttacattaaaaaattatgtttgcacttgtgcactcttgttgctcactctattatattatattcagctttagtatactggtatcattgttaaatgggattgatgcataatggattagttttaaattgcataaataaccaagaaattactcatcaattaaatataaaactgctgtcttagctgggagtctattattatagttttagtaattttaaaattttattatcactagtatttagtttccctaattggatttctttttaatgttgttagcacttgtatttcatgtctaattatgaataggatttttaatatttttactcataatatgtcatagtctaattttacttgggaaaggattacttggcactccataaatatttttgtaatatctttgagatcattattcaagtattcaataaaaagttctcaaagtttctcaattttctagttgtatggaacaatcaaactcttaggcagtaattcttaagattttttttatgtaatgtgtaagaaaccctaggtgtaatgtataggtttttgttcccaaatctgtaagtaggcaaattgaccttaatttgtgttacatcggttgatcagagctaaaagaatcttacgttacgaaggattagaagacaacacatcagaaggttttaaagcattgaacattgtctcatttatgtttaggggagtttagggattcaggttaaagagagtttggtttgacaaattcattaaggtaatcaagtgatttgggcttgcctacagattgtggacctttgtgcatggtattttgggcattaattgggtcattgttgggtcggtgaagggtgagatttgggcttgggatggtcttaatgttaaaaataatttacttaatgtgatccctttagcggttttttggcttttatagaaagaaaggaatagtggagcttttgagagtgaagaaaacagtttttctaggctaaaagataggtggattaattattttaggtctatcataggttacgacattatttgtgatgagaattttggaaatatcgttgattcactaattttattgtaaatccaaaactacatggatggtactcccatttttgttggtactttgttaatatacagcttacttttttattttaaaaaaaaaattgtaatcaagaggtttggatataatcaatgccaaagaaattatgctacattttagagcataattcttcaggaaaaatgacaatcatcataaatatagatgatataataattatgggggatgatacaaaggagatactcatactaaaaaaggtcttaattaaagaatttgatgctaaagatctaacaaatctcaaatgcttcttgagaattggaaactagtaggtaaaggaaaggaatctcagtttcttagtgaaaatatatagtggatttttcaaaagaaactggaaagtttgctgccaacacatcacccataaaatcccaacattaaattagaaagtaattgacaataacttctgtagacaaagaaagataccaaaaaactttcagtaggtaaattgatttatctttcacatagcgtaccagatatcaattttgttgttagtataataagttaactcatgaataacctacagaggcattgttttggattttcaaatatcaaaaaatgacaactgtacaagtttaatttttcaagaaaaacaaaaatcaagaaattgaaatatgtattgacgcaaactgaattgattctataattaatagaagatccacctctaaatgttgtacatatgtcaggaaaatctagttacttggagaagcaaaaagcaatatgtgatatcgagtaatattgagtttgggtttagagatatagcacacggtatctatgatggaatatggctacaaaaaatattgtgtgaattgagaattctctcactagagcctatgaaagtgttatgtgataatcaatccataataaatatgacaaagaacctaatttatcatgattgaactaagaatttggagattgatagacactttgttaaagagaagatagagtcaggagcactattattgcgacacattcagtcttgccattaaatcacaaatattttcaccaagttacacctaggaaaactttcaaaaatcgagttacgagcttggtttgctcaacatcgtcaaaccagcttgagggggagggaaggaacccgacttcttgtagaagtctaattcttgtacaaattgacatcttcaaagaaatctccaaataaagcataattatagtcgactttcataaccagaaattcttttctttttatagaactgatttgtatttagttttctactaaaattctctctaatattctcctatctatattcaattgttgtagattaaatattatgaataaaatttaagtaaacagaaaatttagttacaaactttcaaatcattatgtcttcctattgctgaatatctttcctcacgactcaattctatgaaagttccatgcagtaagggatttgacataccaattggtcaaacatttcatcatccgatcaagatttaacactcttaaacaattatgcctttctattatcttcggtattggcgaggacaaccgaacacaaatgttgctaagtttccatggggaagctcgaaggttagtggtttacatcgtttgctctttcaaaacttgtggacgaattttctccaaccaggggagcacgatgcagaatgagctagtactagatctcctaaataaattaaaaattataattatattacatgtaaaacatccatactatttaggaatctattattatttatttaggaggataattaagatgttattcttattactttatttgtattaggtttagtatttccaatatgattaatattagttgtttattcttattagaattcttatttctactaggcttactatttcctagtctaattttagttaaaaaaattattattaatatttttgtaattttacttattatttattcagttattcaataatatttttcagggtttttcaattttctttttgtgtgatacaatcaaactcttaaatgtgatgcttaacaatcttatatgtgatgtcttagaaatcttaagtatgatgtatagtgtctttttatccttaaatctctaattggacaaatcaatcctatttgtcctacatccaaaagtctacaggactagaatagggatacttttttagtattcaagggaacataacacttaacctccctcctttctttctcaagctcattttgactcaatatgaggatcattcgtgatggtaacatgggaaacaacctcaagcttagattcttgctccttagtataatgaaaaggtttaacagctatcaatttcccttatatttaaatgtttagttcatcctttcatgaaggtcataaaatcaagggtgacaaaaacaaaatgattattttccatataagatgaatgggggataaaattcgaaatctgttgggcctcttggaactgattcgcctatcatcccagcctaatatcgaagtttggttttcaaatccttgggtttatacacttgtaagtctctctttgaccacctcactaaaaaccttacctttagccaattccatattgctgacgttctttagaaagctctaattcccttgaaagtaaagatgttaaaatggataaccgcatttcaaaaggctttacaccaataagatgctacaagtttgtcgttctaactgcactctgtctccaaatatctgtgtgatgttctatagaggaggagagacattcatacggaggcagcttgaaaagagaacaaaattatttaacatgtttagtttcaactgagttacccctctaacaacagagagctttttatcctcatacatttgaaggaagagggtgagaaagggagtgagacctctgttgcgagctcaaggttatggagcttatggcttgacaaaattttaagatttcaaataactgctataccttcttctatgaggtgtgggaaagagtaacttcttttgcaactttatgggccaaggcccacagaactactcagacatcatgatgtccgatctccaagcgaattggaagaccattattcttggcccttaagacgcatcatttttgttgtttagattactcttttgcttgtacggttgcttttcgtttgacttctttaagaggatgtcttattctccatatttgcaattgtttttctctctgtgctcaataagatttcttcttctgtcaaaagaaaaaaagtttaagcaagaaggcacgtttttgttgtttggataactcttttgcatgtatggttgcttttagtttgactccttgaggaggatatcttattcttcgtatttgtatttctctttctctctatgctcaataaaatttcttcttctatgaaaagagaaaaaaaagattaagcaaagaaagcacattaatgatttttagattattgagcataatgtcaatattatatcatccctgcagatgggaatatctattccctgatacaatatgcaaatttcgtgcaaatttacaaacctatatgaagctttaactgttttgtaatcttttcctcttcggctctatttaaaagccttgtcaaaagtaccagttgacatttttaacatttctatgtttgctgaatgcataaggtttgcattgtgaatttcaagtaataatttgtttggtgctttgatcttgtaagttaatagtggtttatatggtgctcatctcattgatagttgattctatgctatgttttctttgaatcaattgtttacaagctttatcttcagattgaatctgggcaaaatccaggcatacttttcaa

SEQ ID NO: 8716 - DNA, 4729 bp, Carica papaya
  Intron number 1 from transcript evm.model.supercontig_195. 1 (locus evm.TU.supercontig_195.1) derived from phytozome v7.0 (chr-ID supercontig_195; pos 1108 to 5836)
tctccactaatcttgccactgcggagcggtctcatcttatctacttttttttattttcctttttataaatttagatgatctttcagcgatttcctaatcaaattaatggctaaagaatcacttatttgaaaaatttttgttgcatatttcatctagactttacactcgtgtttcactctgcacaaaattcaaatctttctgtattttggaacctgaatttccgctttagtgtctctacgtgataattctgtgtttttctttatgaagtcttttggcatggaaactgttatgaattacgtgctctctgtttgcactttttttgtcctctgtttttcttgagtaataactgatttctttcacaattgaatacatctgtaagtagagaaattgaaatctgcttgagctttttattgttacctaattagggatggcagtggggcacgcacaatcctctcaaagctgcctcatatccggaactataaaaaaaccttctcccatctgtacctcacgggtaaaatttataggccaccacctggccggctcgaaaaacttctaccgacacagaaactgcattgtagtcccatttatccgtcccgtcagttgggaggaagcacataaccaagagttcgccactccattttcgtccctattccctttaaaataactaaactgccactaacatccgactgattgcatgttttcctcccagtttctcccagtcgattagacatcagctatgacatctgtgtttccctaagattcttgtgctaatgtaaattgagaaaattgcaaggtcatagaagaactccaaacagctttgtctggtctggaatcttcccattgtattagttcgataactttttgaacttaaaccattagtcctgagaaattatagttcaagttattgatagcgtgtgtgttgacccctgagaaattatagttcaagttattgatagcgtgtgtgttgaccccttatgaagaacaacaattacatatttttctaatgtgaaattagggtaccctaataaatatcatagtcacaaatcataatctaaaagcacacgaggtctatggtctgcattaatatgaagttatgaagttgacacgtgctttatacttataccccaaacacagacatatttaactcagcaactttaacccagactactgcacctcaaaaactcaaattccaaattattaattgtctatgacttgatctctcatatagctagtaatcacatatcttccgatgtgagattaagtactacaattatccttctttcaagaattctatactcttacaggatcagtgtccttgacttctcatttcttcaatttctgtattaattgctggattgattatcttctgcctatgactgttggattaagtctattaaccaagtatatactaggaacactatcctagtttttgggacccatcacgatatgcgagataaggcatctgcagctatgttctcttttcgctgctcatttgttatttaatactggaactataagtttggtaagccacttttatggcctagaatgatgaccaacaggcacttaaggctgtaaagatttatatggattttaaagtgtctatcctgcaggtgatggtttcacttcgctgaatttaccatgaccataagtttttttgtgcactgatgttgtggttgcactagtattgctcctaaacctagttgttagcatgagtttccttagtagaagtttgggagtattctgacaattcttacatggggatccatcaactatccgaacattgtaatttttcttgcaagggctgtttttgcgaaacaatttgacatctctcgtcattatgatcaaatgctcttgattcaactatccatgtgcaagggagccttttattagcataaagagtagttgaattattgtatttttgggttaatattccagttccagaagaagaagcaggaggctgatggagggagttatgattgaagagtttctgtattacctataactgtttttactaaaaggactattccaaagaaagttactgttttgtcctctgaggtggtgacaacatgaacctggttttctttgtcgctatgtgagcattgaaggcttccaatcagtgtgttaccatatacttttcagcagttttcactcaggtatcctggtttttggcaatggtcacaccaaggacgcctccctttttttggttttcattgaagtggtttgatagatgtacttggatcaccagggctgatccctctagagtaggagggggactttgagttcccataattacctttttcctgctatattcatgacgagcttcaaagaaggcttctctaaggcttcgaagaggcttggttcccatcagtcttcctcgaacttcatccaacttcctgctaatgccaagcagaaacttaaacattctcttttgtcccactatctttttgtacatatttgtgtcttctggacacttccaagagtatgctttgaacatgtcaaggtgttgtcaatgtcaggtaagagtattgaagtattaacatataggttccttggtgcaggtcgtgtagtatggcttcagtctcaaatagttcttatgtattttcgtagctggagtatatctttctggctgcggcccatatctcctttgttgtcccgaagaggagaaagttttttcatatttcattgtttgtggaattgattaaccatgacataaccatgtggttttaggtcttccataccgtgaacttgggacggttcttttcagatgtggcagtttcacccgtgaagtaatcatccttacctttcatacaggtgtacatcgtcactgtcggagaccacaggaagtagttgtggctattaagtttgtgacttgtgataaggatagatggtctcttctgatcctccatgattactcgcagctgttcctacttctggattggaggttaccttggacgacgagacgttcatgccgtacttggtcatggagggtttttgggctttcagagatgacggtttctagaggtgccaagtctgataccatattattttctggacattttctcaaaattatttttattccttgaagaagaaaattacataaacatattgagagaagactacacctagagaccccaattttccagtataaactagaaagtccagaatagaattcaactctattgttgaattcaactgtaatactgtaacttccttactgttgaattcaactctttttaaatctataagcaaaaaaccatagcagtatacttttctaatacaaaattccacaaaatttttcagaaaaataaactttaaatggataagaaaagtaaggtggaaaattaaaacttttttttgagagaaaaggatgagaatgtataaatgcaatggtaccaaggggccaccacccatgtacagcagagaatttacagatttgtgagaatatctagaatgacaccaaaatcatcaaaactatcaagattgtgttctaaaactataaaagcaaaatattgtaaccatctgtccttgatagtatcaaaatcgatctctttgttttcaaagcatcaattgtttctttccttccaaatattccaaaaatagttaaaggtatgagtttgtggtgtttgtttctacatcggaatccttcccaagcagatagctcgtcaatagcagaaccggacattttccagtgtatgccctggagataaaaaaatcatagaccagagtttgtgtgaaacagaacaccaaagtaacaagtgatttcaagattccaagctagccttgcataaataacatcttttggcttaaaccaccccacatttcatgaggttgtccaaagtcaatatgtgccccattgcagcctcccacacagaaaaggatactttaggtggagtgggagattcccaaatcagcttgtaggggaacacgagctcggcagaaccttgtaggtagatgaaaaaggatttgacagagaactcatttcttttacccagatttccaaatcagcatgcaaggtagaaaatttatgaaagaaatgaaattaaaaaagaaatgttgaatgcacaggcactagggaaattagggaagggcagatagccggaaggggcatgcatttgagatgattggttgcagggctggaaggggggatgttgtcatcaaacttccatgctgagttttcttttcatgttggtttgaaaattacatataattagagaacaaaaaatttcatgaaagccttttgatttttaatcaaactaaacatgttttttcttttattttggttcaaaaaagggaaaagtttggtagaacacagaatattttctcaagctaaataagccctttgtgcttgtggctccttttgttcctctgtctctttcttggaaatacttctctatctgtatgtctctgtctttcctcttatctgcttggctgtgaaagtatgcattattttcgtgtgtaacttcgtaactataatgaaaataaacagagaaatgcagttgaatgtccaatttcttcttatagcaaggggttagctacctgagttcctgagaagcaagtttactttcgttatgttccttaatagtttgttctacttttaaggattcattttctccttgcaacttaaacagggtgtaataattgaagggttttaagctttttgatcaatgtttattttatttattcatttctaaaagtggcactatcttttgtaggctagtcagagctgctc

SEQ ID NO: 8717 - DNA, 1517 bp, Carica papaya
  Intron number 2 from transcript evm.model.supercontig_3.23 2 (locus evm.TU.supercontig_3.232) derived from phytozome v7.0 (chr-ID supercontig_3; pos 1652985 to 1654501)
ccaagactccttcaagagaatctttgtcccgaaaagtgagagactttaaccttgaaattctgaatctatatgttattttcagtttgataatgttagacttgtttgattatgttggatatggacgttatatgattgtaacttaatgaaaatatctcttttatggatttgcaattaagtggtactgatgaggctggattttgtaccatttctattttagtgttgcatgatacaagttgatctgtaattagtagtattctccaagaaaacaacatccaagtcaattcatgttaggcaatcaagtttctaggcaatgttgggagtcaaggacttttggcatgcagacaaggcattttataccaattctcagacagcataaatgaattacaatggaaaatgggatataaacatgtaatctttacttgaaaaatgaacataggttttactagttctgatgataaaattatagtttacatattagagggttattctattaaaagaatgatggctgcagataggcctgcctctggtccaatcatttatctgattctgcatgttctatgaatatatggggattaatgtgtgttgaaattagagttgctatgttttccttgcaccatatagccacgaggcttcactacctcaattgtcctgtaggtacaactaaattttaaatcactcacttggtatccatcctggcaaagttgctgcaattcatcactccgagttgctgaattgttattgagcttgcaaatcctcattgtagcaacacttgatagcaattatctctatatatttttccaattttaagctgttcattaagttagtgttaatagatgttgatgataagaagatttgcttgcaatgttattatttggtttgacttttaaaaggtcttcatgacactgatttagcaaattttcttttctgatgagttcttccttttcggtttacaacttaggatgcttaatatacttagaaattattatatgaaaatagatgtacatgttagtcttggtcgtttaagcatgatgaaatttcggctcatgctttagaagcatgattgaattcggcatttttggttctatggtcaagtgccaaatagaaagctcttaatgcttaagtaaacacttagtagtatctttagatatggtttttgggtggtttaagtcttcttgtaaccaataaaataatattggtttactgtgttgcaaagttgcacgaggacctctatgttaatgcatattattattatttaaacaattggttcctgtatagtgggattctcaaattggggagaaagcccatggctaccaaagaattcagttatggtattttctttaatcttttgtaatttcctcttacctgtgaattagagaattcattatgataactattctgtttcataaattctatcctggttttctttgatttttgcatttttcctaatccatgagttcttctattgatggagtatatcccagaacagctgattatgctctcttgtaccttgaaggtta

SEQ ID NO: 8718 - DNA, 1852 bp, Carica papaya
  Intron number 4 from transcript evm.model.supercontig_2.18 5 (locus evm.TU.supercontig_2.185) derived from phytozome v7.0 (chr-ID supercontig_2; pos 2547048 to 2548899 reverse strand)
cacgtggattaattactgggtttcaatttttacaggtaaaactttattctgcaatttttctttgtgagaatacatatatggtattgtttgcttcattttccattaactactggctaatctctaattctaattagaatatgatttattgtctttgagttatctccccctatcttgaatttcttgaattaaggtaactcaaattcaaacgatcatgaatattaaactaataaaaaaatcagaagtaggaatttcaaaggtgaaccttgggcatgagagaatgttattggggcttccatgtccagatagaagatcacctcaatcattccctgtctatttttgggtcatatgaaggcagagaaatcagaaagcttttgggaattcttcctcctctcttgctagcattagggatcattggttgaggactctttatatttttgttgaaggtcaccttattcaaattggggttgatattctggatattttaatcctcttctatccttgagatgcgtagattctgtatatttggtgttggatggcaaccacttgattctgttcaatggtttaattttccctaaaaaattaagaattggaaattagctagaaattgaatgcaaaatgaatcagactagttgggtggctaggagaattagtatatttgttaacagaaaagacaggaaatatgtgacatttaaccactcaataatgtatacaaagcaaaaatgcaccatggaaatcttttatcttggcacttactgttgtagaccgttgatattgttgtggtcagtgcagaaacttaagttttcacatttacacatcaaaaagcaaaatttgtggctaagaatggcagaaggaaaagccatgttggtgacttctaacttttgtccaagccttcatgttggaaatgaggctatttacttcccaaagtaattgaaactcactagttctacatccttttttgaacttgtaagtgctaatcaaacctgctgttgatacaatttaatttggtaaatgagttctaatgtatcttagtgctggaatacgttaaaatattgagggtattcttgcaaaaaagaaaagtaaaaaaaaaggctataaatcgtaccagcacaaagccaaaaataaaaagtttgtctacttaacttttttaatcttgacttaaatatacgtaatcttaagtaatttagaaactaagcaaactctagcttattatttttgctctatatcaattttaagcctggttgaccaaagagaaactcaatttgaacactctcttaactcgtgtgcattgagtttacaaacactcaagcccatgcagagcagcttggcaatggaaaatacatgtttccttggtagataagattttgaaaagattaagggaagctgaaccatatagaaatttggcatcatatcttgcatctacttcttttagcttatggaatattgtagggttgagtagatggaacattgtagttttagttcatcaaaggataccctaggtttaggaggtatgtaagttgtgaaaaaataccactcagacgaattcttgttttacttgtgtaaagactatatctaacactgtttctctccaagaatgcacatttcaccaatgacatcttctcatgattatttacttttatgattctactccttacgctacatcagtaactgaaggaattaatgagttgctttaagaaaaggcgattctgagttgtgttgtgtaaaagcaacaatgatggttatgcagttggtgttgttttgaaactgtataatgctggtgtctgcatttagatttgctttagctttttttttgttgtacatatatgcaggcttactatcctgaacgcctagcaaa

SEQ ID NO: 8719 - DNA, 702 bp, Carica papaya
  Intron number 5 from transcript evm.model.supercontig_152. 17 (locus evm.TU.supercontig_152.17) derived from phytozom e v7.0 (chr-ID supercontig_152; pos 103562 to 104263)
taaaatccactggttagcattcactttatcatcttggagaatagttccagatttatttttatccataaatcaaacacttgttataaatggtgttggtccgtgccatgtcggtcctctttcctctttatttgcatcacaacgttattctatctctctatatgccaacctcaagggttgttgactgtctatctgagtgttttcaaaacatggacattttcaaaatgtgagtccaaatgactcaaaatttcttaaagtcatccaattgtgatggagttgagtgcctgtgactatttgcgttagtacatctacaaagatgtttagaaaattaaaacagcaagggaataattggatcaatggtgactctggtaaacttttgtggagcgattcagggtaacattgtgagggctatggcatggccatagatcacaggctcatggatcatatgctgcatttagtaggatttagatgttacatgaagaagctgttatcaagttgcttttttgctcaggtatatcttactatgaaaatcatatatcagcagatctagagatgtgcagaatggttgaatttgtatgaattaccacatataaagtggcaatcctttatgtctcatggcagaaatagacagcaattcagggtagacagtacatgaatataaacctgaatatctgaatttatctttttcagtaagagtgccactgg

SEQ ID NO: 8720 - DNA, 1229 bp, Carica papaya
  Intron number 5 from transcript evm.model.supercontig_50.7 3 (locus evm.TU.supercontig_50.73) derived from phytozome v7.0 (chr-ID supercontig_50; pos 765457 to 766685)
cagaagagggtaacttctctttttttctttccttatcctttggtctctcttcttcttcttcttcttcttattattattattagggtttgtgttaagcatacaagttcatatgacatgatttgttttagaggaaaatcaaatttaggcagcctttcataaactacactacaatattaactaaataaatgttaaatttgttgaaaataataatttgtaaattaaaaaaaaaaaaaaattacgttactaagaaattagaattaattacgattaatgaaaacttaaaagtctttttattagtttctcgttgtcctttctttcattttcagcaaagtattatttagagttaatctatattttaaaatttttccgacatttttacgatatgatcttatttttaaaggaaaatcaaatttagattagcctttcataaactacactacaatactaactgaagaaatgttgaagtccaacattagaaaagtgcagtatgacactttgtttagtgcacaaagtactcatgcactgaacaagcaacaagaatcgcgaaccccgcgatcgaatgagtcaaaatttggagatcgtgtcagtgtttcggaactactttggaattgtagtaggatcctgcagtctttcagtggtttcagaactgcatttgagctctgagggccattcttgagtccccaaagcaagacacagttgtagtgggtaggtagctagaggtgagcaaagttagtaagaagttgagacattagagaagatgaatcagtaataaactgttgaaaataataatttgttaattaagtagactcttcatctgatttgattaaggagttaaaaaatgataatctacaaattaatcagatttttttttttatcttacaaaaagttaaagattacagatgtgtttttttagtttttcttagaagctcatagttcataaattggagttaattacaattcatgtttctataattttaaaagttatgttagtgtttatatatagtataatatatttgaaggttttctgtgacaatcactgatgaaaactagtatttatattagtctctcagttcttccttcctctatgtttccaataaagtattacctagagtttgactattttctaaaaattttccaaacataaatactagtgttgggggagagcagttgtagtttaattctgggtaatgtaatatcaacttccattttgcaggagatagagctgcaga

SEQ ID NO: 8721 - DNA, 1113 bp, Carica papaya
  Intron number 3 from transcript evm.model.supercontig_1.18 2 (locus evm.TU.supercontig_1.182) derived from phytozome v7.0 (chr-ID supercontig_1; pos 2816215 to 2817327)
aagtaagttcaaactccttaattagttttaataatttatattactaatcaacatttaactattttatgttctttctctaaatttcataataattttactcttattattctcggtctaaaaattgtgttttgttgtatttatttatatatgtcagttaaacacaagctaggacatagatttttatttgactaaatttattatttattttaattttattttatttatttatttctatcagaatttaaccgagtgttgattttttattctttattttatattctctgagataattttacttatttacacaaaaaaaaaaaaaaagactagttgaaaattggttagtgttttataatatacgaatgcatttttttcattcctctctataatatatattgatataactcttttgttaagtttctcaacaaaatattattaattaatgaatatttttgaatttttattaaaccttaataattaattttataatggttttctgtgtgtgtgtgtgtggagtactgtgaacaatgattgtacgggtgcatttattgatttaagctgtttgggttaattggttagatgggtgtgtatgtgaatggtgagttgtttgatgtggaaaaattagcagcacacgtatggatgtttcttttcggtgaataagataatgatttgcgtttttactatttgtaacaataaaaattccatgaggaaaaaaaaaaaaaaaaaaaaaaaagatggatatcaccgatttttgagatgatgatggaacgtggtgggtatgagtttaggaatatatgacatacacgcaagtgactcaaagatttcttgtcttttaggagccaattcagtcagcctcaaaatcttggatagtagcgtcacacaatctctgcatttgcagctttttaggctaacctacaaattcccttttacactccacaatagcaacccaccatgtgacatgtttctagaccgataaacccgactgaacccaacattatccggtctggtcctgtcccatatgatccgaaccagttacaatactaataataatgtttaataggttacatgattattgacgcaggtttcttgacaaagcagcaatagtgactgaggaag

SEQ ID NO: 8722 - DNA, 1058 bp, Carica papaya
  Intron number 3 from transcript evm.model.supercontig_36.2 01 (locus evm.TU.supercontig_36.201) derived from phytozom e v7.0 (chr-ID supercontig_36; pos 1596325 to 1597382 reve rse strand)
aagcaaaatttcagagggatttcctagaccacttggtatttaatcacttttgcttgacgtttgacagtgtgtttcattttttccctttatgcatattttgttagaccttccatcttgaacaggcattcacatcatcacttcagtctgatctaatgaagcatgatatttactaagattatatttgaaatagatctagaaagttagtgaaaatcatccttaaaatgaaaaacttgacctcatatagaattccataaaatcagaacattacattttgattgaatttataatgcattattctagtctcatacggaagtacctacaaaatcaattttttggggttatcctaatacattttgtatcatttcctaagtgactatgttggatttgcaaataagtttctctaaattttttatttatttcaggcatagcctaatcaaattattagctgcctgaaaaagtgaaaataagttagacatgggtgaatttaagtagatttttagtttaccctgtgcatatggatgcatgcacacttgcaaattttttagttatgataaacacagatggaacaacttgcgaacaactagttgaagccaatggaagatactaatagatgtttccaataggtttacatcgggaacatatacttgtttatacatagtgattattcctttatccatcacccagtaaactaaaacagataatgttataactcaatgaaatattggataaacgaggatcccacattaaatttatgatatcaggacaactcagccaatcgcaacaatatagtccttgctcaatgtttcctgcaaagcaattaaaggccttaaacataaatttagaattaaaacaaaagtgatttgaccaattgaaaaatttgcagattttatttgaagtggcttttcttcatttatttaccatcatttcagatgttaaagactcgtatgtattcatttggctgttgttaatattctccataattaaacagttgcagttgcatcattttcattaaggcaatgaactgtagttcttatcctgcatctatttgatgacagcaa

SEQ ID NO: 8723 - DNA, 2723 bp, Carica papaya
  Intron number 3 from transcript evm.model.supercontig_349. 2 (locus evm.TU.supercontig_349.2) derived from phytozome v7.0 (chr-ID supercontig_349; pos 26663 to 29385)
aggtctggctatttatatttcagctcactgcagatgaattggctaaatgctcaactaagggcctaatatttgcagaaatgtggaatcgatggtccaactttttattatatccaatcaatggtttaacttactcattgtgttcaattaaggacttacatacttgcacatttaacactgtttatattttatcaaggtggcatgccatggtacgaaaaattatcaattaccatgatttgtgtacatgctatgcgaatcctaattgatgcattacttaattttgtatatttttattttttaaaagctaaaggaatgatgacttagctagggctgacatgttaattttatttgatgtaacatgccatgtgttggaaatattaatggtgtttagtgtttagtttctacatgcccttagttgaatgcagttgaatcatcagaccttattttatggaataagacgttggaccgttaattccatgtttgtgcaaatgcttggcccttagcatatttaaccaaaagtttttagatctttgttgctttacatttcatttagcatcttaaatgtagcttctaaagcctattccttattttctagtatagcttcactgattttatcattatgaggattgtggtacatctcttaaaaaggtctgctctgaagtctgcacagcaaataacttctgctctagcaaaatctgatatgaattggcagagattttgctagatggagacggaatgttgctaaatcctattcatttgtgtagtcgtcgaggaagaatatgattccctgcagaaaaattataaactataatcctaagttgaataaaagcaagatgttcaattggaaacaaatacaagaatgttgaggaagaatatgattccatgcagaaaagttataaactataatcctaagttgaacaaaagcaagatgttcagttgaaaacaaatacaaaatttaggctgtttgatacataaaaatcttttatagctttcattttctaaatccattgtgtttatacttgtttattcataaaaatatgtaagagtagtattttgtataataatcaaggtatgaaggtaatagtctttttagaaaacaataaaccctttaacgttttctatcattcattctctttgttgttaactaacttatatggttttgtgaatggaacacataaatttacaaaataaaaactacaaaacattttcgtgtaccaaatggaacctaaggtgttctaggttggtacatcccaaaactaatttgcagcttaaaatgcatttttgagttggtaaaccggagcttgattgacagataatcacttgaatccatatgggaaccatctttcatcattatggtacttcattattattagtaaaaattctattagttaattaagaggaagacataattggaaatttgactgataagtcttttctatttgttataacttgtaaccttcttatttggattgaattgtaagtttgaatgacaagtcctttagtttagtccccttttcatcttggtgaaggatttgacttgttcattgaaaacttgggttcatggaaaaatacttattatggaaattgtcagcaaattttcaaagctcacaaggtctgatgtaaatgcagcaaacttggtaaagaagtttgatttatggaagaaggaaatgattattgcattgaaagtgagaatttggagtaatgactgaacataatgctcttggatgaattatttcaaaaaaaaaaaaaaacaatgctcttggacaaaagtctagtggttcaggtctcatgaatgagctatggaagctgatacaggagattatttgaacactccaataatgattggatagctgatatgataatcattaatgactaacatgtttttggttgaataaagtgaaagagtaagagggaattgtaaagactcgtccaaagaaattggtacaaagtttcttcttgtttctctatacttcattacttggaaaagttggtccttaagttttattcttttttcatcaagaaaggtctcacattctttatcttcctttttcattctgaggaagaatggtaatggatgttgaaaggtcaagaaagacagaatcattccataaaatttcatttgtgatttgtgaaatttctagaatctcataatatttctgatgtctataacacaacctaaatcttttccttcttgggtagcaattgttacttgatttgttagcaatttgcaattgcattcatcctgtgtttttatcttcttttgaaatttcctgtcattctgtcctctacatccctgtcctcacctcttccgtcctttgaactgtgagctgaagagatgtgaagattcatcagtgtgtctattactctccagtgtaggctgtgacaacataaggttcatattgaaatgcattattatcatgtaaatatgttgcacataatgagtatttttcaggtggtctgtgctgttaaatgcaagtgcagttatgtgcctgcaaaacttactgctttttgagcagttaatatggctctaactttaagcacattgagttctgctactgttttaagttttaattgcatttgagagaatctgcttttgactttttgttgttgttgctagtggagtcgttttttgaagtacgttctttttctggatcattagtgcctacaattttttgttgtcattccttttagggtcgttttgaaatactttctttatctggatcatt

SEQ ID NO: 8724 - DNA, 13165 bp, Carica papaya
  Intron number 4 from transcript evm.model.supercontig_176. 31 (locus evm.TU.supercontig_176.31) derived from phytozom e v7.0 (chr-ID supercontig_176; pos 381477 to 394641)
gctttgtccatacattcttccagttcatccaggttcttagttacttgttgctcatctttatcttatcgatcttgttgactatctaccattaaagtcagaatttactgccattagatctgaatatactgccataaaatttatgaaatatctagttttggtatacctttttgttaagatgtaaattccttgatcatgtgcctttatttttcttaccatatatagttgtttcgatgtatgggtaaatagtatatatatgcacaaataatcatatgaacatcaagaaaacatcttcttctcctctggtttcactatcaatttcataatggtaccaaaactaaacccatgactggcccgttcttaataacagaccccttctaaaatccaactgcttccttggtagcttcctcgggccttgggctttttcttgaactcggttaagactttgctcgactttctttctcccttaggtgcgcaagtagtaggactcatcgtaggtctgttatcaatgcagtggagcttaaagagcacaaaggtgtgtgcggacacagagagagaaaaaaaagatggcagaacacagatctggcgagggaatgttggccattggtgctagcaatgttgggataatgggagaaaatttggcactacaaatctgcccagtaaggctagatggaaccaattaccttgcttggtcacagtcttgctgactattcatccaagcctagggattgcaaagacatgttacaggaaataaaacccaaccagcggatgctgaccctgtgctcgatcgtgtgaaatcagacaactcacttgtgatgttttggcttattaacccaatgcagccacaaatttcttgtgggtagttgctccttgatactgcccacaaaatttggagctttgaatcccagacatactcctaggttggtgacaatgcacaaatatatgagttgcgaaatcaagtatgtgcaaccagacaaagtaagatgggtatagatcaatattttgctgaactaagtggtttatggaaagaattagactattattaagactttcaagcagcatacccagtggttgtgtccaaatttcataaattagttgagaatgaatgagtttatgattttcttctggccttaacatagattatgaccaattcaggttcaggttcttggtcaaatccattatcatcactatgataggcctactcttatgttcaacaggcggagagtcatagaagctccatgatcggtccaactagtatagttagggcaagggtagttgctagcatcaactgtggacaaccaaagaccagtaactaaggaatgtctgataaagataaccttacttgtgattattgtgcaaatggcaacataccagagagggttgttggaagctaaatcacaagccaaacagaggtaatggaggtaagaaaaataatgccatacaaccacaagccaacttatttgagactattgaagcaccaactcaagagaactctctcatattaggagtttttccaatgaagaggtacaattcttgaaacagttcataccaacttgaatcttactctttgccagcagcctccaaactttgtcaagtcaggtatgtcattttttgccaatctaaaaataaaaatgatatgtggagcatagattttgaagtttttctgaccatatgataggctcttcagataattgtgaaaattataaatcatgttgaggtgatgataaagtctgtattgcagactgtctttgtcatcaatcagtaaaggttttattgctcgtacagcttcccttaagatgatataaaagctctataggtagatgatagagaattatatgagacagttagataaaggatgtttaggaacatccagatcaatactagtagaatctgggttaaggggatcatgaatagcattgaactcgctaggtgtctctttacgaattgaattcaatatttgcgtttgctaggaaactatgctcaatagtattgtgtttgtgaaacgttacaacattcctatctagttagccacaataaatattctttggattgtcatccttctcatttgggatggaagtaggtattaggaaagaatctcgttgaggaaggagaattacctactattcttccctaattttcccctgaagagataacgaaagggagaaaaatatggttggaattcctagaaggttacatgcataataataaagtatgtcttagtgggagggtgatgacatttattatctttctgcttagcagaatacccaagaaaaacacatttgagaacttgggttctaatttttctaggattttttggatgtataaactgtggaagcatgaatgttatttttattattgagtattagggccttttatattcatattcttgagaacaataaaagaaaacatatatgcaggtattttattaatataccttttatactaatttatgaacttcctagtgctcctcctcaagttggtatatagatattcttccttccccaacttaacaacatttgtctgaaattctggattacttaatcttttagtcaacacattcgcaagttgtgaggtggtgggcatatacagtgtacatatcgaactttatccagtttttttaaaggaaatgcctattatgttcaatatgcttgatctgattatattgtattggattgtagacaataccgattgcagatttattattatagtagagtctcatatgaccatcctatttaatttttaggtattctagaatcatttttaattataatagttcacatattcattgagttattagctggaattctggctctgcaccagaccttactaccacattttgctttttacttctacacatgactagtttcctctaaggaaagtataataatcagtagtggaacttttgtgccctacatatcctacataatttgtaacagtatatgcttcaagaagtaacttgttgttctttataataaacatgatacctttttctggtgtctccttcaagtagtttagcacccaatatgcagcctgtaatatttgggttgtgtgtgaatagactatcacaatcactacatttgtaatatttgatcttgtgtatgacaagtatattactttgtgcactagtctttggtgtatcttgttgattttggtgtcttattttgtcaatcccaatttatggttgggatcaataagagtgttagtagatttacacgctagcttacttgtttccttcaaaagattattgatatacttctgacaatattccagcttttggttgagccacttctataccaaagaaatattttcatttccctaattttttaatctcaaaccttttggctatacattattttgagcattgatctcttattgtcatcattgcctatcaaatatatataatcaacatataccaggagagttgtaattccctgagtttcagtgcttgatacaaaagatgtatctctttgattttgcttgtactccattgctagtattactcttgcaatcctttcaagccatgctcaagaggattgcttggcctataagtgcttgtttagtctacatactttatctgctcctatttctttgataaatcccgagggaatttcttcatcgattttttcttcaagatccccatgcagaaagatattctttatatgaaattgttgtaattgtcaattaaagttcgtaatcaaggataataggacacgcaatgcattcatttttgcaataggtgcgaaggtctcctgttagtctatttcataagtttcggtatatgctttagccactaatctttcttatatctctctataattccatcaactttgtacgtatagtaaacatccacttgcattctacaggtctcgttttattgggtaagtctaccactcccatgtctagttctttttctgtgttttcattttaatatctataacattttttccattcttcacatgacaaaacctcagaaaatgtattgggaattagaactgcatttggactcataagaaagtttgtgtgagctagagaacccttccaaataatacaaagtttgaaatatggtagggtggatacttagtgcattacctcatcccttttttaagtacaattggtatatctatattagaaggtaaaaggtttttgaaatttacctcatttctggcattctactcagatgttgaacttttttcagattaggatccaggtttttccttcttaagtatccctgagaaagtcttgagtcttgtagaggtatcggttcaggttcattttatgaacttaggttctatgatattttgagtgtttgagagggtgtagtgcttgagagtgggggaataaatttttttttattatttatcaatactgtttctctctgaagataagattgactgaaaaaacttatttaaaaaaaaaattgattgaagaaaggctcggtctcgataaatgtgacatcagtgggtacataaaagttttgggtagaggagtgacaacacttatattcctttgaggttgatgtatgtgaacataggcaacaaacttaaagactctaggaataagattatttgtgactcttacgtcaagaaagaaggtagtaggacttccataggactttggaattccaacactagatggtaaaatgtttataagatagttggtagtcaagataacctctccccagtattgtttacgcacatggttttggaacaagaaaacgcatgtagtagtgaccaagtgattgtttttccgtcttgtcacacatttttgttatgcagtttggacataggaagacttatgaataatcctccactttcagaaaatgaggatagtgtttggttaaagaaattgtgagcattgtcagtaaaacatttaatttttatctcaaactgaattttgatcatattgcaaaattggagaatagcatgaccgactccgaatttagagtaggaagagttacgtgtgcaatcatcgatagatgaaacatgctatctagccctagaaatgttagaagtatacgaaggtttccaaatatcaatatgaattaatatgaaaggaaaattgcttcttttattgctagaagaaaagttacatgtttatattttgttagttcatatatttcacattgtaaatttccattattgtcctaatcatttgtagtgtaaccatatctcaagtgcatccaagaaatacaacccattccgtacctcaacatgtccaatcatctttctcgaattcaagttctaaaatccacaataagatgaagaaacgatcacttataatttaggtcatgtgatagtttgattactgaaattagattcgtatatattagcgaacatgaaacgcatcagtaagagtaaagtaaagacataatctttatatttccatctcttgctactgtggttagtgaatcatcacgtaattattttataattattgggtattgaagtatttagaggagttgatcatatgatctatgactcttcattctaaaattcaagatagtgcaaagggtttacttgagatatttaatccatgtgggatagaaaatgtacctaaatgtgccaatagacctatatctttaggtttctccagacgctttaattgagtccttgagcgttcaatttttgttttgaagtcattgaaatcggcaaccttctcttccccttgttggttagctacatttatgtgtccttgaggtctcgagaaattatttttgtacccttaatttttaccagaggttgtaggcttttcatgaagctttagcatttctcctaagcgtgtcttggtttcttgcattaggtacccaatagattatttctattgttatcatcggttgatggtgtatcattgtgattagactcctttgcctgttggcgtcctttggagtctttggctatcatcgctaagctttcagtggagcgaggttctagcattaccctctcttttgctctcttttacaacaaaagatgttattttatccaataatgatatttcttcattctctaggatctaaactctcacctaatcatattcttcactaaaactcgccatgaattagtaggctttatcaatctctacgaagttctttatagtggctatgtctctgccacaatctattgtgaggcaacaacgtgatctagtttttgccatcaaccttttaggagattagaatattctatcactaatttgtctctttcctttgcagaccaagtcttgattgttaaatcatagttttggattgcatctttaatctttgagtacgtttccttgacaattttccgaacttctcttgcattgggtaagaacatacacgtattattgatctctgggaacattgagtttcaaagcgataccattatcattgaatcttcttcatcccaatcatcaaattgcaagtctcctggttttagtttggtgcctaagctatggttgaatttccctttttcttttgaggattctacaggcaagttgtgactatttcatgtaatttttccatttaggtaataagcagctttttcaccaacctttcgagagactagaatattccgtcactaatatgtttctttgctttgtaaagtcttgattgttaaatcgtagacttgggttgcgcctttaatctttgagtatgtttccttaacgtcttcctaaacatctcttgcgttggataagaagatatatgtaccactgatttctaggagcattgaattttagagctatgtcattatcgttgaacattcatcttaagcattaaattctaggtctcttagttttttccagtgtctagaatgtggttgaatttacttttttctttgaggattctatggataattgtgaccacttcaagtaatttttctcattcagacgataggcaaccttcccatcaatgttttcaggagattagaatattatgtcactaatctattttcttgctttacaaatcaattattgattgttaaattatagattgaagttgcatctttaaccttttgagtacgtttccatattgccatcccaaacatctcttgcattggataagaacataaatgtatcattgatctctaggaacattgaattccaaaatcatgccattattattaaatttctttgtccaagcatcaaattatggctatcccagttttgatctggtgcccctattggggctgagtttccctttctcttatggataaactatgatcattagaggtaatttttttcatttaggtgataggtgacttgaattgcttggaattctttcgttgctttttgcgaatttatcatattgaaatttttgttagtggcttgtgacgttgtctctacatgatctataggtctagacaataaacactagtttagtagagacaaaagcataaataattacagttagataagcaactacaagtggcttggggattactggtgtagagaacaacattagctgttagtcttaggggtccacgactctagtggtgcatggtggtttttgtcatggtttttgtcacgcatataacagtttgagtgatggaggtgtggttggctggagcagggtctggagctagtagaggcgcgattggagtagtgccggtaagtgagcaagcgcgtaacttaaatactcaatattttattatttaattagttgagatgatataattagagtgataataaagtagtaatcttatataattagaattataatagaataaaaatttcattatcagtagattaaaaatttataaatactctaaatgtaacaatataaagggtgagaaaataaaatttatatttttttctcccaaatcaatacggtactagatctaaataaaattattttaaagttctaattttaagatttcctataaaatctaaaatagcacaataagctgagttgatactcaattatccagccccaaacactgttgtaaacctgaccggcagccttcccccgactctcccagccactagcagaagagacgcgtgagctgcatgtgcagctgttggtcaccacgtttcaccgcgattttattggcaatcaccatagaaagtgttgatgggttcacattcgacatggatttggtgaaaattgcaccggaaccacttgaattctccctttcgcacaattcggccgttgcgatcttcttctttgcctgtgcacgattcttcttccgaccttttggtgttgggcgagcacgagaccaacagatccgacacttcttcctcttcagttgcacaaatccgctatgcgattccctgcttcaaatctactttcacgtggctggggctcttcagatatgattttgcgatattagtacaaatttgcttccttcgcgcgcgagccgctcccgactagcattttttgctcctttccggcttctccgcgcgtgattgcctttggtttcgcgatattggcgcatatctgcctccttcgcaagcgagccgctctgaccagtcttttctggtttttttgtcggctccttcgcatgcatgcgcctctagtttcgtgataccagcgcaaatctacttcatccgcgtgcaagccactccgactggccttttctggtgttctttttgttttttctgcacatattcgcatttagatttcatgataccagcgcaggtctgctttgttagcacgcgagccgcttctactaggcttttatagtcttttttttttctttcactcgtgtcgcctttggtgttgcgatccgacacatattcgcttcctctgtgcgcaagttactccgatcagtattctttggtccattttctggctcctttacgtgcgtccatctctggtagatcgcatgatgactcttcagaattgagtctgcaagttgaacatgtgtgatatcattgtaccaatttgagagggagtgttgagtagaatattttattgtttaattagttgagatgatgtaattagagttattggaataataatatcatataactagaattatattagaataaaagttttttaatcagtaggttaagaattttataaatattttaaatgtaataacataaaagatgagaaaataaagtttatatttttttcctccaaaatcaacggagatgcatgattgtgcaggcgtgcagcagctgggagcagcactggaggctgctgagcttactagtggctggctatgaaaactggtagtagcaacattggtggctgcttatgaagactggccctatttagggtttttgtattcttttcattttaacgacgaaggtcgatgaggttttgcaagttggaggaggtggcagtagatgaatgccacttgtgtaaaaacaagaagtcatctgaaggtttgcacttcttccttagaaaagcttccagcataagagacttctctattattgatgtgtcattgctctcaaataggttagcttatggctgcgtagaattgatctgcttaccactatgacatctatttgatatgccattaagcttccaaccattctctctagtatgttgtgatttaccacagtatttacaagtcatgtagtcttcgtttggcataccttggttactggtctttctctggtcatggacgatgcaagcaactaaacctgctttgtcaccaccaagtagggtggattgtgacacttctgtgactcttttcttgctcaatataataattgtagaatttggagaaaaaatataatttttattctcatcctttaggttgtaacacttgcgtatttatagaattcttaaactattaattaggaaataactattctactataatcttaattagataagattaatattttaataaaattctaattatataataccaattaataattaaaatacttaaataataaattatattactcaacacccctccttcaagttggtgcagagatatctctcatgcccaacttgtagataaggtttttagtcatcatatagtttacaatgccaatcttttttgttgtttgaagattctaattttattagatttgttgcacatatagttgatgaagagttaaattgaaacaaaatacgcttcaagtcttgaatctctttatttgaaaaagctccaactgtcggtgtgtcgggtgtttcacttttatcaactaaatttttttgagctctcgtaggtctaccattctttctctcactacctctagttggcttttaatgcaacttccagcaagtttctcttgtgtgttttggcttgccacagtagtcatatattcgtaaatccttggattgttcagactgagcaactaattcagttttctcaagtagtgttatgtaaaacatgatattccttttacttttttcttactggacaaaaacataagtttgttctaatgaaaaaaaaggatctttaccaagcatctgaatttgtttttgatcatatttgttgttcaaatcagttaagaaattataaattcttttttttttaatcaatttcagaaatttgattgcatttgcagggcaatctgcttgaaagtcttgatagtaatataatttttggtataatccactcatttcaaaaaaatattgtgaaatactcatatctccttggtttgtgccacaaattttattgtggagttcataaacttgggtatcattatccatttgtgaatatgtaagagatgactcgttccatatttttgctgcagtatcaagtaacaaatatgttcgtgcaatatatggttgcatggaattgattaaccaagacattatcgaagaattttcagagtttcgtctgttatattacaaatcagctactttcggtatcttcatatcacttgtaatgtatcactgtaatcctctaattttgataaataataaacaaaatcttaaccaagtaagataattagttcaatcaagttttacgggactgatttgcaataaggggatatccgaataagaaaccgttattttttttacttatatcattttagaatgctaaagataagaagaaaaatacctaataataacaacatacctagtaatttgtaccaaaatagtcaaaaagacagaaaatactgaaatcagatctgtctgactcagttcggctcgggctgaaatcagctcggctcaacagctcagatcggctcaatgcagctggccagaaaaacacctcgggcacggctttgcgtgtggcaaagggtttctacttgtgcccggtagaaggtcggtaggtcgtagccaaaggctttgtacgatcggagtgaggcagttcgcgcggaggaagaagaaacaagagtttgtcatgtggctctgcgtgcggttgaagaagaaggaaacctccgtgccctacgctgctttgcgtgcggttgaagagggaattgggtcgcgcgtctctgtgcgcagctggagaagatgaaaactgagggcgtcttcgtgtctctgcgtgcggtggaagaaggaactaggctacgcagctctgcatgcagtggaggaagaaaccgggtggccctttgcgcagcttagagtgcggtggaggaaggatccggctgccttctcccttcctctgatctttcctctcttccccttggtctggctctcattctcctcagcttccttttgttgttttagagttttaaagaaatcctaaaaataaaaccataaaatacccttagtctgctttgatactatgtagaatttggagaaaaaatataatttttattctcaccctttaggttgtaatacctgcgtatttataaaatccttaaactattaattaagaaataactattctactaaaatcttaattatataagattactattttaataaaattctaattatataatactaactaataattaaaatatttaaataataaattatactattcaacaataataagtctatcgtataaaagtaatgatgtcgagtaaggacccgaactcatatttgatcatattctatattaaggccagcaagagagtcataaaccctctcattttcaattaatttatgaagtttggcttcatctacttaatagactgcctaagagttttgataatagtcttattcttggcaaaagccatttagttcattaaagtattgagcaatactcctctcaccttgttttgcaattcatatgtttgtgcatcattgttcacttgggagtatgtctatgcgatgcaacattccaaattctttgtgcagtatgaagtatccacgagaaatttataattgcattgaattgatgagccaaaacataatcagtgaattttctaattctcaatagtggagatagcaccaagcaactgttaatagaaaaaaatgggatgtcctttgcaatcatgcaactaaatcttctacaatcatgccacagagaaaaaaaaatccatcactatggtgtagaatgagaaaacaacaagctagaaatacttttgtgaaggtattatttcagtaggcagatatgaattgattagtctatttaatgttgtaaaactaacttatcaatgaaataagattctttgatctaatgtttgaacatagagttagagaccaattattcatattcgttttctagtattgtttttctgaactctttctaggccttggtatattgcgcagatgatgaagtggtaaggattatgaataatttgacgggctggtcacttatttcttctttagcatcctatgttttcttcacataatttttataaaggtggattctatttgatatccaatttatcaaagatttaattaaaatggttccgtatgaatgtcactcaagaaattagaaaatgctttctcttttcatgtgcttttgacttaaattatcatgtactacctagaggtgcttctttgaggtgctatatattcgtttgttgtaggtgccttggtgttgtgtaacactagacttatcagggattgttgtttaccccaatctttcctctggggtagttaatctttttttttcctgtgggctaaggcttcttggttttcaagagatgtgtatttggttatttttgagcaagactgggaagttttttttttataatttttttctaattatactttcctttttggtttctttttttaagaggattctttttgctctattgtaatcttttgttctcttctttctaatataacttatttttctatccaaaaagaaaaatcaagtataataagtcttcacatcttgattgtagtcttttgaatttcctatctataggaagg

SEQ ID NO: 8725 - DNA, 1168 bp, Carica papaya
  Intron number 18 from transcript evm.model.supercontig_125 .47 (locus evm.TU.supercontig_125.47) derived from phytozo me v7.0 (chr-ID supercontig_125; pos 841260 to 842427)
ccgccttccttccaggtaagacagtcgactatagataatgcaatccttggctagagttgctagaaacctaattggaactgggatctaagacagaaaaacaggtaaaaaataaatccagataggatcattggaattgggaacagttactatcacagagttgttagtcactcaatcaatgaggatatatacatcaatgtcctttttccataatcgatctttttaattataaaaatcacctacatatttatgaggtgtttaattgtaatatgattagatatttcaaaaaatttataatatgcttagaatacatgaagaaacaatgatagataggacttgtaatcgaataagaaataaaatcctaataaaatacaaagaatatattcttgtagtaatgctataactgatagttctagtattaatcctatactactactaatctagaaagctatgcaagatggtccgttgtcactgtaaaactcctaggtaactgctggtaaaacttgtttgtcacgtgtgataattttatcttattcatctgcaagtcacgctctattgctcgagaaaaaaagaataaataaaagagaggagttgtttactcccataagattcttcctttgaaatgtttgattcaacttggtaattttgatcataataggcaacttttctttgctgagtccaattacttctactgtttcatgttaatgttaggtggtaggattgatagaagttaaccatgggaacaagctcactaacaattgcctggacatttttgcttaattgttttatcaatgtcccttctcctgttctctcattgattgagataattggtgatttattttttaagtatttgaaaagtttaaattagtagaaaatagttataaatttattattcacaattacagctataatggcaagcttagcaagtgaacttgaatccgaatagattctgattgaaattaccaaaggttatacatactgctacttccatatcccttcagctgaaataagatacagaatctagtatacgacacgaaaaccaactgtaaataccaataatagattcttcaacttcgtaggttgtatgttgaaagtccacatacttgtatatgaaaaatgagtgctgatcataaatctaatagctattgtttttaacattgcaggaagccag

SEQ ID NO: 8726 - DNA, 676 bp, Carica papaya
  Intron number 1 from transcript evm.model.supercontig_87.2 4 (locus evm.TU.supercontig_87.24) derived from phytozome v7.0 (chr-ID supercontig_87; pos 152695 to 153370)
gtgctggtatgtctttatggtcttttatggtctgccatattgaatatgatgaaatttagtataatcttgttgtacgattgatttattttataagttttgagtttatggtattgagagaatcgtgagatgctaaaagccttaagtaaccatctggaactgggagttattctgtatattttttttggtggttctctagctcagtttaactcttgtctctttacctaaaggctaaggtattacaaaaaattgagcacctttttcccattcaaaacagaaggaacttttccattgggttgagattttgtagctgttttttacctctatcacaagccttgttctaaagcaatcaactaataaattgggaactgtattctggccatattttcagtgttgagatttttttgctgtcttttacttctactgcatttcatgttctaaagcaatcaactattagttttggaactgttggctgaccatataagataatttcatgattaccttttgatttacttttaactatactatgaattctgaagttctttatgatatgcctgtttgtttacgacttgttcttcctttctaatgattttagattgcaaaatttttaaaatgtttcatgcttggttactctttatctccagaggcagctctgtcaggtgaagaggataggttgtgg

SEQ ID NO: 8727 - DNA, 1255 bp, Carica papaya
  Intron number 1 from transcript evm.model.supercontig_9.36 0 (locus evm.TU.supercontig_9.360) derived from phytozome v7.0 (chr-ID supercontig_9; pos 2495029 to 2496283 reverse strand)
ccaccattttgtccagcttgaggtgggcgtctggtcagtttcagattggaagtgtcatgagatcttgatcaatgaatggcattctgcagtttgctagatgtttaataatgtgaataacaatacacttggataatcttacccttcatatatatgtatttatatgtggccataaataacagtgtataagatcactaagtctttgtatatacatcgggtatgtgattattgctgataatagttcaaatatgtcacacccaattgagaatatatactatgaataatgggttgtatgtgattattgctaataatagttcgagtatgttacacccaattgagaatatacactatgaatgatggcttgtatgtgtgattattgctaataatagttcaagagtgttacacccaatcgagaatatatactataaataatggattgtatgcgattattgctaataatacttcaaatatgttacacccaatcgagaacatatactgcaaatataatgggttggattctactagtctttttttcaaattaaattcgagcatagagtagagaaaatttgtttttaattcactttcagtttgataattagtgtcaaatagagtaattaaacttagtgaataagatattgatctcttcattaaagttttaagatactgcattaatcggttatttcagaaatagggtaatgatgaagatcatggactactgctcaaacttacatgtaatggaattagagttcaagtactatgcatttattcacgccatttcaatgcagaaaaagtgttcagagcaggaaataattgagtgggtgatttctttaaagctgatatacgtagtatatctatacatatgactcgatttcatgtttaacaggggctagtacttcataatattcattcatgtagacatagcgaccactttatatattactgtattccttgattatgtagaagtttatacgtgtattaattatacagtacaaaaacaccaattataatacaatagagaagtttatatatttgaactcagtagttttgtataaaggaatgcatgatgtactcctttttcatcatatattccatagaatgtttatatattctaacttaatcggggttgattgataaaacccgtgcttattaatacttagaacatatatatatatatggagactctcattgtttctctctttttcattattcttgctgatgcacagcacttttcagtcggagcaaactgccgcaaaagcta

SEQ ID NO: 8728 - DNA, 3331 bp, Carica papaya
  Intron number 12 from transcript evm.model.supercontig_116 .57 (locus evm.TU.supercontig_116.57) derived from phytozo me v7.0 (chr-ID supercontig_116; pos 528718 to 532048 reve rse strand)
tgaccttaatagtcctgaagtcaagcagcaatttggtgagtgcgagatggattattctcatgcttctttaagttttaccgaatataaatgcacaaaaacatataaatgttgtcttcatggtactcttttaatctttttagacatgtttccatatgacgagcaaattacagaaattcctttgagttttggtataatatacagaaccatttcattctttaaaactgaacataaaaatctgtatattctaagttactatatgctttacactctcattgttaatcttcagtgtcaaagttaacagcaatgacaaaattactataataccctttatttaacaagaatattattatactagttttaataacttatttaaataataaaatgtgtaaaaattattaaataattaataattgatattgataacaattaattaaaaatattttattaaataattttaaataaaactttaagaactatttatttaaaaatttatttgaaatttttgtccacagtttaagatggaggaaaaaattgttttttaaatggtataaaaataatttaaaaatatttttatgatttaaagaagttacttttacatgtttttaaatgatttttttaaatatcagttactaataacaaatatgttattatttaaataaattattttatatttataaataatttttaagtaaaaatcatttactaaattcatttgataagttatataaatttttttaatttaaataaattattaagatcattatggtaattttatcattaaatgagggtattagaattattttatcattatggttaagtttaacaactaagtttagaggtaatgatgtaaagcgtggtagtttgtaaagtgaggagttttctgttcagtttaaaaaggcaaatggtttttgtatataacaccgtaaatcaagggggtttctgtaatttacccatcttataatgcatataattaattgttagtctctttagctttggtattctagagttcatccttgctcaagtgattgatttgtccattttggttgtcatttgactcctcaaaacatgtattacaacgttttgaaatgttacattttttgatctacttttcgtagctatataaatcatattaaatgcttatgtgattgattggcatcctaatattgcaatgtatctaattaattgttaaattattcagctttggcattatttcttaagtgattgatttgttcattttggctgtcatttgacttctctaaacacgcatgagcaatgttctgacatgttaccccattttttagatacttctagccatctaaatcatattaatgtctataattgtgaaatcattgatttttttgagaaagcaccaccacaatgtaggtatgaactttttagtgttttatattgataacttgcttcttgcctgataacatatggttcttttatgattacaatatattattgaaactaaactgcagttacttccttgtgttggaagaaaaacttgcatgcgtacttaaatggatcttttgtgctgagaaagaaaaagctctaaataaaaaagccatgtagtcctaactatataggagaaatatatatgagaaacttacaggtaattgctctctatattctaatactctccttcaagctagagcataaatattgtatgcactaaacttgttataaataaacttcaagcaagcttctcttaaggattttgtaaaacctattgtccaactgatctgctgattttatgcaaattttccaaatcacattctgccaaagttttctcatataaaatgagaatcatccttattgtgtttagtccccatgaagacctatttgacgcaatgtggttcactgccttgttattatatggatagatattgtggaaaaccaagcttgtcagttgaatgctttaagtctattcaacttatgagaagtgtgaaccatatttatactacagtttgtttcttattcttccagaaaaccatgttgcatccatgaagatacaacaacctttagtgtatctatggtcaatagtagaattagcccaataagaatctatatactgctagaagaaagtatactcatggtgcttatagagtaattgtgaccaagtgtactttgaggtatcttaagatgctcacaacaccgtcctacggactgctgtgtggcaagtccataaatagaatcatagctttcataggagcaaaatgattgaaaagtaaggacaaggtaattcagtttgtgaaccattctccgacatccatttggatcctctaataattcaccttcatctttggccaatttaacattacatgagagtatcaattggcttggctcccaattttcctctctcattcaaaaggtcaaggacctaatttctgtgaaagcaaattcctaattttgatctgcctagacaaaagagtctagacatgtcacaattttatctcgctttacgaaagcaatcatggcaggcaattagatgaaagggagtatactgaaaatgtgacatcccatatgagtatgaaatagcaatcatatcctttttgaggatgagaatagccaaaacaatacgagttaagaggtctggtatctaacttgtcacatctgaccgtaactaatggttaaacaaccacagcaagaagtaaaacaaaaagtatgttgaggcaaaggaaacaaagttcggaaaaggtacagtataagaagcttgtcttgataaataggtggtcagttaataagataacatgaagtgagaacatcactctgaaaaaatctgggaaaattcatataaatcaattaaacatgagtgatcttgattaggtgctgaactcttcccttgatgtcaccattttgttgtgaagtgtgtcgacataaggatagaaatcatcctatgataactcatgcaagatgtaaaaggatgtgaaaattatcatttgcattgtcacttcaaagaaaaaaaaaatcaacatatggaagttttccagagcaaaattcacaaaataaatgattctaaacagtctttcatcagatgaacccaatttattcttgaaaagtcatcaactaaaagaaaaggtacctaaacctgtacaagagagagaatatggaaccattaacctggaagtagcttctctgtttaagagaaaggtagatccttctttttcaattttcaggtttattcgatatcatgaggttggtggttttaattttctcttatatctaatatactccaattggaattctctcgattcaattgttaagatgattcgacaatcttttttcttatccagatcagattgggcttacacctgaagaagttatctcc

SEQ ID NO: 8729 - DNA, 2756 bp, Carica papaya
  Intron number 1 from transcript evm.model.supercontig_116. 82 (locus evm.TU.supercontig_116.82) derived from phytozom e v7.0 (chr-ID supercontig_116; pos 882363 to 885118)
cattatctctccagatagcaggtaagttctaaaagctctttctcttttttttaaaacgaatacatatccgttcacgttctttctctctcccatcgtccatgtctccgaaattgctggggtttttttctttcttctttctccgcgtttctttttctggttttatagaaacacgaattttgatttgaggtgaattagatcccaaattagacacgtggcacaagaagattggactgttcactgaaatttggtgctatgctgtggtgttagtaaactttttgaaatttcggtgaaaatataggcaccgaatcacgtcggtccatacttgtccggttcggccgcttggccgttagctcagacacacagctgtatgcatggctgggatgaggaatactgtgtacttccgatgatcctgttgtcatcatatcctggcccgccagagggagagatgccgttttatttagccgcataatgatttcaggaacattttatttaatttcgtcatatttttatttaacccgactataagagaataattttattaacgtgaaggtagacaattaacaaatacatatatattttttttaaaaataactgatcagtgggaaagaacactcgttggtattatgcaagaaaagattacttgaagctttcttagttttcataataaacttatattgttatatgtttattttttttggataaatttggtaataaagaaagtgaaaattactttcatataacttgttataacaacgatttacttttgatcttttcacccactgaacagtggacagtccatatatacattattaatgcaaaactgtagggtatctgtatcacatgctaattaatgcaacagtgcctttgtctcttttgtgtggtcaagactgtggatgcatttaacctattagcaaaatgatattatagtctagttatgcttcacccaaagggaatagtgatgagtattagtctgatgtttacttctattattaagagattattagagaattaatactcttttttttctacagacttaaaaaatttatagtaactaaaatactaatgaatttgacaagaataacaatctatttatttaaataatgcatatattaagacagaaaaagaattatacaacaataatttttttgaatatttcaaactttctcctcaataagaatataatgttattttctttaagatttatttttttatattactcaaataatacccaaagaactttaattgtttctatgaaaaaattatttagaaaaaatcacgttttaaaataaatttgtaagtttaaggattaaattataatcaacataatgttaagattaaactacagtatagtccaaagttaaggtacgaattagtaatttgcctttactttttttcttaatttaaaaatttatatattattattgattgttaattatatattaactaacacataagtttatataagatctaatggtatgaattcttcaagcatgatcctttgaacatattacttattttgatttctattattaattaagctaaagcttttaacaacaatgagtcaattgtcgttgctggcattaatatcaaatttatgaagttttaatttgatgaatatagtgaaaaacatgtatagctgtttcttgaaattttcccatcatcatttgatataggtaaaggaaatttaaaacaaaattgtactatgattagaagggacaagtcaacatgaatttgtttagatgacagcactcatctggtttttctccctttactttatttagaatacatgaattttttaacaaccaatagtattcaagcctattgtgttgtgtgtcaaacaacaaagtttaatcatagaaataaaatagctaaatttatatagtattataaaattaattgatattccaaaaaattaagcaatggtcaatttatgagttaagtgcttcaagttttatttcttttaatgttaaaaaaaaattactaaggggggggcgggtactagttttttttggtaaaaaataagtgtgctaaaatttattaatagtcactttttataacgaacgaggatatataaattacaagaatattaattgaagattttaaatatttttgttcgtttgaattattcgttaaaaaatagtctttcttaataatatattattgttacttttcattttaaataaataatttgaaaaaagaaagtaaaaagaaaaacaaaccttaatagtttaaagactattgtttcaaatgaaaaagaggaaacccaacagtttaacttttagtctagcagaacagaacagtgcgacaaaaatgagcatataaataagtctccaagctccggaaaatttatactttttgttactatttaatgacgtgggaggttaaaaagtcacattcaattttgtgatatatacagtactattttaacaatcaaaagatcctttgtttgattaaataaacagctgcatagcctgaattttttttaaggaaagaaggggaagccaattatctccatatggaattcagtctcaatgataaataaaagagacgattacataggagccaatagcctcgggcactaaccgcaggaattgggtgttgaataagtgctacatggggaagtgtcattcgtagttacttgtttatagaaccataagagcattgtaaagtccatcttctgtttacaatttacaagtagtaaaatcacaagaccaattgcaggtggtatcgagcctggacaacgttcatactggtat

SEQ ID NO: 8730 - DNA, 6061 bp, Carica papaya
  Intron number 5 from transcript evm.model.supercontig_192. 5 (locus evm.TU.supercontig_192.5) derived from phytozome v7.0 (chr-ID supercontig_192; pos 39337 to 45397 reverse s trand)
cacttccagaatctgcagcaaggtactaagctttttgttgcttaaaagcctgaagatctactttatgttttctagactctgttagtttttgcaatggaatttagtttatcaagaagcaacttgaaagttggtgaaacttgtatttatcttaatctgaggccatgtatatgtaccattatgtgccactcaccactagacttgaatcttctgtgccctttaacatattagtcagaagtggaattgatttgacacttagaattgcatcacacaatcaatgtattgagaacattgttatctaaaacatgtctggatcatgatacagggcatgaatatgaaatatgttttatactaaattttggtctaaagggtgtatgcttagtcagtatgttattttgatccatatttccattgaaccacttattaggttcattaatcagatcatgagaaacacttcaatagtttaatggtacattatgcttcattggttcttgttctttttttatgagaagatatctagaatagatcttttttgtagctataacaagaagatgaatgctcatactacaaattcctaaatgtctggttaatgggttacaagcctttaaagaaggtatcaatatattttaagttccgaaaaaagaaaacattgtttgatggactcttgcttttcacttgcagacctactacttccattttacttaccaaagtctccataacatatggaatagaaactcccagatatgtgattataagctttttccttgggagaattgcgaattagaccaccccctcctttgttttcaaagagtcaacaacttcattgccaacaaaagcggcatcaagactccctctgacaaaagtattttggaactcaccaaccacacttccataagctgaccaaggcttctaacaagtaccttgggaagaagcttgcacacacaacccattgagctgatgggttgaagtcccttatattacatgtgttctcaattttcaggatgagagctaggaaattagcattgagacttgacacaaaggatcctttgaaaaaatcagggagcatatcacaatatccttttcaaccaacagctaatgcttctgaagaatatccatagagaagccatgggaggcttgaggctttctcacccttacaataatggagagttccaaaagtcttatcctcaaagaatggcttcttcagccaatctcttttcatgccctccaaggaattgaaagctaagccatcgaaaaaaagttgctgaacaaaaggtttttctataaagctccttcaaaaagcctttaactgcctctctaaggatcccattgtgataaaaagatcgacaatttgtctccacatttaccacaaagttacatatcctataatgactaccaaggctgtgaaaaaaccttttgtttctaacctcttttgtgatccaagtacctctagatctttgtccaagcaatctcctcccgcagtaaaagatttgcaactaccactttgcactgttctgaggattcttctctgcactgttctgaggattcttctctgcattgtatgaagcctttccaccctttagcttatcaaatcgatcgaactcctgcatcaacccatcttttttggcctccatatccccaaagttagctttactttgttgccgtgtgctcatttttcttgtaatcttaatgcttgcatggccggtcactgtatattcctcccaccacaatttgaccttatccctagagctggggtgcataactgtttcctttcaaatcttaggctgggctccacctaatactattagtctccaagcacaaagggaagtgattcaaagttctgtacaatcagattttttctactaacctaggaacctgagaattaaaatgctcaataacaaagaagaggtcaattctgtaaaaactaggcctttaccttaagttagagcagtccatctcttgcttgataaagggagataaataagatcgagtttgtctaataagtcttcagactcttcagaacaaacccgcacaaaacttcacccaatcttctctggccatgaagaattatatcgagtcacctccaaccaccaatgaaaaatctcatttcccatgcactacctccaagttatcccacatgacttccctctcttcatgctccccctagtgtacacccttgaaaacatctagcaacattagaaagtcctaaattttaggatgcaagtagccaagcatttacccctgaaccaatccaccaattccaatatgcattcttccacatgacaattactcccccaaagtccccattacaagtagatgccatgaccccaatttgaccctctattagtgattgcttattctcttcctcaatatttaccatatttaaaattcttctaaaagaggactgcagagtgagattctgatcaaacagagcagaagtacaaaaagggcatgccaaaacacttagtaactggtttgaactgttggaaaattggtctggagaggttgaatgagtttaattggaccggttaaatatatatgaaccagctaaaacagagctgttcttgggtcacttttttgtggggtccactcgctgatcaaagttcactagaaattgtgatgcaaacaagattaaaaacattcaaaatactcaaaaagcatcaaaagatgacttagagtaaatttcaaatgacgtaaacacaaatagagttccaaatctggaaagtttcagcggaccagtaacaagatcaaaggtaaagaaatttaaagagttgctccaagttttcactcaaaaatatgtggatgatgggctgaccaattgtgagaagttcaaatatgagttttttgaacatcctaaattcgtaactttaattgagtttaaatgatttgagataatttgggcttgtttgagttttattggtaatgggtgaataagtcttgtgtatgagttgaattagttgagttgttttaagtattttggattgttttattttagtttgagttaattaagctcatatagtcaagtgtaactcattttgagcttaagtcttgttttagtgttattacaagaatgaacgcataactatatggtgtcacaaacaattagtggtgttggttaagaagattggagttacaagaagttatataacaattacatgcctataattagcctagttattattagagttacaattgtaattatcacataattaacctaattattgtgggagttacaattgtaattattgtattgtaacttatcattgatttctttggttataaatatcaaagaaattcttctttgtgaatatcaagagttgtaatcagatattttagaattgagttgagagcgttttgactttcttttcactttatgcataaggtgttgatttgaaatacaattgctattatttgtatttcagttttgatttcctatttcaattgttcttggtgcttgtttggattgagttcaagggatatcatttatctttcttgggggttctatttaacttttaccatttgggtgattgaacaaatttgattcttttttacttgtgatctaaattctgttttaaaccaattgaaaagttctaaggttcaagcaaaggttttgggatttcgcatcaaaatgtcaaattctgatggttgacctatttgatgatgggtattatagatcaggaacccatgtgagattctgtggctggacaattttgatctgctgtgcagcagtgtctcaggctcttttcggcaagtgacacattcttccctcgggttttggggcgagtgaccaggagagggagcagcataggttttgtctaaggctagtggtggtggctatgatagtcatcttccaggcagtgttggtgatttgaggtagtgacgctatgagagtttagctttcttgtagttttgatttttttgtttgcacgcagatggtgagatcttcttggacaaggttgtgagattttgggttatagaaccttttagctatatacccattgatgtaggacaaataaatactagtttgcctacttttggatttggcttaacttagggattcttggatatttcacctaaaaattaaagataggaataacacaagatgaactaggagttacattaggatcccttaaggcatcacacgtaaggtgacagtttcttgaatatcacacctaacagttgattgtattacacaatcaaagtttttttttttggagataaaaagtgtaaatatatattaacaaggtaacaatgagagtaccacccatttacaaatttataaagttgttagggtgtcaataaaatccctaaaattctcatctctaatgatgttataagctaacataatgttaccaaaataattaaatcataactctcttagtctattaatatctctctcaataccatcaaacgccctcttattcatttgtttccaaatggtccaaaaaagggttaaaaggataattttaataatattcttttttagatcaatcccattcctagcccagatctcatcaaaaaccgaaccagagatgacccaattgatcccaatcagtctataaatctggcatcataaatcgtgggccacctcgcagtgaagaagtaagtggcagcaagattcctcagccttcttgaacataaaacacccgttaaccacaatctggcctctagtcttcagcttatcaagtgtcaatatactttctctgcaagcctctcatgcgaaaaaagcaattctaggcggaacactggatttccaaatctgtcttgaagggaaaaggggtatgttatcctgcccagcccccaccaactgccaatgaaatgaatcaaccgagaattcaccctttttgaatggtttccatcgaagctggtccactccatcactaatttgacattgtgagaccagtctgaaaacctcttcataatcaaaaacctcccaatcatttagatttttagagacattcaccgtcaaaggcaaacctccattttccgtcacaaacgcctccttaactctcatgtttttggatcgtgcaatggcatatattgtagggaatatagttttcaagcatcccccatccaaccattcatcatgctaaaaccttatgcagttttccctacccaatttccagccgatacactctctaaatctcgaccagtccatggtccctactgtcacggcaacactccccagcaaaatcgagactgcaccatttagcttctatcacctttctccataatatgctctcttccttaaagaatctccacagccacttgccttgaagaactttattcatatgaaccaaagatctgatattcaaaccgccccatgttatgaggttttttaacttctggccatctcaccaaatgatactttcttttatcaataccgtccccccataggaagcgacattgaattgattccaatctttttgaaatgctgaccggtatagttagggtggtaagatagtatattggaatgttagcaagtgtacttttgatgagagtatatcttccatcttttgataagaaattcctcttctaattcgcaagccagttctcatacatttcaaggtattgagaaattacacaatcaaggtattgagaaaactatcttgataattttaattaactgataattttgttaactgatatcttgatctcaatagtgaaattaaataggttactaaagacctaatctaatctgtaaataaaatcttaaagttactaaacacctagtctaatctgtctgattactttaaattgtagattagcgggagatacaatttctaatcaatttagaagttctatttcatatccattcttcattatttttagtttcctatacatttatactaaaatttacattgcttattcaaaactatgtaactgtcagctgttagcagatactagtagcatttacacaatacatttatacaagatttgtgtttgagttggattttatattttttccttatgtattcctcgctttcttaatcaattcattgaattattacttttatttttctggaatacagagcgttagaagaattagacaattcaattttccaag

SEQ ID NO: 8731 - DNA, 4448 bp, Carica papaya
  Intron number 3 from transcript evm.model.supercontig_10.2 16 (locus evm.TU.supercontig_10.216) derived from phytozom e v7.0 (chr-ID supercontig_10; pos 2717498 to 2721945 reve rse strand)
tgcattttcagaggtagagctgacttgttttttcttctttagctttaccttttatcattttgaaaattaactttgaaaaggaactagttgtcttgatatgcctgtgaacatgcatgttatttgtaggatgagatggttggtctaacttatgcgactttttcaaataaaattcctaatagtttaaagaattgaaaccatttgatttccatttcctatggattttggggtcttctggttgacctcggactctcttgaagtgtctgccattgtattttactgacccctactggatcttccttctcagcataacatctttttcatctctactttgttttcctcgttaaacttatattctttggaaagaattatcaattgtcttaaatttgtttttctttttatcatatcattgtaaatattatataaccacatgttgattttctgaaagtgatgaagcaagcttttgatggtaagtcggatggtattaggagaataatttaattgtttatttacattattataatctattagtattagtattttattgtagtttaaattcttttatatttttatattttcgattataattctagtttagggtatattaggattaaattaaagccctatatatgccatttgtatgagctgccattactattgctctaaggagtttctcaatcttttggttgtatggtacaatctgcaattgagtttgattctcaagaactcctttcagttgattttgatgcttaagaactccttttcccatttgtgatgtctaagaagccttagacatcattttcaggttaatcccattaggcaaactaattcctaggctttgttctttgatttggaggagctgtccttcatttttggtttgtgtaacccggtttggtgcagaggcagtaatttaacttcccaaagggtttgttgggaaaaattggatagacgtacctctattccgagggatgtcaacattttattttacattagccacataaagatcttctgttatccaatgctcggttcacttgcttgttcagtgagggtaggattgcttatttccatatcaatctttttttgatgtctaatagccggcaagatagctctcctgacttggtgcaaaaattcttcctcattctttctcggaccgtttccatatccttttagatattaatcattggatatatggtatatggctacagcatccctattttgtgcaaaaagcaaaggagtcatgggatgggtgtgatgtggaaggctatgagcgtttaagttcataaagcaactccagtttctgaaaggtaagcttaatatctggaattaagtgttatttggtgacattggtgttaaggaaaaagaaagaaatttgtgaaaaaatctctttcctcaataaagtagcctttgtcaatggcatttttgaagaccagatgaggctgattatcatctttgagaatgagtttgaggaggttcttgttaaagaggaaatcacttggatgtagaagtctgcaattaaatggtaaaggatggtgatgctaatgtggatctctttcataggatgctaatgaaaaaggaggaaaatttgcatcaaggaatttaagataaaggatggtagaattgtaagacctttctctataggaagggatctcattgaactttataggaatttatgaggataataataatcccttcttggagggcattgcttggagttctataagtggggagagattagtgattaaagagaccttttagtttagaggaggtaaagatagcaatttgggccttggcttgggtagggctcttggcccaatggtttctccattattttttgccagaactttgggaattgtgttatgagtgtttaatgaaggttttgaggaattgtgtcctaatggggaaattacaagcatgaactctacctatgtttctctagttctcaagaaggaaaggtctaaagtccttaattttcacccaaccatccttgtgactagtgtctgcaaaattatacctttcgtggggattgagaaacatgttgagtgataacatttcctctaatcaaagtgattatctttatgcttccctcattggtaatgaagtgtaagaggatgtcgagaggtctaaagttagtttcaaattttgactttgaaaaaccttataataggaaaattggactttagaaatggtttagtgataggtggtggaggtggcttgcaagatgcttaactttagtatttttgcagtcattgtcaaaggagagccaaaagcgtggtttcgagtgcagaagtggatcaggtaggggaccttcttttcctgtttctttttatgattgtggttgatgttcttagtcaaattttgattttgggttttaagaggggtttgctgaaaggagaaaatgttaggtagagagaattaaaatttctcagctgtggtttgcagaaaatactattatgttttcacatgtgctgaccctattgcaagttcttgagagcatttcagcgttactcatcaacttaacaagagcagccttgtgggaactaatacttaggatagtgtcattagagggtttgttggcctaattggatatggagtgttcttttgacctctaaactatttaggaattctttggtggtagagttttcaggtgatttcagtgttggaagggagggtttttctctttgggaggtaggttattcttattcatgtttgtatgtctagtattttcttatattgcctctttgtttaggatccttaagctgggggctgagtaacttgagaggatcataaggtctttgtcatggttttttggctattgaaatgtctggtgagatgagatgtgtgtgtctttctgaaacggattgtggattgggtattgggaatgttatgtctagaaacctgtatttttcttcggaaaccttttctttgtggcacaaggtgattaggagtaagttcaagtagcagagaaatggttgggttattaaaaaaactaggtgtaccatgattcatgggaatctcttcattcccttaacctactaaaagtgagtggctcaagcctcttgtcttgaaaagatatatggatcgttgatcttccctttgctagccttttcccgtacctttataacctctcatctcatcataaaatgctcctatctatcactacattaatcatcttaatagttacatatcttggaatttctttttctttgggaatttaaatgaccaagagtcagatgatatgcctttttccttttagtcatattcttgagccctttattgtctttccacattctgatagcaaaattccgatattagattcctcgagtgtatagacctgcaagtccctttttactcatcttacccataattttaggtcttagaatgagaattttcgctactaaattttggaaggctaaagttccttgtaagagaaaggtttttgtttggattgttgttcttaattgcctcaacacttttgatctgttacaagaactctggccgaactatgttccctccctgatgtgtgtattatgtggttcaagaatgtagagtccaatggcatcccttttagcattatgaggtggctgaaggctcttgttcaacctttttaatacttttggctctatctgtgtttctcccacttcccttgattttttctcactttgtccaatctggcgctagataggggaattgcacaaagaaggaagctgaagtgctttggagaagctcttttcactggcttattcgtattatggttggagtgaatgctagacttttcaaacattgatgctcccctcaacttttcttttggtgaggaatgatattttttgggtgggtcactgctgatgggttcacttagaatgtccctttagttatattgccaagggacttgattatggctctgtgttaacttttatgtcttttttttttttttttcaaggaacaaattaatttaccatttttgtttgaataggaggatttcatcagaaaaagatagtctagtttatcctatgtcaattgataaaaaaaccaaatcttgatttagtatcacatcccgaaatctcaaaacctttgccatacttgcgaagcttaaggaatccaaagaatgacttcaaattaattttctatcattttttatttatctagaaaaattctattattttttatccatcaaactcataaccctatattcttaggtctaatatctaagaatccctagttttaacacaaatccccaagtaggcaaatttaaccatagtttgtgctatgtcattatgtctgtatgtatcccttaagtctcatgtttgtaacaaaattatcttttggttatgatattcatgatatatttatgggtgaaggtgtatggtatctccaatgtttgctatatgcatccgttgcctaaatatgatctttgaccaggacacgcacctactactcactggtggacttgagaa

SEQ ID NO: 8732 - DNA, 6568 bp, Carica papaya
  Intron number 2 from transcript evm.model.supercontig_138. 30 (locus evm.TU.supercontig_138.30) derived from phytozom e v7.0 (chr-ID supercontig_138; pos 390614 to 397181 rever se strand)
cggtttacgttgatgtgagtatttctgttcctctattctgcgtttagagacagtgttttgttgttacttctctatgtttttaattattatgagttttccgattcaaggatagatagatgctgcaatgagtccgtttatgaaaatacaccattgaaacctattcatagtattttcattcgacccaatctcttaatttactgctttatctataaaaaaaaatctcttaatttgctgctcaactactcgttatggacttgaattggaaaaattggaaaagtaaaatgtcggtgaagcgaaaaattgtttaatagtttcagtttctagtcctgttatcctggaatgtggttaggattttagcagtgtcctggctgaaatccaggtatgcttgtccaaagattgaaagtgatattatttctattagctgtctaagggttatgttaattgcaacgtttacccgacactggtatcttaactatgataggttatttatcacattggtatgtaactctatttcaaaacttactccattcagttctagatattttcacttaaaatctgttgtttattggtgttaaactttcccagatgctccatgttaattaaagtttgacattcatcatcgaatgtactttacagataagtcacatattttatttggttttggtactttgttcatggttctacaaattcatggctgaaacttgtttctatatgtttcaaagcaagttaggttctttgaattatgtgtctatagcctcttggccctgtgccttttttaaaaaaaaaaaataaaagtgtgagaatctcttggccctgtgccatgtcctgctttcccctttgcagtccagctcttgactcttacaggcaacattctgtaattattcaggcaaaagaattgagattcctagaatttatttatccagttaaattgggattatatgaagagcatcggtattttttagattaattaatggaaaccaactgctctcattagtttattctgatttgcaggttgtcaactcttaccaaaaaatattcgttttattttttgttatctgtatttaacttggacttacgggaaagagaatttgcatttctacataacatttttcttttaaaaattctcttttcatttaatatttcagttggtttgtcctgcagtgaaataactccttgagcaaagtcagttctgtgtagaagaacataataattatgtccatgtcagagcatcacctgtgtatctgcatggtcatatcacttttttcttttttactttatttccatgacatttttaagtgagcatgtcaactagctgaatctatagatgtcaagtaagcttgagaaagacttctttttggaattgaggggctttctagctggtctaaaagtgaactcttaggttagtgacataatctctagaaacgaagctttcttattctgtattgctttccaaatttggtatacctactatacattgattatgggtgaagatataggattagcatctcaagccaatgttgagatggatgtgctacaaaataaagcaacagaagaccatatgaggagagtttcaagattaagtagtacaaaagagaacgttggtatttctgaggttatgatactgagttttatcttcaataagtgaagtattttttttttaaaaagtgcattggataattaaggcgttagacattggaaagtatccgaatttttatttgttgggaattatttgttgatctctctctcttctttctcttgaattggggtgttcatctcatgttctagttccttatacttttaaagaccaaacactgacatttctaatgtgtaagatttatggaaaggaaatctgaatatttacgcatttcattacataaagttatggatatatatacatagaagagggatctatatatgaaaatataaatcatcttattaatgctaagaaatcaactaataattacataaaaatatttcataatatattttgtaatattctaacactccctctcaagttgaagtataaatattgatcatgttcaggttgttacgaagatattcaattcgagttccattcaaaacctttgtgaatatatcatataattatttccctgatttcacataactggtagaaatcaagttcttctgaattttctcacgaatgaagtgacaatcaatctcaatgtgtttagtttttttatggtacatcgaatttgaggcaatatgaagagcaacttgattattacaccagagtttgcaggtaatttaggattcaaacccacttccactaagaagtgttgtctccataagatttcacatgtggactaggttacagctctgtataaggactctgcactggattggaacacaacggtttgcttgttactccttcatgatactaaattctcatcaacgaaaacacaataacttgtagtggatcttctatcaattttagatctaactcaatcagcatctgcaaaacatttaatgtgagtgtgttcatgattgctaaacaatatattgagtccttaagcactttttagatagcacaaaatctgttccaaaaccttccactgtttgactgtagatacagatatagattagttaacaatattgataggatatgctatatctgaacgagttactgtgagataattcagtttatcaattaatcgtctgtatctttccggatcatcaaggggtttaccattatctttagtaaggtgtacatttggtaccattggagtattatactgtttaacttttaactttccaatttttacaagtagatcaagtatatacttcatctgagattagaaaatctctttattgtttcttattacttctactctaaaaaaatatcttaattgaactaagtttttcgtgtgaaacttggtatgtaaaaatgatttgaaagagaatattcctgcacagtcgtcacctgtaataataatagtatcaatataaacaataaggagtataagaccagctgctgactacttataaaagactgagtgatcacatgtactcttctttagttcgaattccataactacttcactaaatttgtcaaaccatgcacgggaactctgcttcaggccgtacaaagatttttttcaaatgacagactttcccatactccctttgaacaacaaattcaggtggttactttatatatacttcttctagaaggtcgccatgaatgaatgcattcttgatatctaacttgtgtaagggccaattttaagatgttgtaatagagatgaataaacggatatatgtaaattgtcattaaagagaaggtatcagaataatcaaacctcataaggctaagcatagtcttttgttacaagtctgggtttaaatcttattattgagccattgggtttactttgactgaaatgacccatttgcactccacgaccctttttcttttgggtaaatccaccaaataccaagtataattttcatcgaaagcatttatctcccaaccattgcattatgctaaccagaatgattcaaaacttccttaactgtcataattacagaaattaaatttataaaaacaatgaaagaagtagacgagggagacagatgattatacaaaatatagttagcaatggaataaattggctgaggaatgcagcactgacatttacctttacgaaaaccaatggagagatcaagatcctgtgaaacagaaccagatgacgatagacttggtgcaggacatgtatcatgagtttgttgtcttctggaataaacatgaacaatcagtggtgatatttgggtcagaggcacactaacactttcatcaacttgttcaagtaaagttggaggcacatcatctagagaaatatcattatctgtttgctcagtagaggcacctgaagtgaaactataaatgagtcactcatcgtctgcctcttgactggtagacttggacaatgaaaagaagaacgatgtattctctgaaaaaatcacattaattgataccaaatatttattgagatatgaggagtagtactggtatcctttttgaaagcaagaatatcattaaaatacacattttagggtatttggatccaattttgttacactatgtcgcatatctcgcacataaaatgtgctaataaatatcttagattgcacttgaaataaagacttatttggaaaaagaaaactgtaaggagcatctacatcaagtattgtagatgacatacgattaatcaagaaacatgttatggaaacaagaattgttgagggacttacatttgaaacaagagggctcgagctgtctcaaataaatgcttgttctttctttcaacgactccattttgagataatgtatcaacacacgagtattggtgaatgatttggtgttaagtcatatagttctaaaatgaatttgatatatattacttgacattatcacttctcaatacatgcacagaattgaattgtgtcttgatttcagtacaaaagtacaaaagtgagagaataattcagaacgattcttcataaaatatattcaaatcattcgagaaaaatcatccacaaaggcgataatatttaaaacttgttttgcacgaaacaggataggggccctaaacatcagaatcaaccaactcaaaagcagaatcaactcgtctattgactcttgtacctgacgaaatacgataatattttgcaaaccgatataaattgcaatccaacaaaaatatatcatagaactgaggacataactttttcaatacaggtagagagaaatgtcttaatttacaatgtgctttaaatggagatgtaacgctagagcagacaaccgattgaggtactcaggtatcaagaatgtagagactatataacatatttcctttaccaataatctgtttcgtcgtaaaattttgaagaacacagtgatcagaaaagaatgtaatacaacaattcaatttttttttttttttgaaataaacaattcaaatttttagtcaacttactcacagaaatcaaattgaagacaagtttaggcagacttaatacagatggcagggtaatagataaaattgcttttgtagtcttggaccccacaatgttatagttgatccatcaacaatagttataggaaaatgtattttgtgtagtcgaaaactaggaaaaaatattagaattacctgtcatgtgatctgtaatattagaattaatcactcatctgttcaaagttgatattagacaatttttctatagttcagtaagagtagaaaatttattcaaaaatttctgatattgagtgaatttagcatactcgtcagttaaaattataacaattctctcagaagatgagctagcaatagcatcaacaatactagcggtctatattctgcgattctgcagtttcttacagtactattttatatgctcttattcacagtagtaatagtagacaatatctatttcaatttagaaattataagaaatatatcactcagaatactcaaaacacaataattagagatattcaaaaaacactgcaaataggctagaaactctaagaaaacaaaatactttttcatacacggaaataaagaaaaccacattgttgccactgaagttcatgcgccgctactggaaaaccacgtgtcgctgccggaaatcatcaagattcctcctttcggctgaaaatcaccacataacccttatgcacactctaatctggaatgacgcttgcagaaacgtcctaaatcgcgccagaaagctgagaatcgcttgttgtcgtgcgatttcttccgccacaattttttctttttcggccatctggttttgtgcacaaaaccggccaactgagtcctctgtgccttctttccttgaacgggaacccaacacgcacagggatgctctcctccggaaatcccgccgcacgcagcctcaaaccgccgtgcgaactgctacctaggcttctcctgcgtacaccatcgtgctggccacacgctgaactggccgaagaacggtggctgtcttccttcggcaccgggaatggtttgttcaatccttcttttagtttgatgtaaattgacccctaaaatcttaaccctaacttcaactttaataccatataagatttaaggaaaggaatgctgaatatttacacatttcatttcatagagttaggagtatatatacatagaagagagatctatatatagaaatataaattaccttactaatgttaggaaatcaactaattttgtgatattctaacatgatgccaagctagaagagtcattaatttttttttcttttgttgattgtttttttagttgtatgtgctttatagattagcaaagggaattattgctctcctggttttaggtggcatctctttagtagatatcgagcatctaggcctgagaacatgtccgttcttctctttttgtttattttcttttttaactttggggaatgtacccagtatatgatttgcagcacagcagttgtcaattcatggaatactattgttggtgttttctcactttcaggaggaaattgagattgaggcaaagactttacgtat

SEQ ID NO: 8733 - DNA, 1253 bp, Carica papaya
  Intron number 3 from transcript evm.model.supercontig_87.1 04 (locus evm.TU.supercontig_87.104) derived from phytozom e v7.0 (chr-ID supercontig_87; pos 818693 to 819945 revers e strand)
gacaaggttaggcttctcatgcagcgtaacacgatttattgatacagaatctagttaaatctgtttattatgttggcaacttttgtcggacaagtggtttcgttgtgggcaactttctatttcaaatatctcttttggattgataacttgaaaaaaggtgcatcttgatttcagatttgaaccaagcagcaattattagaatctggatacgtgttcaaatacttataaataaaactaatcttaagaaagttaagaattgtcttttgtttcctatttttttgtctgctttatattttctgaagttactaatagaattctgcagagatgttggattctactgaactagtgagtttattttttatctgtcacctttaaggatgagcaattgccaaatcatgtcatctcaaagaacgtttgcacatttcttttgatgaaaattatttgagaaagaagtttatggttggtgttgagtagggctttatacttgtgagagttgattagtttgtggttagtcatgccacgtagttgtgggttcatggtagtgggcttgcagtgaaatagtaggttattccttgggtaaggtgtcattgcactgtttgaggtgttactgttgtctaaattgcattctactgttggtcttggtagctgttaaaaatctgactggatcactggtcattatttaactagcggttctgagtattacctatatctccatgcagtggcagcccgggcaggatggggtaggggtggtgtttaattcaatagccccctctttttaatttcaaagtatgcattcccttaagagaattataaaactgtctgtaatatattaaataaatcaggcatcttctctaataacactaattttctgttttgactttttatacttaaatctaacgtgctgctgatgtttcatctcacacctcataacttctaataacaaaattatttttgctccccttggaaaaaaaaaaacctggttctgccactgtatccatgctgatgatttattgacatgtcttttcaatccatccccttttggtttccattttgttcatccttttctcaaagcaaatctaaataatatttcaacagcttggggagattaattatttcttttaagttcctttgattttttttttaaattgctagtggcccttggggcgttaggtgctaagggaattattttggtttttgttcattttgctattgttgtcttctaaatccagatactacagtggcggaggacaaga

SEQ ID NO: 8734 - DNA, 3893 bp, Carica papaya
  Intron number 2 from transcript evm.model.supercontig_1.29 8 (locus evm.TU.supercontig_1.298) derived from phytozome v7.0 (chr-ID supercontig_1; pos 4130574 to 4134466)
ctgccacaactcttgcaacgggcagtgatatacaggcaattttatatgcttgatgtagttttatatgctgctgaatgatggttcttcattgtgctgtttttggtacagttaatgatatctcagactttgtgagataagcttctatgagcttattcttgagaaattattaaaacacagtctaagaagttttggtaaattctttaaaaaattatcttttgatggttttccaagcttatggctggtagttgcgatcttgctttatgggtttgaagttcatatatacttctccttctttgggttgtgagattccagaagaagaaaatagaagagaagagaggcagaggacaaagaaagagagaagaatgaggaaagaaaggggtagaagccgatgggaattagggaaaaagagtaaagtacatagagggaaagagactctgtagagagacgatatttttcagtgatgtcgattgattggtaagaaatgaccaagtttcatcttatatagttgatattcaagccagttaaagcaatttagataaactaattaaagactaacttcactaattaaaacaatcctcctaaccagtagcaaatctaaaattcccaaaaaggtaaatataatttgtctctcagacaatatccctaccatccctagatcctgacaatgccctttgtaattctttcataactagataaggaaataccaaaactaatttaaaaatattacttctaaaaaaatggggatactaatactaaaaaaattataatattaattctaatacaaataggaaaagtaaatattacaaagaataaaattctaaaattatcaaaaattataatgttatagtcctaaatagcatagtaattttacacttaaaagaatcatagtttccaacctataggcataacccgtctgcatcagctggaagcaatggttggagagcttgcagcagcaagtggtgcatgttgtattggtgttctctgtgtggattttgggggttacaaattgggatcttctgatgctcgtgatggcagttgtatcgataacagtggccattgtccaggatggctttagttagactgagttaaggttgtggtttgcggttttctgctttcagttttgttgttgtgattttaaaatttacttttggttttagatgggtttcaggctgttgggtttaatgtttgagattttgagtatatgatcattctagtttggacaccaactgatgtaggacaaatcagagtttatctgctcccttaggcatttcaggataaaaacttagacaatacacgtagtttaagtatcatacttaagggtttgattgcatgatgcaacaaaaaaattaaaaaacttttaattttttttaattaaataactgaagtttgtctccaaaagtaaaattgcagaggtatttatagatgcttcataagtaatatttcatcgatagcattaagctaagacatactaatcctaatgaaattaagaaattatactactgataaaaataagaaacaaaagaccaaaagagaagcaatactactaatacaaataagaactaaaatactaaaaagaaaatccttaagttactgaaactatattaatagattattaaatagcacataatcttatattaaaaatttgtgacttcttacctctttacgccatctaaacttcaaggtataggaacaatgttcacgaggagttccttcaggaagtagtttccgcattcttgaataattgatggggtctattctatcaacttgtattcaactgcctcaccttggcttcagacttctagattaaaagtgactgatccaaactcattctaccaacgattgttcatttttataaatccagcaggccatcttgtgatgctccaatctttaagagattttggtacaaatccagcctaacggactcatactgaaggatccttgttgatgttgcaactggcaaccaacaaggatgcatgtggtgcatcatacagcagagccctgtgtttgattcttgcccctggaaatctttgtttcacctcagaattgcctttaaaatactagtgcaagatcctaatctataatataccgcagatatattcctaatgacaagttatagatacttgctagcatctaccggggaagaaaattggcttggacagggatcttctgcagttttccaaggagacaaggagctttccagactagtgttaaagttccttccaagtttcatatctgctagctatgtggaagatgtgtagttgaaactctgccacgtgaatgatctctatggttactatcacttattccatgacaagttttccctgttccaggagtttttagagtatatttgctacggttgttcatatgtttcatgaccaaacaatgccatttccacggttaagtaggattaagtgtccttccatggtaacatttagtgctacatgaagatcagagagtggagtttctctgatgactattcatatgattattttttcgtagttggcttcttgcatcatatgcctcttttctaccaggccttaaaaatcccaattcaaactctccatcagctgaaacttgagaatcaagttttctgatggattttttagggtcatagtgtctaatgcagcggaagctaccaggatgaaattagtgatataaccacaaaaaattgttaaaaaaatgaatgcagccagcctagtacgaaaacaatttttccagagccgataataccctagttttgaacctagctaaaacattccattccaagtcatcctagctaacttatatgaatgagatttcaaattcatccaagtatcaattagaagaaatccactacccttgtacacataacacaactgattccgaaggaatccatcatcctatattacaagaatttccaactcaacataatccccgaaccatccgttttattgtgaactttcataagtactttgtatgtacgattctccaacgtattttcaaaaagttgaatctcgctcttagtttgcatatcatccattatcatttcccctttgccctttgagtgccatacattgacaaccccaccactaaaattatctcctaaagttttagcatccaacctagataacaaggcttcactgttttttgcatacccatgaagtcattaagtttttgtgtcaaccatatgtagataactgaaggggaggagctgaatctctagtcaccgtatgtagcatacccttcaaggtctcaagttttctcaagtttttgtgttgacatgcatcagctttcttgcagagacgttagctgctcaagctgaagttcatgctactgaaggttattaacctcacggttttgaaaatttcttttggaattcttgaatttagagttccagattgagcaaatatcaataattgcaatactggacttcagggatgttgagatgaatcactgccatggccaatgagcaattgctctaataacattttctcatgttcctggaatacgaacctgagaagaggagaagagtatagcagaggagatggaaaagagtgagagtgagacgacggagaaaaataagtagaagaggaagaatgataggtatcggaggataagagggttattaattaatttttaagctacagaacaacttaggtaagctaattaaggactaaatgttattaggttaaaacaaccttcctgatctatagaaaacccaagattaccaaaacaacaaaatctagtgtctatgttcaacaagtcccctttatttgaaaggacagaattttttgttgtgtggttggaactggaagtatgttttacttttatctcgtcatgcaaatataatgatacttatgggaattttttatgtgccaggatcttgttgacattgatatttttcaagaagcgaa

SEQ ID NO: 8735 - DNA, 3328 bp, Carica papaya
  Intron number 1 from transcript evm.model.supercontig_847. 2 (locus evm.TU.supercontig_847.2) derived from phytozome v7.0 (chr-ID supercontig_847; pos 10811 to 14138)
aaggcaggctcactttggagcaaatcctaaggtttcgttgtcttctcattccttttctactctattccctttgcttggatgtgttaaaggatatatattatataagtcagatgattttgtataggattaaatgcttggttggctaaaatgttgtactttgcggctctatattaagtcactgtggagatatggtgcattcagcaagttttgatgcatttggaaaggtctaaagttgatacatttatcaagatataggacctttcagtatcatctgtttatcaccttttttgtgcttgtatatgatgacttcatatctcagttgaaatggtcattttatgagctagcgaattcatctagctgtacataagtcaggttttgtagtttggattgcaggttcgacaatttgactgtaatatttgagtttgtgctcgttgtttcaacagttgcatgtctaatgtaaatagtatttgtcaaggaatggtttagacagacatttcatgcatcagatttatattattggttgagaaaatatgctgacttatcttgtcaggaaaatctgaagatctatgactttacctggtttttggaattattagttactgcatttatatatggagggtgccacgtgcacaagatatgggttccgcttaactgcttgcgttttcctagaagtctgcggccaccctgtattacactgctaagcattagtatgttcgagttggttctattgcgtcttacttctttattaaaagagagaaaaatttgtaacgcttatttgttttttttttccccagagagaaaaagaaattatactagaagtggtgctttttattagttgacaatgctgtagacatatgatgtagaacaaattagttttgatttgcctactgagaaattgggaaaaaaactagatatctcacctggagtttttaggcattacacctaaagtttaattgagtcacacaatcaattatgataaatttttaaaaatattattgtatacttgaacgaataataagtgaaactacgaaactagctgtaataatcttttcctaactagaattaaactagaaaagtggaaactagtagaatttagaataccaatcctaatacaactagaaaataatgttaataagaattattctaatacaattaggaaacaatactaataagaataaactcataacattaataagactcataaataataaactaaaaactaattgaataataaataaattcctagtatggttatgtgccatcaacatatgtactccttttttctttgtggcagagccattcagcaactatacttatgcatttaggaatctcatggtgatggggagagtttgatattagttccttcctgatagacagtcagctgcatggaaatgtctaaaggcctgatagtgtagattatatgatatcaagcagtgtttcttataaatatctccactttagtatctttctatctcattgctcagaaatgtaagagatttgacgaacattttttagttgtttaaggctagaattttaaaggaaaaccgggggaaaagaaacttcaagagaattgtactattttttggagaaactaattggaacggaattccttttataatggtcatgttttgggagaaaaaaagaagagaaaaaagaagagagtattatttttgacttgaagagataaatgaatatcgcagtcctaggaatatgggacagtcaaataagcatttaagggcagcagtgaccaacctctgccagtggcttgaactgatgaaatatgcaaacttctgtaagtttctttgagatttgtagaataggttctagcactaagaggagtcctttttttaacagctacctaaatctcatatcttcaaaggaagagacctctttcttctgaaatttctctgttttaagggtgataaatattgaggaaagtgaaatttgttattctgtgtattgtaatttaatctgtgagtcccaagatcactggtgaattgtacgcttaacagaaaaagtgcaaaatatttggatttttctatgttgcttgctgccaatgtgatgcatttgacactttgttacattgcacttattcatctatggtaaaatttagagtagatgcaatgatttttctgcccttcccatcataaagaaaaggagtgaataaaataattataggattagtagctattccttgacctcaattacttgatagttaaggttaggtcatatttttcattttttacttaacaattggctttgtaagaatcacaaatctaccttgtcattccaactgttagataatttttatcgtattcgtattcctttccctattccgtggtattagatttcagctaaacttagccttaatggaacacttaattattttgagcttgatatcacatgccaagttgtatttgctatttcaagcttgtaacagccatttagcaattagtggtttgtttttaattgattttttgcttttcttaaaaataagttgcaaattatgtagtcatagcagagataaaaatattggaagttgaagatttctatgtttgaatatcctccttgttcggtcaggaaaaacgatgccaccaccataaagtaccccaaatactatggaatttagtaaccttatgggtctctatgaatttaaattaactctgaacgttaacaaaagattttcatttattttgaaatgtcacaatctccaaaagatatgcaaatttttttgggtaaatatatggaaatgttttaaggtttctttccttggtaatttctttttttggttttctgtactgtgatgcttcctatgtttgtgtttttgagaatgaaatggacaaaagtcattttcagtcatcaatttgagcctgaaaaggaaagccaaaagaaacaggtggtagagagtcaataaatacagtgacttctgcaaagccagacttaaaggggctcattgtttgctaagagacttagaaacgtttcaattcttgcttgcttttggtgacaattgttaatttcccataatgtttaatatgactaagttctaaaattagcgtctgatgttatgcaaaatactataaatttcaggattaaaatggattagtgactgtagtcatcaattgataatttctatctttgtaatcacttcttgtcattatatgaagaggattctctttttaatctgtttatacatagggatgctaacttaatcatgctattttttgcttctttattgttattgtatttgataattaggcttggttaaagtaactattagctgactgtgactcttgccataacatagcaagttttcttgtcaattgtagat

SEQ ID NO: 8736 - DNA, 957 bp, Carica papaya
  Intron number 5 from transcript evm.model.supercontig_12.7 2 (locus evm.TU.supercontig_12.72) derived from phytozome v7.0 (chr-ID supercontig_12; pos 582177 to 583133)
agttgttgtttcccttccactctgccattgttagctattatttgatatttattttaaggattatgtgttttgtattgtgtatttcatacatataatcagctttaagcattttgtttcaatctttctatttagtaacaaaaaaaaaaaatggtgcttattaggttcctaaaagtgacctacgaaagttaaaaaaggagccctttatttctatctttttcggttcttattttttcatccagcaatttttttaactaccatcttgatatttacttaaaatcaactatatatataatagtataatttataaaatatttttaataagtatctattttctattattcttttaaataataactgtctttttgtgaaaaacactttatttaaatgtgtaactgcctattttttaaataaaaatttatctactttaagtaatttaaaacacccaactagtttgatcatattttcttaagcaagcccaaacacactctacacttaactattgctttcttttgttgtaatgtcataagcatgacctgcaaaagaaaaagtactcaacatattggaagttgggtaattgttgaggaaaatgatgacaattttctgcctatatccatggttgttgatccatggatatcatttttgtaataataatcttcttttctcatatgtttggctaaaattttcagtacgcatggaagctgcttttttcttgactttggatatgtttataatgaaatggtttctttggtattcttggtttgaactgattaaatgcttaacctttttctttggatagaggtgaaagaattttgataatagaactttattgacttggattagattttaggtttggaacttatgatgtccttcaccatcttttaccttttgatctctaatctaatttccccttctaatgcttcagatactgaatctgccaaagcatcaagaaggcagctt

SEQ ID NO: 8737 - DNA, 2241 bp, Carica papaya
  Intron number 3 from transcript evm.model.supercontig_71.1 2 (locus evm.TU.supercontig_71.12) derived from phytozome v7.0 (chr-ID supercontig_71; pos 194452 to 196692 reverse strand)
ctagagaagtaagctcttcatgtttgtgattggagactgaagggctatttttgtaccttattaaagtaatctttggttatgatttgctgtatacttctacagtgaatcaagggctagttttgtaccttatcctaataatctttggttattattcgttgtttacttctactatgatgcaagatgaattggacaaatttgggttaatttgtccacctaaaaaaatttgggataaacctacatatggggcctacatttcttagacattccccctaagaaggggtttcttaactattaaaattaagacattattgcatcacacaaccaaaataataagagaattctcagaatcatttattgttttttaagttaaagtccttgttattagggtcagaaaactctctctttctccctcatttatggaggtcaatccattggctctatgccaactgcagttgtttgaagcaaactattttcctttctttttgtcagtctctccttctaggagattattgataactttgatgagagggaagtttgactggctgacccgaacttataggcacttttatatcttgggcacaatggtcaatccactgctccagtcagcatctgctggtcgaagtaaactcttatctttctatcatgttggtatctccttttaggagattcttgatcattgaacggaagtctcatgatataatgctaattggagaaaaatcaactgtgtcagtttaagtgaaaatcggagggggtttcagatgatgatagttttctcggaaggggaggttgagtggttgatcagaacccttttggattcttttgggggaatggtaaagattcatgggttataattggtgggaaagaaccacacttcatgagtggcattacatgtcaagcttggagttagatgtctagccaccatagaaagatcaaaggagagatggaggaggatttgtatccttgagggagtgaaggctaacggatggtggaggatgacaagacaatatgaatggtggtagggaaaagtggagacactgagtaggtgatgatttgttccttcttgatggtacattgcttttctgtaagcctgaacccctatttttattgaacattagattctcttatggttacacttttcattcacaagattaatttgacaaagttggaacagttctgataagaaaggtggatttagtcaccttggacggagttttagggtgtaaactagctaatctaccattgaagtacttgggattgcgcattagggccacgatcaaagatgcctctatatgggacctgattgtaaacatattttgaatctagattatcatggtgcaaaaggaatatgggaaagaacaacacttatgattggaagagtgagttggtggtggttgaggagaagaatcttcataaatgataagcttttatttgatattcacaatgaatcaggctttgagtgtttagaaaatgcttccattcatgtttctctttgtgtgcttaactacgaccaagagaggtataaagtttactctataaatgatggcttatgcttgtcctcactattcaccatatataaaattcctgcaaaggtgtacgttagagtgctaatttagtgaaatagactgcaaaagtgcgaggacaccaaaagtacttgagaactggtctaaacctgtgaagagtggatctagaaaaggctaaactggttttgggtgaactgaaaaattcaaatttgagcaaactggtaaaaaataagacaaacaaatttggtcaaggttaacttgttcccatgtcattaggttaagaaggggctttttcccatgtcattaggttaagaaggggtttctcaagcatcatatttaaggagtttctaaacattgtagaaccaagatattgaaaaagttcttggaataatttattgattcatggcgtggtttcaaagcgagattaaaaaagtatttacaatacttaaatgtgaaatctttatctaactaataaggaattctaatataaaattagaacttgtattataaataaaatcctaaagctaccaaagatttagtcttatctatgttattacaagatattataatactcaaaaattattacaggatattataggctagctagacttgcaactcctaattgatgtagaatttttagttcctctatattctgcaacatcctaacgtttaattctcgtgtttagctgacttgtgggatctgctttgaatcctatactcg

SEQ ID NO: 8738 - DNA, 285 bp, Carica papaya
  Intron number 7 from transcript evm.model.supercontig_80.3 1 (locus evm.TU.supercontig_80.31) derived from phytozome v7.0 (chr-ID supercontig_80; pos 235827 to 236111 reverse strand)
agaatccactatacatatcgccaaatcaggttagagaagttgaagcttattttgatttcagtatcaatatcgttgactactttatgcatatagacatgatgatccctctcaagggcccatctaataatgcagtctctacttgctgttactgtatttttctgtttttctgatttagtagttatattctgaggtatgaataatgtgataactcttccttttttttttattttgagaaaagaaaaaagacgtgatacctcttgttgttaatgcctccagatccgagca

SEQ ID NO: 8739 - DNA, 2795 bp, Carica papaya
  Intron number 3 from transcript evm.model.supercontig_86.3 8 (locus evm.TU.supercontig_86.38) derived from phytozome v7.0 (chr-ID supercontig_86; pos 560776 to 563570)
gggtaaaggaggggttgcttgagaggccaacactggtgagctctttcattaatttaatgggtgatggctccttttcccccaaaaaaaaatttaatttttgtagctattgttttattttaatagaaaaagaaatgttaatagaaagagaaagctaggatgttgtctttttcctggaagtagtttccttacatatctggtctgtgtaaactttttggtgtatttgtggtgatttttaatgcttgtgagatcctttagagaagctcggtagaatatgattactgtgaccacaagagatttcaaaggatttcattcaggatcgtgagcttaggatatctccttgatgtaggaccattggcagttaaactaagttcttgtggataattgagaaaaaaaaaatcagttaagaagcagaagaatggagataagtttgagaaaaatccagatcaagttgaagaaatatagcgaagagtagaataaatgggataaattacataaaactaccaccaaaagagcaaacacagagagagatatcagaaaataaaaccatagcaaaaaattttaattcatcatcatctattctttctgtttgtagctactagtcattttgtaggtagtagttacatataataagaaaaattataaaaatagaaatctaaataattgtggaaagtaaaaaggttctaattcctatcattcttaaatatgcataaataggaaactaagatattataattccttttagctaaataatcctaagtagcctaaatactttaaaaatataaaatatctattattgcaaaaaaacttctttaattgaaaatttgttccaagatactatcttcttattttacatcacttaagccagtgaacaaaggcgggattgtttcctcttgtattgatagatagaagttagttagaggtgctcttggtcacagtatgtggagaataattggaaataattaggacatggtccttgggtcaacacggttcaacaaatattagatatttgcgtgatccttggtgaactaaaagcctagtgaaagattcttttccatctattttcttgttttctagattcagggaggcaaacgtattgattgttttgaagtgtataatggtggaatccaatagaaatatttcccctcctctgcgatttgagtgactgggagcttgatgagtgggtgaatttccttttatattttgagtatactcgttttcaccataaataggctgaaaacccagttcagaaacacatgaaagctggttttttaatggttaaattgcattataactttattatttactcaatgttgtgtctgagaagttcctcaagaagtacctatggaaaacaaaggccacctgaggatcctttttttctcatggagggccgcttgggacagaattttagctgttgacaatgttattaaaagggccaaaatcttggtgaatgggtgcttttaatgcctcaatgaaatgtgaattcctgcactaccttctttggtgcttgatagccagaaaggtttaggaatcaactcttagcctccttattctttcttgggttgtcagcgccttcatcaaggatgaactctaggcatggagtggtatccatactccaagtatcagagaaaatttatatatcttattcctctttctacatgttgggttacttggaaggagagcaaccaaagagctccattttctctttataattatatgaattgcacccttgtggtgccgttttaaattgcatttgtcctcttccttctagattctcactcgtgagttatgacctttgactcaaaacagttggcagaggtatctagaggacaacaagatctccaagttaaaaagatacagaaaatctgcttttttacaccattttcagttaaccagaacatatcttgcatttctgcttccaagatcatagaaagggtcttcctttctatcaccaacaactttctaggtgaaaggaaggacatggctttctaatgaacaagcaacaaagtagtcatagactccaaaaagaacatgaaaagaaaatcttgcttgtagtgagtgttttcatgctctcttggaatcagttcacgcagccatcttctctctttatttctttcctgaatatgaatattatgttagtttaaataaaacctgttatgtgtttcatacttaggccataagcattagtactggtgtctttacaatgttttattataaatatggaaattgatggtctgactgatcaaacaaactctcttttgtttctagtagatggcccttagcattatctgaaatatctttaattctggtctgtcaaatacatggtattatcctttctgaaaagatgatgtcagttcattccctagtgaaaatgaactttaaaggaacctttatcagttctactgagttggtcggaccttcttgagataattccttgtgtttaaatgcacccatgggaatggaaatgtgcccaagcctccaagatcttgaaattttttcatatttttcctttcttcatttattatttttttgggggggggggggggaggggggagggagctctctagggacactgtcgagacacctatttttgtttgatcgcaccgcaagatgttttctcaaagtctttttttcttatattagttgtcagcattctccatctctaccagcttcatttttcttgtagttggcgtttcaattgcctttcatttattttctttttccctttgattaatttgcttaacatgcttaataaccattttgataggtggaacttgaagaaaaggcacaaactttgc

SEQ ID NO: 8740 - DNA, 4996 bp, Carica papaya
  Intron number 2 from transcript evm.model.supercontig_36.8 3 (locus evm.TU.supercontig_36.83) derived from phytozome v7.0 (chr-ID supercontig_36; pos 637847 to 642842 reverse strand)
aggcttcaactgctagagcttccttacaggttcatttttcatctacttttgtttctataagccggagaaaacgggatacactgttaaagttttttcatctttttttttggcggtcaattgtatctcttagtagttataggagtttccctacagtaagaggaattatatagtaagcctaattcacctgcagagaaatatcatttggagatccaagtgttctctaagggataaatcaatcgctcctgttggttcaacctccaacttgcacaaattttctccttaaaattaataaattccttattggttaggtattccagatgacactactggagtgccataatttttcatacaaagatgtatattctcaaatttgttccctttggatgtgtgcaattcggttttttctgtcctttaacatatgtatctgaaccagaaacattcggtgcatattgtggaggtgtttcttgaatatgtctaccattaaggaaagccatatattacaaagcctgattgaatccacaaccacaaacactggcattgattttaggcatcagaattattttgtaaaggaaactttactaataggccaattgttattatattaaactgttattgtagtactgcatcccaaacttcactgctgtataattttaggcacaagcacttgcattgattttaggcatcaggattattttgtaaaagaaactttgctaataggccaattattattatattaaactgttattgtagttctgcatccccaactttactgctgtataattctattcattatcattgtccattgattgacaatgaaattcattttgcaattcattttgcaaatttgggaattgcgattgatccgtagggtggggtcaatcacaaacaataaactggcctcaagctatgagttcaaatcaaattttctagcatgtaatgaaggaggatattcttgagcaattacatctcttgcagtcacggtgaatgagggtccatcttttttttttcaaggcatcctaagatcttagacaaggacatctattatctcctttactatttattattgtcatagaagttttgaataaattattgttacgggatagaaagatggttttgtttagaggactaaaggtggaagaagtagagcaaacagaggagataacccacttatttttttgcaaatgacaccttaatgccttgtgaactggatgaaagcgcattactcgatatcagacatgttctattgtgtttccaagcagtttctggcctcaatattaactagctaagtctgaaatggtgagtttgggagataggagtaatgctactagcttcgcaagagtctaggaatgcaaaagggttgagttgccaattaagtacttaaggatgcctttgggggagataggagtaatgctactagcttcgcaagagtctaggaatgcaaaagggttgagttgctgattaagtacttaaggatgcctttgggagcaaactacaaagatgtgaggatgtgggaccttgtggtggcaagatttgagaggagattggcaggatggaagaaaaatttactgggcggacaacttactccctttaaaagcacgctagctgatcttctatttattatatgtctcttatgaccatcttagtgagtgttaccaagatattggaatcaatccagtatagatcctacggggcgactctgaggagaaaagaaaataccatttggtggcttgggaagaggtcaaaagaccattgtatcaggatcatttgggttcgagatctgttgttaagatgaatcaggctctacagggcaagcggatatagcggttcgtgaaagaaaacgacactcaatggactaggggggtagggtgaagtttggtaccatgagtagaggatggtattcaagaattttgacaagacttcatgggaaaggggtgtggaaaaaaataagtatgggaatggataaaattcaaacctattaggtggaaagttggcaatggggtgagaataagtttttggatggactcttaacttggggagggcacactcaaagataggtttctccatatttttgcaattgcacggcaggaaaacatctctgtccatgaggcattcagagatactggggaggaagggagtgacactgaagttaatgagaaatctcaatgaatgggaaatgaatgaatacaaaactctcctaagttcaatatcgtctacatctttaaatgggagtgatgaccaactggtttggagcgtcaacactatagggagatttgttgttaagtctttctataattacttggccgagaatgaccctagagattaagtttcccttttggcaaatttggaaggttaatactcctcccagagttgctttcattgcttgggaaacagggtgcagatgtatctgtactattgacaagttaattaagaaggggaaagatgatggtgaatgactgttatctttgcaggagggcagaggagaaatattttttctgggtgtccgcttgtgtacaatctttgaatcgtgtcatatgggtttttggggattaggtaggtaatacttggtacattaagggatgagatttgggcctgaaagggaattagtggggggaaagaaacatgtgaccttatcccccttgctatattttgggttgtgtggaacgaaagaaacatgagagcttttgagagagtggatggggatctttatatggttaaagataggtggttccaaaccctaggttttttggttataggtcatcctgtatttttcatgaaagatcttcggggaatttattgacattatgatatatatgcaaatatttttgtatacaggttgaccccttcttgttgcttgtaattaatgatatataccatatttttatttttttaaaaaagaattcagatcaaaataataaaaacagggagatgtaagacattttctatgtaatttagactaattgattagatattgagtttgcatacattttatttgtgctctaactgtgcaagtgtgtaattctaacattcttgactcagggacaagaagattaaatcattcatgcatctagacccaactaacctctgtttggctcagaagaaaagtaaaagtacttagtggctcagaagaaaagtaaaagtacttagtaaatgattctggagaatgtgatctaattacaaggaaaagacatacctagacttccaagcttcctttcgatttacagaaatttcttagattttgatcattcatagagacaattacaaatctttttctaaaccccccattagagctttcaggtttcctttcttctggtctctgttgctgagctctcttaaaacccagctcctttctccctttgtcctctccctccttttccccttcaattgactggctctcctctccttaaacctaggaactcttctaaaccgatttgcttttctgtgcttgccctcaatatctcctttgctcccagctctcgacctctgttttccttgcttgaaatctccctccagttttataggagaaatcaaacgcttgctctgctcgatttcttttctccaggtctcgggtccaactcttttgcttctgacccctttctgctttgagtcagtgcttccatctttgcctcttctgcctctcaagccatacgtttaccttttccaagtgcttatcatacctaagcctcctttctcttctcagattcaatcaagcttctgccacaacagatgcctgtttttgttttttctctttctgttttctttcacctcaatgagcacttgcatgttggatctttctgatacagtttctctatctcatccttttcttctaccttgtgttcttcattttgctcgtttcctcctaaacagagagatctgattgctgataacgaaaattttgtgcaaatatacatggtgtgcatgcttgccttttgtttcttgcaccctccccaataacctctcattttaaaagagatttggatgagtgatatggtgtggtcatgtcagacaactggagaatggaaatttgaactgtagattgaattggtccttattataaaaataaatttgtttctaaaatttccaggacaaagtaccaatttcgttcttgaataataggctatgttgcaatttagttctaaaatttttttcttagaatccaggccttcaacttacaaaattgtttgagaacggtaatttttcaatggaatcttttacagaaatagtgaagttctttctatcttacttgggtgacataaaaagtggcttaaaaatatattacttctacttaggagtaggaaattagcaaaaatccaaaaacttgtcatagcaggcctcttcttctttcccaattttcattattaacatctgcatgattgaaataaacagattaattatttatgattaagtttattaaggtcaatctttagtatacttccaaacttcataggaaacaaagaaaaggataaagcagaaagaatatctattatttcctgtcaaaatttttatagttgtataagaaatcacaaagtgaaacattttaataagttcaaggataaaattataatggaaaaagtttatggaaccaaattacaacatatgttatagcctagggactaaaaggataattttctaaacttttatcaatatttttgcatttttttaaaaatagaaatttgctgagaaaatatctggacatgactgtcataacaaggagctcagttaaccatttgttattttaatcaatgaatcttaaaacaaacatctatttgagtggtggtgttcatttttcatgttaaataattaactgatggccttaaagttcattatctggcaattttacttgtcgagttaatcaacagattaaagacctctgattgtcctttttattaagaagttaatgaagctgacatctgcaaattcactcaagacccattccttatagattttctttctgttgcttccaggagctatcttcaacaaagtcaagcatccagcagaa

SEQ ID NO: 8741 - DNA, 4108 bp, Carica papaya
  Intron number 7 from transcript evm.model.supercontig_53.6 3 (locus evm.TU.supercontig_53.63) derived from phytozome v7.0 (chr-ID supercontig_53; pos 416565 to 420672 reverse strand)
cttcccaatatctggtactctttcattctttatttgaagttcacttttttttggagaaagtacgccttaaactttataacaaatctgccattagaggtcgcactttatggctaaaacttcataacaaatctgtcattggaggtcacactttttgccacaatatggaaggaacatgtctggaacaagggtaacaagaagatcttaaattggatatatttcaataataagagatatttatgtaattgtaatgtttatgtattacttagatatttagcttgtttaaaattattccttacggattagtattggtgcttgctgtcctctatgtagttatatcagctccttatagcaagaacttaaactgcacaatgtcgagctccatgttgcgtggcttcaattgcatgataatttgctccttttcgcaagagcctaaactgtatgatattcttagcccgtatgagctcaaactataagatcctatttagttagtctttgttataggttatcaattaattagcttatttttctattaattgatttttttggttgacttaagaattcttattttgattgtatttttgtactaatttactctaatttagttctttggtaggctattcatatgattgttatataaatatttagtttttttagataaaaacatgtaatagtacaccaaagggggtgtcacctctatacaaaagtatttacataaatatttagttcttaacttggttatcaagattcaaaatcactaatttggtttttaataaaatttgtttaagtattgtgtttaaattttcttcatcctacatctattggtgccaaaatctaatttcaatttatcataaaatcatatatattctttttccaaacttcatgatgtattgccaccacaacaataccctctcaaccctaaacctcagaagttgtagaaacaacacaccaaaaaggactgttcggctgtgaaaattttctccagtcacccagccaagtccatcagctttagaaggacccaatccttgcctgcaccaaatctcatcatctaccatgacccgagtccatctcacccaccagaaatcgtcagacactgtaacaatcaatggatttcctccttcgtagatgtgacaagtaacattgatactaaatttggaaccagggcctctagtgcaatccatcaccaaaagattgatgttagaggactaacgaaagtcggcagatgactcccattcgtggactagtgggtataggtttcaacattgtgaagccttccattgacatattcaaattggtttaactcaatctggtttaagttacttggttcagcaacttccaaaccagttgttgaccttttagaccagtttttaaagttttctggcgtgcctttttacttttttcagtcaagtgacaatctatactgacttttttgggtagattgattatttggacaagtgaattaatatctactcatgaatttaactaaattacttgatttgaaatgtatattaagtcctctaattggctttagagaaaagaaaatgaatgtattgctagtagcattatgatccagaatgggttgacgctagattttcgaaataaattaaaaattgtaattatataaatgtgaaataattatactatttaagagtctattattttttatttaagagtattactaaaattttaataatttagaatttctacttttctcaatatttctactattattaaaattagtctctcattcttattagaattcctaattttagtagtttattattttttattttaattttatttaggaaagattgtttaaaaatattataaaaagtttgtaattttacttattggagaatttaagtattcaataatattttcagaattttttggttttctggttgtgtgatgtaattaaacccttaagtgtgatagttaagatttcttaaataagacatttaagaaatcctaagtgatacttaagatttcttaaataggatgtttaagaaaccctaggtaatgtctagcttttttatccccaaattcgtaattgtacaaatcaaccatatttgtcgtaaattagttggtatcagagataaaagaatcctaacaaccaaagtttcaaaaccctatacccaaatagttttcaacctatctgaaaaaagaaatgtcaaaagaaagaaccttaaagtgtcaatagaatttcctaaatcttccattgaatgaagatgatgactcaacaacaaaagaccaaacatttggaaccatctaatctttagtaagtcaaaagcatccacattctttaccctatcagaagtctttttgttcctctctttccacataacccaaaagatagtgtggtattagctctgcatgttttctccttcctccaatacccttccacaccctaatttcatttttcacataccttgtagtcacccaacttatgcctagtagagtataaaccatagtctatagcttgtactgcaggacatcagagcagaacatggttgactcttcagccctcttgcaaagatgacaggtgttcaccaaaatattattctggctctttaatttattaattttcagaatacattgcctattagcctcctatgctaaaaacggtagatgaggtggggctcttgtcttctaaatctgtctaaatgggaaagtaaagctattttccatcatgcttgaacaactgcttatagacggacctaactgtgaaagacgcacttgtagtaggacgccataagggaatatcattactcccatccaaattcacaatggatagagtgcttagcaacttcacattttcacgaatctcctagttattcaagtttctcatcacaaaaacctgtcattctttctccactcctccaacctctaaaaatgagtcataaatctatggatactgctctctgagagtaccaccctccaaccactagtcttcccaagtctgatctatcccccttactaataaccttgcacctgatgttcacttgacaacaaagttccacttttcaaattcttcttattttgacatttcaaaactcgaggtcaaatttttaatgagtaaaatgatgcagaataagaagatcctaacttgtatatgaagatgttcatgcaattgtaatatccatttagaaattattacctgtaggcttattgtgatggcatgtgtttattatttcctattagttacgatcctgtttagctattctttattataagttattcaaatagttagtttattttcctatatagtagattttctagattgatttaagaatttctattctcattatattttgtacctgtaaatagggtaaattcgtttttgttatttggtaactatatatatgattattgtgtaaacattgagttattgatttggttattgagatttgagatatctatttttatattttttctaagtattacattcaagctctctttgccctacacaggacatccaaatcctctagggcccacccagccgcatggctgaaatgggatattggttcttccgaggctttaatttttacccttatgtttctagtgtcattttttctatataatgttgtagcttccactctaacatggtttttatacttttggaaagaaacttctttcctagatgaaatgtttttaattcaggtatatctcacaaaattacctcggttaaaaggaagaaagaagtaacctacttccatttagattgttggacttaaattaactcttaactaatctgataggtattattttagaccacaatagttttgtggttattcacataaaaaattggaaaaaaaaaaatcatacttctccaggattttatggcacaatgaagactgatgagttttatctgaaaaaacaaaaatgaaggaaccaggacagcaggagtgaggagacatcagatagacacagagagaagaggaaagatctttatgtggcccaaagactagtttaataattttttagaaggcttttcgtttggcaaacaaaaattctagggttgtttttctttagtttcatcattgtcctgttccttctaattgaacttatttgctttctctgcaggaagctcattcccgctttccttttattt

SEQ ID NO: 8742 - DNA, 3444 bp, Carica papaya
  Intron number 1 from transcript evm.model.supercontig_18.2 30 (locus evm.TU.supercontig_18.230) derived from phytozom e v7.0 (chr-ID supercontig_18; pos 2534689 to 2538132)
gaaaagaccgttcaatctgaagcagttgaccctaagtgagttccattttacgctttttgacatatatttgcatttatgtttgttcgggcttatatatgtattttgtatgaatgtatttttcggtttattattttgtttcctgctggtggcgcggttgtgaatgcggaggatcctcttgcccttgttgtgaattcggaggatcctatttctcttgaagggctttctccgtgtatttcctgcgtataagaaagacattgtctatccgagtgtgttgagttgtaagcgggagttttagaatgaccaagttttccggtgatatcgacttttgaaagcaaaattttactaggtgaaagtgggttaaatattagaattaggggggcaatggcaaccttgtgatttatcattccgttagcctagagtgaatttgactacttacagatttggtgataaaaatgtagacatttaacttgaggctttttagacgtagtcttaagcatcagacttaatggtttgattgcatcaaacaacaagtttgagaaattctgagagtattttattgagtaactgaattatatctaaaagtgagattatgaagatattttctaggcaacctttattaagtgtgattgaactaagaaatagtaatactaatagaatcagaaaatctttgtccttatcattctcgttaatgccaaaaaatttgggaacataatcatttagaaatgtgaaatcctggcaggaaggtttgatcaatatattggccaattggtttgtcaagtttatccttacgtggtacttccgtagagttgtcttttggagaaaaatcttgagcaataggaacacgtggtggtttttcttgctctttgacttttgggtctaaggatatgcactctacacagtcgaaagagaggtatttacttgtccactaggaggtaaaccgtcattattataggataaccaccatcttttcctttcatcttcacttttatttcattccaacatgcaagttattcttctttggccatttgtaacccatgtctacgtgtacaactaaaacagacaatttccgtagctttagaaggagtcttgaaattgacattgaccattcttgaacacaccttctgatccaaaggtatatttaggagtggattccctgacctgaaactcaaatgtttttggaagtggattttctaatattcttccatgtcaatggcagcattgtaagtttgtgctatggttacaggaggtgttgagttaactcttttttcatatcagttgttaatcctcccttgatttgggatgcatattgactatcttcttccattaactgactccgaatctttaattattcaaatagcagctcttaattaacacgttgccttgaattaaaatggtaagactgaagtttgtcaaagtagtttggaggtaaatcccattttagattgctatttgtctctttgttatattctcaataatgttgtatcatcataactttgtgcgtccaaccaaatttatttttgcaaatctgacccttcattcatatggtatgtcatacaaattaaagtattttttcatatagttaagctactcgaggaagaagtcgggatctctttgtccattaaactcagaagctatgatattttccttcttggtaatatttttagcattaccttcaattgtcttctgtcagtggcttgggcaacttttgaattttggattggtagcgttacttgtgcaattcgtaggtatcctgttcttcctaaattgtatatgatggtgttttgcattgtctccaattgtgctgctaagaaactgagctgtgggtttctttgaatgagtgttcgactagaatacttcagatcaagcaagcgttactcatggctgggcatgtgtgtagctcatgcaccatctttttgtcactagatgaccgcaggcttttgttgaatgacttatcattttttgatagagttttgcagcaaggcttctggtttgcctgttaaagtgttctaaaactggtgttggcggctatgttgataaactcccactggtgactgtgatctagaacggtgacaagtagactaggtcatggtttgtagatttttggttgtctttctttttgcaattttctatgtgtttttcttccatatggttcggggttgtttagatatagggttttgagattttgaatttagtatttttttaagcttacattccatctgacgtaggacagaatagggttaatttcctagttaggaatttgaggataaaaatttaaatatcattcattgggtttcttggacatcacatttaaaaagtcttaaatatcatatttaataatttgattgcatcacacaactagaaatttgagaagatctcagagcatttttgaataactgaatacgtatcagaaagtgagattcaaaatatctttataatgtttccttagtaatctctattaaatatggttaaaccaagaaataacagtattaatagtgttggaaaataataagtgtaatacaaataggaaaactaaatactaatatgtttaaaatcctgaagtttctagaattataataatagactcctaggtagtataatagttttatagctaatagaattacgatctctgatctatttaggcaatctagagttactccattatacatcaggaaagttccaggtgttaagctcggtctggcctgtaaaggatgccctggtgcaagcaaaaaatgcccactggtagcatatctttatacaagggtgtctcatgagtttgcaagagacgaacatgcacacacacgtgcaatttggttttttggggcttggagtaggtttaggagttgattgcaatacagttggggttctctcttagttcagtgaggcttattagtcctcccagtgtcttttcagatttgatgctttaaaacccatggcacgagtgaacttgatgctgtaattcacccatctaatatcttcttttaaaacctgggaactcgagaattaaacttgataaaacgtaatagcttgtcctaatatgagtactttatttcttcagataaataatgacagcttgcatctatataaattcttctagttcttatctcaaaaaaaaaaaaaaaattcttctaattcatagaatattctccaaccaagatacaaagcttagtttctatgtttttgttcatacttctaattgctactctgcatagcgatttgattgtgatatataaaaaaatatagtacgaggttgtttgccatttgttttctcatacttttactgctacttttcataaaacaattaatttgtgatttggaaaagaatagatcttttgatctttttcaggggaatttgttttagtaatttgttactataaacttgttcatgtattaaatgtctgtctatcttcagtgcacaggattggaaggctaggctaaagataccac

SEQ ID NO: 8743 - DNA, 3526 bp, Carica papaya
  Intron number 1 from transcript evm.model.supercontig_60.9 4 (locus evm.TU.supercontig_60.94) derived from phytozome v7.0 (chr-ID supercontig_60; pos 1460299 to 1463824)
gtccttaagggttctttctttgcgtaattgcaaaggtaaagcctttttatataaaaaaaaattttcgaccttttcatcttctcgtggaatttgttttttgaaatattttttacagtgaaaaatgatgtaaattgggttgagcattgatgtagaatgtcaattagtttgtgtgatgggtttaagcgctcggaagtcctctggtttttgactagtgcacattgttgttagaatttcttcttcttcttcactctgttcttagaagggggagcagagtgaagcaatagaaacaaacggaacataaggggataaaagtgtttttactttggttgattgggaggagaaaagaaaattactactctctaatagaaacttccctccattcccctcttttccattactcaaacatctcccaaacaaagtgaattactttatttggatcattagaagtttttgttaaaggaaaaacctttatagtctttacattaggaaattctacggttcctcaaccctcatgcttatgaatttgctactttgtaatttaatcaatttgtaaatcagtgtagtaatcatctaagatataaattgaaaaggtgttacaaaaaattactgaattagtactaaatgttaggaaattattgcgagacacgacacccgttatgtactggcttctcaatttgcaggctctttttgttgtttttagtgaaatatgatctgggaaatttttagtgggggccaatgtgagatttttcctggttccttctttgtaattatttagtaggacttggtccttcaaggccaatactctggtctttttgatttttgttgtttttctttttctttttcttttccatgcttgcttcaactgaagataatttgaagaaaagttttcgggagaagtgtcttattacagttgtgaacctttatgtgtttatttggctgtttgtatagatgaataggaatgcttttttatttcctctctttcttctgtgagagaatgcatctaaaagtcagttctcttgtatgtctaggcaaaatgcaatggtgattttttttttctgggagaagatatgagatatattttcacagaatgtacatatattttgtatcatctcatggccattgctaacttcaagatggcatttatttgtttgaagatgttcaatgtctgcagctgcatgtggatgatttttgaactctatttggttctgtttgttggttgaacatgattctaatgtgctgtaccacttgcaaactgggttggcaaggttgaagtaattgaacttcaatcctttgttgttgtaatggtgagcttgttaattttgagggacttaagatctaatagttttcaccacagctttatttttctgttatttatttgttctgataatggtcttttctagggagtttacttccttaattaaactaaaacctggaactagcctggtttgtttaacatttactttctgctaccccatgttgtgtgtggtgcagaatgtcctgctctgactgaaggctgttttgaggaacttctctcgcttaactgttattatcttttagagtcctaccagaacatatacttaagtttttgggtctctaggttgtcctttttagtggtttaaataatggtctatattctatcccaaagattcattgatggaaagctgtgcccatgtgcgcatgacatctaagatgactgaggaatttttttgtttactgttctggcatcttgtactgcgttacgagattaaatttttatcctcttttcatgcacttccattttctctctgggtaggattagttgactgctgagcacattatttaaccgcaaggagggagagtctttgatggacttggcctgaggaaaaaccccaaatccccaacaaaaggtttcctgatatggcctctgcttctagtcgagctaaagattctccccgttggtgtctaaagaccctattatctcagtctgtatttccttggatggtgctccaactggaaaagtactccttttccagttgtagctgctggaattgccaaaaaagtctgctcctactatttaagtatttgttcttaatttgaaagatagaacctttctccctgctactcaagaagcttattcctggtttgtgtatcacaaataagaaaatgttggctaaatcaacctgaaccattagtagggctggcaggaccagtagatcacaagttgtctcactgtttgctccttcctaattcaatgtcaaaacgaatgaaagatccaatttgaatttgatttcagtcttagtttccatgtggttgatcatccttggcagaccagcattccacaatttatggtgggtgaagatctatagtatttttctttggtaccatggtggcatgagcactccccttttggtaaggaatggcattagatcacgttagcactatcttatcgcacaagataaccaaccactgtttaccttaccatttaataacacctttttttcccctaaaaattccttagattagtctgagatagcatggttagcccttatagctaaatagttatagcttagagtagtgaacccttgaaacctttatagtatagccatttattgaggaactgctcgcgtgatcgccaaaggctttgttggtagatctatagcctggttctctagaactcttgagaataagattccttagtcaatcagaggcttagactatgatgtagtttatccaagaaccaagagctagatggggataacactatactatatcatacaggataggcagcaattcatcttcggtagcaatggctaagcaaaggcttctatggctccaaggtagtagacttggtgcacatgagatgttcagcctttagatcttctctctggactgaggctaaggttctcttccctcatctcagtcttaggtttatcgcagatgacaaggtcatgcctgttataaatgtgaagtaataaataaaggacctggtgtcaacccctcaccaacaatggcctatgttacaagaaccaatgctaccaacaccatcaactcccatcactgaaatgatgcgtgctgctgattatgcagctattgattgaaatgcaccttctgagttgaatgctggtatggctgaggcattcggtgctccaatttttttgttctttgcttttttatactaacccagccaccaagaagctttctaatgagaggactgtggaaaatccagttctttttcaagtgacaacaatatctttttgtaattgaatacataaatgagaaagctatttgaatatatggatgtttataaatttctggttttaaggcttaaacaatcctaactttgctagtaatgtaattcaatatgggattgtagttgtaacttgcccccatcaaaataataatacactggaaatagtctcccacatgttctttccccgccttatttttttttcaaaaaaaaaaaaaaaaaaacttgtatgctgaagtagctgggtttgcttggtttattgatattttcttccctgcaacaggtattacagattctgga

SEQ ID NO: 8744 - DNA, 2540 bp, Carica papaya
  Intron number 1 from transcript evm.model.supercontig_23.1 0 (locus evm.TU.supercontig_23.10) derived from phytozome v7.0 (chr-ID supercontig_23; pos 88032 to 90571)
gtctcgaggagataaaaaacgaatccgttgatctggtaatataaatatatctccccctcatcatctctctgtgtatttccctttcgtttttcgctttttgttttcgtggttttgaatttaggttgcgtctgtgatgcatcacatatatatatatatatatatacgtgtacttgctgtttggttactgagaatacgagaggcataggagaggataatgcgaagtagattctgcgagaagaaagtttgtttttcgttttttctcctgtaactttacagtcctcccctggtttttctttttggttttccgtacgttttctcctcaaacaaacagaaatcgggttttgtttcaaactttttctgtttaaactggccactgcgaaaacagaaagctcttcgttccttttcgactttataagtaaagtaatctactaatgtaacgccttaattaataactttttttctcttttactttttccccctatcagttgtgagttgattgacctaaatctcaaccttcttctcttttatacgtatctactcaaatctttctggtcgagtattctttacgtcttgtgatttcgccgacgatccagcaaataaacaaaaaaaaaaaaaaaaaaaaaaactcaaacagtgggcccaggtttgatttttctttcggtaaaaaaaattatatccaattattacgcatcttttcttaatacgcagtagattaaaagtatttgctttctataacagttttatttaaacaaaatcataatccacgggtatatacatatatagagctttcttcttcttcttcttcttcttcttcttcttcctccgtttgaagggatttgtaaagagtaaaagaaactgtggggctgataatgccacgcaacatcaaaacaacgtgggtgacgggcgaatcagatgccgagaatcgtaacagaccaatttaccatcaactgacaggagctttatggacatgacatcccacgcccacgccccccagcccaacccttctctcctttgctatgcacgcgctgcaaagaagcgcgtgtcaatccgggaatatatgtttttaaatccacaaattaaatttcctctcggcatatattcttgatttcttattccccttctttctttgggcacgttaactggattaaaaggatcagttgctgatttgatatttttgttagtgttgctgcgacgttcgcttctttttcctatttccctctaccggttcgttcagtgtagggagaggagtacctccgtggtgtacaaaagtaatttctatttcatgtgtataaacaggaagaatttaagctaatcactccctcacctacttacctttttcttgttgagcctgtacctacttaactttctaaggtacatatagggtgaattttaaaggtaaattttttttgagaaacttatagttgttggttagggggatggatttccattctatttgttttacttttgggaacctattcgttgtttaatttttcatccaagatgtggttaatattaatataagtaataataaattctatagaaaaaaatcgtctaagccatcataagaattaaaaccaggatataaaacaataaattttatcttaatcaaattattagtatttctactctttttataaagatgtaaattcaaattttaaattgtacgtggcttgtcgtagaacgttattttttaaaaaaaaaaacctattatataaaggcgcacccgtggaatagccgctcgttaccggtcaggcggtaattgaaggctgggatatgcggtgctcggatatatgttggaaatttcctgtttgttattcagaattttaaaatattgtctttaaatattttgtagtagtttagttacctattattattaatcactataaaattgtatcataatctagtggcagcataaatgtttttactgattaaatcacctgtggggagtcccgtgcaagggaggtcacattgaaaacagtcttttgactttttcctgaccaaatatttaatctaacattttctggtgagtagaagtcagagatggagttcccatgtttgacttgcgggctgtctcttaatgacgcttcccttagttgtccttttgtaaatcttctcgtgactgtggaaaagccttacagttaccgttggaattcactgtcaaattgtggggctctagtattaacaagctccaaatagagttgacaattttagttgtgttcgaagaaaaggaagtgtaggcattttaattttcttttgtaacatgaaactagcaaagtgattgtagtactcacgagaatgatgtttaaaacgtcatattagcggaattgtgtttcaagtttttttttcctaatcaggatcaatgaagtttcaattgatttatagcagataacccaaaaaaaattcttccagacatgaagaattaacccgttttattatttttagttgatgactattaatctttaaaggctttatgctttctgactctatcctggagtttttctgcaggagcgggttcctattgaggaggtattcgagcaact

SEQ ID NO: 8745 - DNA, 503 bp, Carica papaya
  Intron number 2 from transcript evm.model.supercontig_18.5 2 (locus evm.TU.supercontig_18.52) derived from phytozome v7.0 (chr-ID supercontig_18; pos 376353 to 376855 reverse strand)
aattttccgagggtgaagatcgcattttgtaagttcaagaaacataataaactacaatttctagtgataaagaaaattttggttagaaaactcatgttcaaagactcacattgtcttccattaatatcaaccaatattcaaatgagaagcgaaggtgttagcaattcattgagaatggaaactcattctgttgagggaaatatcaaggataaagaaaaatcaaactgagaaatgatatagaaggatgctacaaggctgaaaatctcatcccagttttttttttcctaatttactttcctttgttcgtagttgcacaattacttaaaatttaataagtttgaggtatagatacaaattcttctctgtatatttagagtaaaagaggcattttctagctgcagcagatgtctattcttttattttaaagttgacctactgttatctttatcaaactgtgattagcgataattcatgcatttcttttctcttttgaattttctagg

SEQ ID NO: 8746 - DNA, 2061 bp, Carica papaya
  Intron number 1 from transcript evm.model.supercontig_0.12 5 (locus evm.TU.supercontig_0.125) derived from phytozome v7.0 (chr-ID supercontig_0; pos 3819562 to 3821622 reverse strand)
caggtatctatattgatccttttcttttgaacgatttgaaacagataaacgcttgattatttaaattctccctaaagaaaataagattattgggctctgatgtttgcttcttttccacatggcattcttttttattcagaacgcaacttataggacaacgtttaattcaaggaactggagatttcaaccctttattttaaccgttcaatttcttttgattgcctaaatagttcttctttcaaggattaataaactgataaattgttcctattgctgcgtttcgattttcctttagaagtttacacctcttccgcgttttttctttcttcctagtccgtctttgcctgatttccgtcaatatctttgtcaaaaggaatatacatataaatccccccacgctgtagtctattccgtcgccataaattgaaaggaagctatgccatagccatgctcactttttctcggtattccatgcttcgtcgcaagaagtaattttgatttttgtgcatgacatctgcgtggggcaaaggagtgggtcagatagagaatgaaaaagggtgaaagagagaagagagagtcaaagagaagagggcagggcagggcaggggggaaagagaaattttggatggtgaaagatggaaactggaaaggggaagaacgaatattcattattgtttactacgagaattcaataaattttaaattttaggtctaagaaaattcaataaatggtttcttctaggtaagatgatggcatcttttatttttgaggtacctaatttgtaatgcctatctgagggagtccactactctgcttcgatggactaaaaacagctgagaaaaagaatctcgaggaaagtgaaatctttatgcatcaactaagggtctgcttattttagcaatataagtggaagttttattattatgtaatttttattatccactgacatttcaagttatgactcaatctatatatacaggtttgtcctgtcccatatatttttcctcaaatcatcctttgcaaaaccagctaccatttattaattcatatagaatctagatgagtgtctcttagagatccttatacggtagtgaggaatggtgttcttttctgtttttctgttttccttcaatctttgctgttgttcccaagaaatgtggatgagagggagagagaatagaaatgaaattgaacctaaagcaataaagcacttaatttgtacattaagggtatttttgtcgccgtgtactccctacatatgctttgtgtgtgtgaacttattttgtggaagcttttatggtaatagtgattagaaagtcctgatttaagacagaaaagatttaggtctcaagaaggtgcaaattagaagtagagtttccactttgagacattgaaagtgtacagtgtttttgatcgcaaatgataaattccaaattcacaatctaatagtaattttatcgtgtgtctgtggacagacggacagacagacagcagataatgtagttttctattgggtggagttcaaatattttatcgaatctgtaaacttgtcatatctaagtttggtttactagttcacttgagaaagttgagtttatggacaaagtctaaggtccataacttgtgctaaatgattctctctgtggatgccatattcacttgggagctatctggattctgattttgtatcaaggttgaagaggggcatgttcacacatgtatactacacatatatgtccaggaatgtctctcactttgggtcatatttgaaagaatactagtggttactgtctgtagtctcaaaaatgttttggcattcacatgcatgcaacacatggacataggtggtagttgcatttctatatttatagcagttatgctattctgttggtacttgaaatttatagattgtatggaagatgtcaagcatttgccttttttatgtataactcctgtctgttctgattcttctggatttaatttgttctatttgagttgcttttccttcatgaagtgttatggaatgtgttgattgatggttaatttttttttgtttttag

SEQ ID NO: 8747 - DNA, 1583 bp, Carica papaya
  Intron number 6 from transcript evm.model.supercontig_24.5 4 (locus evm.TU.supercontig_24.54) derived from phytozome v7.0 (chr-ID supercontig_24; pos 1055540 to 1057122 revers e strand)
aagaggtctcgcagtaagtattgatatctttactatttcgcatccatgtgctaaatttttataactatggagtattttatttcttttgtttcatggacatttggagatttctacaatccttcgataaaatttttttccattctggttatagtaactcaatgaaagttgttattgtaatagttataggtgatatggcttcttgtgtaattaaactacatttggcacctgagcatagtgggtagggccatggaaggtagcaagctagggtaggataagtaccaacgagtgagattcttatcctaaggaaatgagtaaggtagtacaacgtatctttttattaactgttgtggtagtagtagtggttgttacgacagtaatagtggtgccaatattgatgatgattgctgcaacgaccatttttgtaattaagctttactttaattaaaaaaaaagtaatattttaatttttgttacatattattcactttgaaaaaattataaaatttcgtgcaaatagttctagaaacctcttaattattgacattataataaaatttttctttatacccaatctcagacatactatatatatttaaattagtctaaaacctactgaaattattttacagttttcttatcatcccgatttatgatccgtgacccagtcttgaatcaggattataacttctttagtcatcacaattataaaatgctcctaatacaactcatagacactatattgaatctgtatcacatagtggttatcatattcttgacatgattcctgccttaaacagtgaaccaaatgtgccacaaactaagatatatgagttgtggtttattcttgtaattttgggttttcttctattttgtctgtaaaggaaaattcttggtagttatcggttttcttccctgatatgatatttcagttttgtagtcatcaaaaaatatgtaggtggtttcttggaataggcacatggccaatgacatgttaaacaatgctctgtttttttctctaccttaacatactatgtgggctttttctttgtaagatcatctaaattttagttttatttttgagaaaacaagaatactatttttctttctcctaaacgaacaagacatttgttgttaatgattcaaccatgcccgatgaagaacttattctgaagaagaggacctctattaataaagaatttataagaaattatatgactggtttagattttgtagtatttgactagatggcagaacattatttaatagaataataaattattattcgagttttttacattttcatgatacttgacaggatggtagcatattgaaaaataaatttttattcactaggtacctaggaggtgccaccaatccacattaaatataaatttaaatacaaaaattcatctgcatctgacattcctcttaatttgaaaaagattgattcttagatgtggggtactcaaccatgtttaaccctgtgtaaaggggttacatccccaaaaggctagatgaagttttaatccttgttggtaacttatgatccttttcacgttgtaatcttttaattacttttccag

SEQ ID NO: 8748 - DNA, 2417 bp, Carica papaya
  Intron number 1 from transcript evm.model.supercontig_586. 2 (locus evm.TU.supercontig_586.2) derived from phytozome v7.0 (chr-ID supercontig_586; pos 13314 to 15730)
attggaggatttctgattttgagttgggcacaaaggtttgcttcttgttctcatctgttgtcttttcattgttcatttgattgacttggttgagaaaatttgatatctctttctgattttgagggagtatgatttgattggagtagttggtgatactggtgaagggttttgattaatattgagtctggtatcattttcacaataggaattgcctttttatgtttattcacttatctcctttgcattttgttacttaagattttcacttggttttcatttttccctttctgttttaccaataggctagcttaatagatcagagagtttactcttttattaagtgagattcaagtagtgctatagaactctgggtagatgcattttaagctgctaattttcaagttgatgatgaataatatatatatatatatatatgtatgtatatatatgtgcttacacagcctgatttgtggaactaaccaccctgtttattctatacgtattttttcagtatcaaaagctatagtctgctcaatattatgaagtgacatttggtgaatatagattccccttttctttttcatgagttgtagatcatgagtgtaggttaatggaactgctataacctcacgagctaaaaggaaaaaaaaaaggagacgggcagaaacctgtatgctaattggaaacatgataaaaaaaatactacagaaatctatagttctgttttaactaaagttactataattatactctcaaaatcattggactcagcaagaacaaatcttgagattagctttaaaagaatgtaatagtaataatattacaagtcgtgacatagtatcgaacaaaatcaacaaagaatattcttctataaataacaaaatctgctttttcttatttatctgcatggtcaccaatagtttacgaaaatcagtctctcatattttcaatatcattttcatttataggtcatggaattgaaatagccagcattttggtcatccatcttttattcaagttccagtctaattaacctcaaaatatagcgcctataatttgcactcagttggaacgtgcccatcattttacccttctattactacaccacttagttggcattttaccacttctatttcataagcagcctgacataagagatttaggagttcgttatctgattaggtgtgtattcaagttcacatctacagattccattcaccaatctacagtaataaacctctcaagaaatggattagttttaagttgctcaatctcaaagatattgatatctatagaactttggcatgggaaaaagttaatggtaatagactattttgtttggaattaggtgccagtatccaagtatgatataggtctcagagtctgacacaaaagttcttttaatcaaatgtatgggaattcagtcaatctttcgagtcgtgtccaacacgggtacaacatcaaaattaaaaagagtccaagcaactttgggtaatagataattagtggctatcgacattgttatgttgacaaggaatattgttttacagttttaattatggaaacctgagttctcatcactcaaattttcatgttttcgttgtgcagcataagtatatgatcctccttggtattatgatatctaacgtgtccttttcctttacatgtgtgtgtgtattgcaattcacaccatgtgatttatttgttgataatttagtctgttgtttcggtttttgttattttacgtaaaattcttagttttttttttctttacacttgtttaagtttctaaatatgaatacaagagttcaggctaaacaaattaaaattagggaaaaagaactaaaaagttataagatgatagctcaaaaggactaacaattttacgcaaaataacaaaaaacaaaaccatagggttgaaattgttacaaaaagtgcaagatatgacttgtgaattgcaataagaccaaatcactggggtgaatatgtacctaacccatccaatatattttcaccttttacatagcatgatagattgtcttttgtggctgaaatattctcttatgtagcataggtgtggagttcattttctttcctgccttcggttgttttctttccttttacatgctttttatataatatttcagttgcagtagtttgtttggggaaactacataaaatgacatggttaatttatggaagggaaaggaaaagttggtgttaaagctagtgaggccatggtttatagagagagtagctagagaaacagcaagaggggtgatagttgtatctgccctggcatgtggttgttctatgtgattcccaactatcccaaataggcaacacgagaagagaaccaaaaaacacagggaggtttgtccttgtattgatatgcgttttatgcgtattgcagttca

SEQ ID NO: 8749 - DNA, 7394 bp, Carica papaya
  Intron number 4 from transcript evm.model.supercontig_58.7 3 (locus evm.TU.supercontig_58.73) derived from phytozome v7.0 (chr-ID supercontig_58; pos 736074 to 743467 reverse strand)
ccacttatcattgtgcagtcatcgacgagatccaggcaagtgtcttatttcataaagtacattacaccattttttgtaagtttataggaactactgtcgtttattaaatgtgatttttatgtttggtagaaatatgaaattactgatacctttgaagtattatctcatttattactaccttgaaatggaaatttgcactcttttcataagcttagcataattaaaattttaacctggtactgagctttctgcaatgatttgcccaaagccatataaattttatagaagctaaaaatgataacagtgtgaagtagttaatctacttgagttagtcctgggggtaaaaattcgataactggtccaaaccatattactaaactgttccgagttgatatttttggttttagtttgaaattttagaaaatctcagtttatattagaatatttaaactttaattaagattcccttaatgttaggttgtgtacttgaattcattttaaaaatttaatattgattgatgaattttaatttatagattatgaatgtttaaaaaatatttgatttattattataaataaaatatgacaaaactgatatatatttgttaaatttaactttattttttaattagtttgatttagttagttgatggttaactgcaaaaaatgtggttcaattgcagtttggcatatggtcaaactacaaggttcagtttgtagtttttgcagaaagagtggttaacaaaaccatgcacacacctaactagtgaatatatttttttttctcttctttcacttgagttttacaagttacaactatagggctgcagaaagaattgctttttctcttattaagatctacgtcccccttattttttatttgatttttgtaggagtggagtagaaaatttgcctcatcagccttttgctagtcaataacgcaagataccctgagaagatgcattgtcactgatttttgctctcaaatatgtctgtgggtggatccttaatcggcttgaaataaactactggcattcctgaaaattttttagtgtccccttaaaaaatcatgcttagtctcgtagacctgtgattttgtactcccaggaggaattatctgcatgaagttcaactggggcttgaggcatcaatgatatgaattcattatcttagtcttttttgttttgcaattagttattcattttgatggaaaaacttcatgctctagccttaatcgtactcatattgtacaaaagcgaactgtttagggtttataacaacatgcaagagggggaaacaaaaatggttgactattaggacccttaccctgtctagctgtcggctgttcaggctgtttcaatctccaggcatgctggaggttacacactcccttttccgccattgtagcctataaataggcatgagttgagatgaataaaggcatcgaattaatcattgcctccaagtgaatgctctttctctctcttgtttgatttttcctcttctttctctttgttttccttagttagagccttgagtaaggctttttgataagatggtatcatagccatcggagtgaccgaaattatgcattggttgcctcatgcactaggtccaaaggaaaggttgtggtggcagatcccaaaaaagtagtggttgtttgaaatcacaatagaggatgttgactagtgcttgattgattgtatgatgaaagtttgtgagatgtagtggcaatttggaaaacaactaaatgtgattgtggagatgctttacgacaggtcccccttcagtaacgcaccgaaaccctcagcatgtgatgcttttgggagaagatgaattctttcctcttagcttctatgtgagcaggttgaaaggagaactttcaacccggataaaacaacaggactaaaacagatctgaggctttgaaccgaatcggttcacttgctcctttgaacggaaccagttcaggtggaaattccattacttgaaggagttaaaccctgcgcatggataaggagatgcaatcggtattttttggtgtacaacatcctcgatgagtaaaaagtggaagtgacatccctcttcttagaagttgtagatgtgtggtactaaaggtagttgacgaaaaataatgagctagagtgataatatttcatggaggagttttgccgaagatttggaggctcttcgagaaagaattttacagaagaatttaataaattgacacaaactagaattaatctagaatatgaagaatgtttcaggcatttgcgtgccttaatgaacatagacaattccactgtctcggataaattttttatcatcaatttcaacagtggtctccaactgatactgcaaccaatgataagattgctcagaccccgcacacttaacgaagcctttgagtaagctctttttcaagagcaatctataattgaaatgcccaaaattttatatttcactgaaaagatttcctactcatttgaacgtatgaggatgatgacaatccgtatctccaaatgtgcttccaaatacatggggtgagaaacagagattaagaaatcaacgacattatgctacaaaagtggtgcgtgttatatcccaggttactgttgccaaaataaaatcatgatggcagtagtggaagtcttcaaccaagaagacatggtggaaaaagtgctcgacgaggaggccatcgatgaagaagaaaatccaatagatatcttatccatatagacaataggagtcactccaggcagcatccttaaaatcagaggaacactagccagccatgatgtgttggtcttgttggacagtggaaatttatactcattcttggataaaggtgttgccataagaattaaaagtcaagttggcagcaataaactacttatgttgatggaagcaaatggataacgaattgctagcattattgaatgcccaaaggttacttggataatgtgaggatacaagtttgattacaactttcgtgtaattcaacttggcggttatgacatgatactgggagttgactggatgaaacaatttggctccttaatatttgattttttccaagccaccatcaagttccattatagcaactaagtcatagtactttcaagggagtgacactagtggaaatcatctaccaacatgaaagagaccacttccatgcaatgaggaaagcaagaatatagtatggaaggagggaccgtttttctggtcatggagattggcctagaaacccgagccactataaaccacatggggaccttagagtccttattggactaatataaggatgtgttcaaggagtctcgaggattgcctacacttaaggaattcgaccatgccatatcattaatcaaagaagatgcaacatttaacatatgtccttataggtactctttcgtctagaagaatgaaatataaaagcaggtagagaagatgctacaggaatcaatcactcacctagttttagtccattctcatcaccagttttgctggtaaagaaaaggatggaatatggagattttatatagattacaggaaactcaactcactgactatgaaagataaattctctatttcagttattgatgatttacttgatgagttatatggtgcttctatttcttccaagcttgatcttggagtaaggtgtcactagattcgtgttaagaaagaagatactcacaaacaggccttcagtcacattagggccattattaattcaagatgaatcctttcagtctcactaataccccaaccacttttcaggttctcatgaattatatctttaaagatttcctttgaaaatttgtcattgtcttcttcaatgacatccttatctacagttttagcagacaaaagcacttcgttcaacttgaaaaaatacttaagatattgtgaagaaacaaattttacgcaaaaaaaatccaaatgctacttcctacaaactaaagtagaatatttgagacatgttatctctcaacaaagggtacaaacagaatcaaaataaattgaagtcatgatcaattggtcatctccataaactctcaaagcttgcaagggattataggcttaataggctactatcgcaaattcataaagtaatacgagatcattgcttaacctcttatagacttgtcgaagaaaggggcattccagtggaaccccactaccaaacaagctttccaataattaaaaagagcaataacttctagccccatattgggactcccaaaatttggtgacccattcatcatagtatatgtcagacaagggaatcggagcagtcttgatacaagaaggtgaatcgatagcctttataagtaaggccttgagttttagaaaccaaaccaaattcgtggctgtttaatatgcggttttctagtggcgctattatttggaaggagtttcattcatcattcgcatcgattactgcacctcaaatatttattggatcagaaagtgtctttgatgatccaataaaaagacattatgaaattactggattcaatttcatcatttaatataaacaaggtttgaccaacgtagtcccggatgccttgtgcataagtgaacatgaagattccactgcaaagattctctacacagtcactgttactacccctgcttggatgtgtgaggtgtccaaaagctaccctagtgactctttcatgcaacaactaatcacagagctcatgatatctttgcaaagcaagctgccatttcatatttctaacatacccctgtgatacgaaggaagactggtcataggcaacaatgaaggactacgacaccaaatcctttatcaatacaacaactcatccataggagatcactcaagtatcgaggccgtttatgaacgagtcaagcaacatttctgttggcccaatataaagaaacagattacttagtaggtataacaatgtgacacttaacaacattgctgagttgaaaaatttttcattttgggatcttacaaccactacccatactgatgcggaaccaaagatcaaccagcgtaattaggaactcacataatttcattcaagacaccaaaggaatttgatcatatgaaaatccttccaacttaatcatctatcaagaataataggaactaaaataattagaaaatgaagaattaaaagaagaatgaaaaaacgtcacaagaaattattttgataagtagatccactccttactcaataagaaggatgaagacactttttttgaataacactcacaatattattgatttcaatcttaaatccttataatgaaaacttgataacctatttataagataggtcatatgaataaaatgataataaaaattttctaattaaaattgtaattgcataagaaattaattaaaaataaaatataaattcctaactagatgcaattacataggaaattaattaaaattaaagtctaaatttctaattatgatagatatagttttctcccttttcttggtcaattactttattttcttacccattttcattatgtgcttgaagatagttgataaaaccattatacccttagattaattggctgggtaacttattttcttgggtttctttagtggatgtagacccatcttcctcattaatccaagattggataaagagttggaaagcttgtcgtaatccttgggtctaactccttgttatgggcccacttggcatgataatttctctttcatgtggcccaagatgatccatgctcacattacatacattctcaagtatggactcaaatattaattgattttattgaaacaactgccagatccgagaagaaacacactagtatggtggtagtggatcggttcactaagcatagatatttcattattttacaccatccctttgcggcttaggaatagcttgcctttatataaagactattcacaagtttcatggagtaccataagtcatagtatctgatatggacaccttattcactagcctttttttgaaagaactaatgagagcaataggaactagtcttgattttagtattgcctatcaccctcaaacagatggctagatagagcaactcaattaatgtctagaaatgcatctctgatgtgtgacccatagccagtcaaaaacacgggtaaaatggttatctgctgtttaagtagtggtataacatggcctaccatacaagtctcgatatgaatcctttctaagcaccctacgggtatattcctccacatttcttatattttgttaacccgttacttgcttcactatcagttgaaaaaatatttggtgaatgagaaaatactaatttgatgatcaaacaacaacacttaaaggctcaatctagaaccaaacagtatgcagacaatcattgaagtgaacaaagttttaagactcaagaataagtactcctcaaacttcagtcattcaagtaagtatcaatacgacaaggtggaggctctagactatcatccagcttctatggtccctctcagataatacagaaggttggtgtggtggcttacaagcttcaacttcccccttcatcccgaatccacccagtgttccacgtgtcatcactcaagaagtacatcaaggggagagacatggtgaaagaagacttactgatgatgcaggagaaagtgtactaagtgttcaacctcaacaaatactagaacagtagtcattctacaaggaacacttcttataaaacaagttttcatacagtgggaagacactccaccagaagaatgtactttgaaagatcataaatatatctagtgacaattttcaaactcaaccttggctagaatgttgatgctcaaggggagggtattataagccaaccactgtgggtttattataggagggtaaaatgggaaaagataacactgggtaaaaaagacaaattgtacaacagtaagttagtcttttccattgtaactacatgcaagtaggagattggagaaacagaaatggttgacgatcaggatccttaccctatctagttgttggccattcaagtagttgcagcttccaggcgcacctggaggttacacgctcccttttctgccagtgtagtctgtgaataagcatgatttgagttgaataaaggcatcaaaaagcattacatctaagtgaattctctttctctcttgttgacttttcctcttccttctctctgttttcattaggttagagccttaagtaaggcgtttgacatcgcataacattttcttatgatagcattaccaatcttattatgaaatctaaagaacgttaatttacgttgtgaaacccagaattagattttggttttatttaagttattattttgcttcatgctaccaatccttcttattagttgtaatatttttctcccattcag

SEQ ID NO: 8750 - DNA, 721 bp, Carica papaya
  Intron number 2 from transcript evm.model.supercontig_82.5 0 (locus evm.TU.supercontig_82.50) derived from phytozome v7.0 (chr-ID supercontig_82; pos 811236 to 811956 reverse strand)
tattgcttgtgggcgtcgcagtgagaggtactttctgaacagtgcttaaatacatgtaaataaattcttaattttattgggttgctccctctaaattatgattaagatttaaaatggtttataaattcaaatttgtagcaaatgacttccatattttaattattgggctttagtcatagccagtagtacttagttctgaaatcagttaaagaagatttaggattattttttgcctcaatattctgggttaggaaatatagttctgaaatcagttaaagaatatttaggagttttttggcctcaatattctgggttaagggaaataattaactgttaattatctgtgacttctgccacagtttctacacttttctaatgagtacttatatttctcccttaatactgtgagcttatcacgcttttgtagagtgaatatttctggaatgagcatttatggcatcttcatgtacctagtgtgaattattttgcttttagcagaatgctcaaaccaggactattgcatgatgacctttcatgtataagcttatgaaatgctctttttccttttgatgctactaagaatagctgctattgttattagctacacatgaattggaaaggtcttatcaagctttatgtatgttgctgcttactactaatttctattgtactgattggactctgatattgttttttctagtacggtggttaaaggagtggt

SEQ ID NO: 8751 - DNA, 4527 bp, Carica papaya
  Intron number 11 from transcript evm.model.supercontig_115 .64 (locus evm.TU.supercontig_115.64) derived from phytozo me v7.0 (chr-ID supercontig_115; pos 823273 to 827799 reve rse strand)
ctggtaaacttcggatttttgtttcttttttgtttcacgtttattaactctttaacacaaatggtgcaaattgtgatatttactggagtacagtttcatgcttatgggtggacttgtagaaaaaaaattcgtacttagagaaagtttggctaggttgagagataaatgagattggttacagaaatctgatgatagggagaagtattcttagtcaaagccttcataatcttatgcaataaagtgataataaacattttcttaaacataaacaaatgatattttgtattgcagtacctgataatattcagatcacgacttatattttacttacccctaatgaaaccagattttggagatttatgtttaattcatctaataggaaaagagaaagatacaaaaatgatgacttgatctttgactttggcatttcaatagcacttttgcaaaaatgaagctgaaatatgcttttgatagatttgaatataaaagttacaatatataactttttttaaaaatagtttttgcttttaacaaaaatttgcgcttaaactctgataagttattttcactaaatatagtttcttttaaagtgacagcaattttaagatacttctatcaaacagcaaataacttttgactaaaagttattttagtgaacaactattttaataaaacttttaaaattcagaatataaactacagctgcctctcgtgccgacttagtacgaactcgtattagatgacgtctatcttcttcgaagagcataagagatactgcattattagggtgtcaaagcaatggtgcttgattagaacagaaaagggagtttacggtatgtcaaatattttattaggtccttaagtcatctgcagagttaagggattgaccagttaacagaagacacagggcctaggacataaaactctatcgctatcagaaactcttgaacgccattttattctctttccaaatgacataaagtagccaaggggataagagaaataagtagttttctccttttatcagccgagttgccttggaaaacccacaaaacagagaaattctaggagaagcatatagtttcaagtataattccatggaaagcaatttgagcgggaaagggaagcaaggtgcttgtagaagggtttcgcaagaaggcaggcattagtgcctagcttccactccagcacattggcccagagggagggagtaagcgcaaggaaagctgatgcagtcattttggtttctgacaggcccaattccccaaagtacctgacctgtcaaattgtgctaacatttcatttttcttctagccaaaaaggacatataaaggaagcattaagctagaactcacttgtgcaaccctcggagggagagagtaagcaagaggaaaggtgatgcaaaagtttctcttcatcttcctaccaatcatttaggtttttgacagggccaattccccatagtacctgaccagtcaaatagagaaaagcttgtgctaacgcttcattttccttcaagttaaaaaggacacatcaaggaagcattaagctaggacttacttgtgccaactctcatggagatgcagctatagaactccactccataccgacatctttagatgctttgcccccaacctgaatcattcaattcagtccctaatcacctttcaccaaaaatcctactcaatttgacattaaacctccaaagccacttggcaagaaatgttgtccttagagaaaggttgcttcatccaaaaggaagtggcattaaggtgcctcaaagcttctttgccacacaaacaggaaaagagaacagacaatacctatcttatgtaattgatttaaactgatttaaacattgagattaaatgtatatcctctccctttcttttttcatcactgaggtcgaaacttaaagaagtgtctatcatactaatctggacaagtatcagcatttttcctctcatgtgcattaaattgttcagtaaataatacaaaattttttgatatatctactgttccactctttatactgaaatgttctgttacaacaaatttcttttatgttgtgagcatcagtttagtacttcctaaaagatcgtgcaacactttgattaatatgacgccctaaagttttctgataaatcgccactaaatctggagtttagtagtatatcactgtgttttttcttccttgcaagaatttgtatacatttttttcttccttgcgagttaaaatgaaatcatccctggaaatttgcttaaggtagtcatcatgggcgagaatcactttgatagaagtaggatgtagaacaaaaatatttcttgagttctattctaacttgctaattgacatctaaatctaactacgtaatagaagtttttaaagaatataactcttattagttccttaagaaaccaacttcctacttaactatagattccaactccttccctttgttgctttcgtgaatgccatgcttatatttacttttagcaaatttatcccgaggcgcaagttgtggatgatgttacaacctcatagtgaccattgcgaacgcaaggattcatttagcttgtggcgaaggaagaggaacaccttgctgaatattgggaaatgtaggaataacaacttgctgagcatggcatgggttaagagaagagatatggaaccagatgcaacttggaaataacatgtagctcaagcttatgagcaacttcttgagcactgaacaatagggaaatacccatgaaaacagggagctaatttctaagtgtgcataccttatacctaagcaagtatgattgtattgtctgagttttaggaggatcaaatcacctacagtgtatgaggatcataggaattcttatatgttgttgagcatgtaggatcttataggatggtgtagcgaatcaaaatcaacaacttatactatggacataccaggatggtaagagagcagtttgggggccgaacaattataggagacttcaaaggacacaattttaggagtggaagcctgtgttgtaagcacattgaggccaagcaacccaattaatccattatgtgggatgatctcctctaaaacaactcaaatacattgtgtgattaaccatcttagtttgagactggacgatcctagtcgacttcaaaaggagcagccttaggagtgaaagcctgtgttgtaagcaaattcaggccgagaaacccaagtaacctattgtgcgagatgatctcctgtaatacaacttaaatacattcccacattgtgattaactacctcagtttgaccatcctgtttgaggataataggcaaaactggaagatagtttagtgtcctttccagaaaaaacttctatagaattgagttaatattgtcctaattttcctttaactaactacctctgcttatctccctttcaaaagactactcttattatcttattctaccttagactaagtctcactcacaccttaatatatgttttacagaatcattagacataatatgacattgatacaacatcttaggacttaatcttttgttcctcctttggcacacgttggcaaattatcttcttaattttagagtccttaacaccaactctcgactgacaagggatgtagcttaatgttgtagcctggggctgtgtgcaacgttttctttttcaatttttttctcagctgattaggttctttttctttttttggggatcattattttctgtcagggacaagttctttttcttggcaggatgaagaatctgattttcttgaagtactagatgtttgtgacggagggtggggataacaatatggctctgtgtaccaactggtgcaggatgattagcagttagttctttctacagatagtttggaagttgagaaaatttatatgaaaaacggaagaataaaggaagcaagaggatattaaggatcaacgtgaggaaacatagagagaagtaaattggatgggataggttagacagagtagtaactagaagaacaaacacaatgaaatatagcggggaataaaatcctagcaaagaaattctatgttcattatcgtttatgtatcttttctatcggttgctagtctcaatatatgcgttggttataactaataagaaaacctaaaagattctaatccttgtgatacttaagatctacctaaataagaaaatagaatactagaatgcagaaataatctgtaaacctaaagaactcgaaaatacaagataataataattattacaaaaaattctctaattgaaaatttgttccaaaataatatgttcttattctgcatcacactccttaaattatcagtgctggaaattttacttatggaatttcatcattaatcctgcagggatatattctattattttcatttctgtcatcaaacttggttatcttaacacatagggagttgagatttgtttttaatgaaatatgtgaatttgaaaacacgcttaggaatctgtgtttcttatccaggttaccagtgtggggattaacacgga

SEQ ID NO: 8752 - DNA, 1773 bp, Carica papaya
  Intron number 2 from transcript evm.model.supercontig_37.4 6 (locus evm.TU.supercontig_37.46) derived from phytozome v7.0 (chr-ID supercontig_37; pos 357565 to 359337 reverse strand)
gtgtggtcctagatctacaagaattcccagacatagtgagcatctgaaactcaatgaatcatgcagatacactgcttgataagaaagaaaaattttccttctcagattctttttgctacagattcacttgtctacttcatcatcacatatcactttatcagttatgatgtagttatctcaactttgccttatctcatactagttggggtcagctacaatatgaatctttttcctctctatcctatttaggattaaactctgtcacgtgctttttaatccttttttaagaaatccttttgcaacatataatctttattagtagtcattttcctgaaaaatgtaaagaattagaaaacctgaatccatgttcatgagtgttttgcatatttaattttctgttgaagtttgacatttttgcttttacgattaattcaaatttttgaataaagcattattttgtaccatgcaaataagctaattgtgtgtgggaaaagaaatacggtcgtgtgaaggaaaaatgaaacactttgagcataaagaagttggacttttgagcttaagacatgtttactggagtgtataaaataagttagataaagaacgtaaaagaagtcatatttggttggaagacaagttatgtaccgcaggtggctgtaaatagcttcataatttaataaatacatgcaaagaatagccacttcctctcctctttgttcaaatcaacaaatgatatcaaaacttgtatggtcttcgagggactgaaaaagaagacaagattaactgcaaaaattcaccaaaaccacctgtctctcgagacaatgtctggtttctgcataagcttccagtctgggtgcaacattctggtctcaagaatgccttcttggttccagaacataattgggatccctagatttcacctagtactccagactatatataggtcccaagaaaatgcttgagtcttcttagttagtataatttttttacgaaagttattgaacaaaaactttttcccagtatcaaattttagcaccaaatttgatactgtatgttccgtacttagccagtacattcctacaaaagaatgctatagtatgctgaaaaaatgatacagggaaatttttagtcttttgttgctctagaaagatttcattatttgcacataaacttgacatatttggatgtcctcaggcaaatgtagggtgctatagcctactgttttgtcttcatagtttcccttgggttatttctgataaaattctcttgtcaccctattttttggctactttagaatctatttttatcatgctgcaatctctgtttgagtgtatatgtttttatcccttgaacttctatcttaaaattaaaatttcataacaagtaatggccattcttaaaatgagaccatgaacatgttaagatgaatttctgaggctagtatatcatcacgaatcatcacttttataccataaaattatcacatttcatgagttcatcctctcaattttgcgtttatactaatgttacattttgatcagttgttcatctttatgtggatgttagaatgggcctttttttcctacccgagtaagcttggtagcttaatcaatatgcatgctttagtttcagttctagtcttgaaagctcctgtataagaactgcaagcatatccttggagttgaactcattggttagtttaagtttagtaaatctcatttatgtgtgactacttcttccttttaattctcggtacatttctgttgatgcagtcca

SEQ ID NO: 8753 - DNA, 5187 bp, Carica papaya
  Intron number 17 from transcript evm.model.supercontig_5.1 73 (locus evm.TU.supercontig_5.173) derived from phytozome v7.0 (chr-ID supercontig_5; pos 1483214 to 1488400)
ggaaaattttggatttatacaatttagacctggaggtataattgtagccagatattcgaaatttttatgtatcattgtcaaatatttagatacttattccatcaagtagtttatggatttactaactgcaatacaatgttaaaaaaaaaaaaaatctttcgacttgacaggattgcttgaacttctgcaagtgctgatttaagattttacgctttgttaactgttgtttaatagttcttcttctttctcttaattagatcaccaacatttcaaatatgtagagaagaattatgagagttatatacctacaatttaggtgagaattctaatatgttgaatctcccaggaaggaagaagattgacaccagaaattatgggatcagttcctagattttcggctcctaccttctaggaagtaaatttcctagaataaatcttgtttataacttttacagtccccctcaagttaggtgtagatattaatcatgccaagcttggaatctcatatcttcaaagttctttttcattagagattttatcaagatgtctattgtttgttgacttgaacaatgtgtaccacatgaattacttcttgttttctcctttatgaagtatcagtcaattttaacatgttttgtgcaatcgtgatgaacaagattcttagcaatgcttatggttgataagtggtcacaaaatagctttataggagtacaattttcaacctttaattcttttaatatacgatcaagccacatatcattaaacactcctaaggccatagccctgaactcagctcctatactgcttctgctaccatagatcttttttttattccgctaggttagtaagtttattgtacatatgagcagtagctagatgtatttcttgtcagttgaccctgcccagtcagcatttgtaaatattttcacatccctctaagaacttttcttcaagtataatctcttatctggagtcatcttcaggtttctcaggatacggtttatagcacctagatgttcctcaatgggatgactcataaactcactacacttactgcaaaccctatatcaggtcttgtgtgaaagaggtagatgaactttccgactaatctttaatatttccctttaagcactaggggactttcaccttcagttttgaattttatatttgactacataggggtatttgcaggtttgtaaccaagcattcttgtttccttaagcaagttgataacatatttcttctgtgagattgtgattcccttcctagatttggctacttccagcttaatgaagtatttcaagtttctttaaatcttttgtgtcaaactccttagtcaagatgcacttgcgcttcttaagttcggcttcgtcattcgtaattaagattatgctgtccacataaactttcagtactgctaatttcccattctgtgaatgtctcacgaagagagtatgatctgtttggcactgtgtgatagccgaccttcttctttgttgtgttgttaaattggttaaaccagactattggggactgtttaattcatagagagattttcggagtttacatactctacttctacttgcttatgtttttgatgccaatggaatatccatttacacttcttttgcaagtttcgggttgaggaagacatagtagaggggccaatcaagattaacagctaaagataataatacgtgaacaagtttaacaataatacatgaatttgtgtttagtttggttataggggtaaaatgtctcttggtagttaataccataggattgtataaatctctcaactactaactgaactttaaatctctcagtacctctatcacttttgtacttcgcattgaagacccacttgcatctaactgtttattttccttcaggtaggtgtgtaagttcccaagtgtaattcttctttgaagtcttcatttcttctaatacaactatcttccattctgggatattcatagcttcctggattattttgggaatctgagtgttatctaaatttgtgataaatgtctaaaactgtgttggcaacccttttgtataagataaagttgtataagggatgtttgtgcatgaccttacctcttttcttaaggtaataggatgttcgtcaatcatgtatttgcttgtagttttatcagagagaatgttacctgaattatgtattagaactctcatttggaatggactcttaactttgctcaggtgattagatattgctctttatcctcttaagtttcctcctccttgaatatactcgaaagtctctgtttaccacgagctatgacaatttttatgggcttcatcctcactgtcaccattaatttgtatgagatcaagattgttgtcactctcttgcaccctgctgagaataggttgtggctccatatattgattatgttcccttattttatctcaaaattgggattcttcttgctctctctccccctgaatttcaagttcgagatagagtggtttcaaagaatgtcacatgtatagtagtatagaactctctattgcttgaggaatagtacttgtattcttttttagtttagagcgtattcaaggaagatacattttatagatttaggcccatgtttactacgaagtatgtgggtgaatgaggacaaatgtagtacttccaaatattttgagaggtacggaagatgtgtccgattctagtgataaatcatgagtggtttttagcttggtgttagggggtttaatactcgagggcaatttgttaattaggtaagtggcaatgagtatggcttctccccagaaatggttggcacatgaatttgagaatgggaataatctaggtacctctaggatgtgaaggctcttcctttatgcaatcctacttttttggggtatatctacacaagaactttgatcgattgtgtcttggttttctgtgtactttctcagggtttgtgtaaagtactccttttgcattagcagttctaagtatttggattttatatgaaattggtttgtatcattatgttgaacttctgaaatgtctcccctacttcagatttttctttcataagatacaccaatgtaattttagtgtggtcatcaacaaatagaacaagtcatgttgcccctctaatatacttttaccttggaggtttccttgacatcactatgaattagtgagcagggacttgattcgttataaggttgagcttgatgagagtttcgagatgcaatttggcatatttaacactgaaatttttaaattctttattgaataatgaggaaacaagtttttgtaaataactaatcttgagatgtcctaatatatagccccacaatctaatagtatcttcttgccttgtgagagaggtgaacctaaatggttgttcctagatgtagttgctcttgaggatattgagtctttgatgcacatcagcattgccaattgtccttagttcctgaaattcaacgaggtttgaataaaatttagcagcacaattcaattcttgcgtgagcttgttaactggccacaagttgtaacttaatttaggaacaagagtactgaattcaaggttatatctttagttagagatactgaaccctttccaataactcgacctaagtcccatcaacaatttttactgagatgttcgcacggcaaagagcataggtagtgaagattatataatcacctgtcatgtggtgtgaaacaccagaatctatgaccaggtgttgcccaatgtttgccttgaggttacggtatttacaaaattacctgagtgagtcactgacccagtaccatccacttggcaacttatttgatgaggattgtttaacttttgcaagaactctattgtgttccttactaaatagtagatgtagtggagtcttcccttgcaattacagttccttttgtttctttgctgtttgggttccttgaggtttctaatctgctggttcctgtagagtttccagcaaatttcccttgaatactctagttattgacaataatcacaccaaggtttttctgttttgtctctccctggctaatctggttgttacagacagaaagtccagaacttttgagtgtttacggtgaattgaggtctccaagtatgactttctttctgctttcctccatccgcatctcgaggaaagccttgcgaaactgggttggggtttcgaaccctgagttctccctcagacatcgtctagctcattgttgaggccgagcagaaatttgaaaagtcttttcctttcaacaattcttttgtacctcaagtcatctttaggacaagtccactgattctcttcaaagattaagctgttgccagttgcgggttaaaagattgaagtattaggttacgcttacgtctccttgttgtaagtcatggagtgcgctttccatgacaaatagttcggatttcttgtcgactatgaaataatttttttttttgttgcatcccaaatctccttggcagatacaaacagaaggaagtttcctccaatttcagttgttattgacttgattagccaggacatcatcaggttatttttggtttttcaagcttgatattttgagttttctttaagtggaggaactgcagcacctgtgaagtaatcatcgaagccgttccacatatgaacattatcacagatttagaccatggaaggtaattctggccgttgagtttatgatcggttatagacaatgcctgaatatccattcttccattagttgctactggagagttttggaggatggttgtgattctggacattgcaaagtgcggcttgtcattctgtaatttgtattgttattgaccaggatgtaagtgtcttggagacagctctggtaccacgttgtttgataattctttaccgttgattgcaagagttatagacctacagtttaggagagaatcctaatctattgagtttcctaagaaggaagaagatttacactaggaattatgggatccgagtataaattcagatcctagatttttagctcctacattctagaaagtaaatctgcctaaaatcaatattttttaggatttctacaggaagaaaatcttcctaaaatcaatcttgtttaggaattctacattaacttattgcaagattactccttttgatgtcttaaattctattttattttttttgaaaaaggggagtatc

SEQ ID NO: 8754 - DNA, 2059 bp, Carica papaya
  Intron number 2 from transcript evm.model.supercontig_12.7 3 (locus evm.TU.supercontig_12.73) derived from phytozome v7.0 (chr-ID supercontig_12; pos 587486 to 589544 reverse strand)
ttcggctgggagaaacctccttcaggctaagaaacgtatttttccttttctcctccctttttactctttttgttctcttaattgtttcttttccctgtttggttgtcattcattttgctctacgatccaattatgttgtagtggaatcaaatctaggatctccgtttttcttttttggttgttcttctctctgcatagtaaaatatagtggagaagaggtggaagaattggactaattttttatttacgatctcagctgctgatctgattcagcttcttttggaatttccaactgggcctatgagaaatatttagaagtcagggaagactggccgattaacaaaattaagctctaatttgctgctttgtgattgcaatatcagaatttagtgaattggattcatttgattctggagggtttatgagctgaaatgccaaatttgatattctgtgtcttaacgtctgctacttcattacaattagcatgctaccatcttccactcattttccgtttgtcattgttagagagtggtttttgctaagctatttttttgtcttgttcactttagttttccttttttttttctttttctctctaagctttgaattctcttgatcagcttataaaaggtagaatatatacgtatatatatctatatatttgcattttcatgcttcatttggcaataaagttacttttggtttaattctcatttaattttcaatcttgcttttgttgtttatatttcaacgtgaactgcaatggttaagttaccaccacaccttcaatttcttgatggtgggaatgcagttcttaccttcgaagcatagcttttaagcaatgattgaaatttcaccattgcaaaattcaaaatggagcctgtggtaactcggaccacaaattatgcgctataagcatatgtattaaaacaacagaggaattagaactaggaattgaatgagaaataagccagacaaagtgcaattttctcatagatgttaacaagtatgttagcaatttttccatggatggtcaaatagcagatttgtttacaggactgggagtgtgctaatttggataatggaactgagtagaacttcgtggaggtagatgatggtttgcttttttctcaaatggtcccaacctgtcatgtgctaggggagtacaaatttgcaggtgtttataaagattgtatcttaagatagggatgcagttaaatatttgccatagctttgaaggatgataaatgtgtctaacatcatcttattctcacatttttttagctgaatttgatcagctagttttctgagatcatattgccttatggttcttctgcaatgaagcaaaagccttcaagggttctaaggtagaggtatcaaaagcagttttttgatggttgcatcatcttattgttacattttttgagctgaatttgatcagctagttttctgagatcatattgccttatggttcttctgcaatgaaacaaaagccttcaaggcttttaaggtagaggtatcaaaagtagttttccgattggaacaaactaaatccaaaccccaggtgataaaggaaaaagaaagaggcagttggagggaaaaaaatttgacaatgaagccacaaagtactccaccaccctggatgcaagttacgtaggagaaattttctagtatcagtatcagaacctcaacactacaacattagtgtcataactttacacgtccgtttcaatgctatctccagttcagcactggttggccttcgactgttttcaactctgtcataagtttacacctttgtttcgatgctattgtcagtttgccgctgattgctctttacatactttgattttccaagtgcatttattatttatgtagttctgttgcttgttcacctagatttgcttgtgtatattggtagttaagaaagtcatcatagaactgaaacaaacaattagtagtaattatctcttttccatgaaagactatgttgacaaaaatatattgtttcttccttcccacagcttgccctgtaaattttgagtttctgaactacact

SEQ ID NO: 8755 - DNA, 1684 bp, Carica papaya
  Intron number 3 from transcript evm.model.supercontig_9.48 (locus evm.TU.supercontig_9.48) derived from phytozome v7 .0 (chr-ID supercontig_9; pos 213109 to 214792 reverse str and)
aggctgttgagattgtccacagtcatccacgtgctgtaagttttatgctttaaatttattttagtttgtttggtgtttgtcaatgaaattgctttcatgtcttctctcgttttctttctttaggcactaaatgacataagccttcaaatttgatttctgctctggaatctcggtgcttgttatttgcactcgtttgctaattgtttcattttctcattgaccgttgacacgttgattaattagaacggtagaaatgtgcaaaattttcttttgttaaatcttgttcaactattgagggtataattgtttaatactccgaacttaaggaattacgatagttaaaaaaagtaatgctacagtaaataacactatctaataaaccatacagataggtttgtgtaagaatgagaacttcatgttgtcagatcattcaactttatttgcaatgtgcatatcctcgaaggtaaaatagtaccattcacatttaaaagataaaagttagtacgcacttgatcccgtggttctgtttacacctatggagtataactcttttagttagagttgctagtttacgcgggtgatttatgattttacttctgattagctttgatatcagtgcagaacatgttgaaaatatgtcaaaaatttaaggcacctagtagatgcagatatcaagccatgaaattttagttttatcgacatgaatattttgttgcctaagtaattgtgattcttttcctgtatagctttcatcattaatttatctcataatgttgtaattatttagaatctctactataagggtaatttctttatatgcacataggaattttgtagatatatgtgtcatttgtaacaccaaggaatatagtgaaaaataaaataaatatttttttccaaaaatcttcaggtttacatctggataaagcatttacatgaagtactacagcattttcttaatgtatccttattccttgtttcatgaagcatgtactaggacaatgcaagaagaagatgcaaagaggccgaactcttaggtctagctgctttatttacagattatttctttaattcaaatatacttcggtatttggggggcttctctgaggctcctgtccgctggttcagaaaaagaacaatgcctttggttttggttcattgtgataggcttaggagagaaaaagagatttttgtttgtggataactcgaataaatacggtaattttgtggagatgaggtatcatattgttataataggttcatggacggtcgtacaagaagccgatgtctttatgacattttcaacaaaaaaaggaagttggaaaaaatccatgagaatgttttaaatggaagttccgggagaacgagtttgaggaaggtagactagaaatgaggaggacaatgcaagcgaaacatgtgaacatggtgaactcttagctggacagctgctttatttacagattatttcttcaattcaactgtagcttctgcacttgggccaggccacttctatatactgattcttcacattttccacttttgttttggatatttatggaatctagtgtttcttcttctctattccttggccattgatgaagcaattacctgagtcgttgttgcttatgatgggtcatctgttatttcagggaagtgccaaaagacttgtgaaggctgccctcca

SEQ ID NO: 8756 - DNA, 1036 bp, Carica papaya
  Intron number 2 from transcript evm.model.supercontig_85.1 13 (locus evm.TU.supercontig_85.113) derived from phytozom e v7.0 (chr-ID supercontig_85; pos 726839 to 727874 revers e strand)
atctgaggggacaaaaaggggctctagagaggaaggtgtatacattgtcttgtctctcattagtctcttacacaatttgcgcactgctaatcctcgtccctatttttatgcttattctctgcacttttacataactgtcctccattaaattcttctcggaaactttttatggaatatatctcatttttctcatagtgagccacacaatttctcaattgcattgaagctttacacaaaaggtgataggccttggatgtctttttcttgtcattatgttgtttttttggtccatgtgcctcttggtatccaacaatgcttgtaacatacaaatatgagaatcaagaaagtctttcttttagtagactgtggtctaatttcgcttcttattgtggttttggacgacttgatgggtggaattcttttattttgtttgttatagttttcccctgttgcagttttgaaatgtgaacgctgtgcaatttgtaaatgttaaccagaaagataacttgcaggagtgcgatctttttaacagatttcttgatatatgatggccgtttgactaggcttatcttattttggcttatataatcatattttttcttaaccgtactagatttcttttttcagaaatagaattaatataatgaaaattaagaggataccctttgtcttccaaactggtacttctgtctttgttgtccatatctagtcgaaataaaatctaacaaccagatatatggggaaaaaaagctacaacaaagagtacaatataacaaaatcatataacaatatgaacgaaaaaattaaagcatatatttctttaacaaatcaaactgtcaataaactaaacaccacaagatataatcattctcagcccataacaaataacaattgactcttctcatttttattgcgattattattgtcaatattaatttcatcactttacagtttataataactaactacatatgcatgctgcttctgttccttctatacagaaatctgcaaggtgaaagagttgtcaagacaaaag

SEQ ID NO: 8757 - DNA, 4237 bp, Carica papaya
  Intron number 13 from transcript evm.model.supercontig_175 .24 (locus evm.TU.supercontig_175.24) derived from phytozo me v7.0 (chr-ID supercontig_175; pos 470069 to 474305 reve rse strand)
ggccaattttcctggtaagattcatgtttgtgcttttctatgaaccatttctctatgtgaaggtttttggatggatacagaaaccttataatataaaagcaacctaggtttcctaaaaaataaacacataaaacaagacagacaatttatgaatttttttttcttttcaaaatatattaataatcattcaatcagagaagatagataaatatattttattttctaaaaattaaatttctttcctcttttttggaagctgtgagggaagagaaaagagaagaaatggagggggcagaaaagaaaagaaaaagtagtatattatttttccttgtttggatgctaaaagaatacgtaaaagaaatagaaaaaaaataaatgaaaatattgtttgttttttagtagaaacagaacgaaaatgtttggttctaccgttgtaaaacccttttgtcttttatggtttcatctacctaagtgctatatataataatttataaaagaaaacttatgtattgcctttttgaacaataaagaattgcaaatgtttagaaaatatttattaaaataagttgtatagatcatgaaatattatatagatcatgaaataaataaatagtaatacttaaaatttgcataatttgtttgtatcttattatcaagcagaagccttggaatgttcttgggacctgggcacgaaccttgaacttttgtcattccaagagtcaatgcattcctaggaccccaatggtgttctaggaatcaactcagtatctggcgttttctagagacatggtcaggttattggactctggcatgttctctatacctggaggtagtttcgggatttgtattgagtttttgggcttgggtttacttgggatccatgattgatctgcatatctggaggtggcttggggatctgagggcattttaggggtttgagcatatccaaaatctgggtgtgagctagggacctaagtttgctagcgagacctagagatatactcgggaccctggagtagaatccggacctcaatggtgatctaggtacttgtaggcattggagcttatctgtgttttttgggaattgggtgcagtttgtagtgatgtcaacttgatgggtttgagccagatttcactcgccttgcctttgtccagcatgttaatatttttactctgttggtggttttggaatgaatatttatgctctgtcctgttcgtttcattccccacttggcaccaaatattttaactttacgtatgcgagtatgtgtgtatatatatatatatctaaatgcaagaactgagatttatcggtcaatgtgaataacaaaaggatgtgaacctaccctgtctcaattataattctttcacactcatcttgtcctaccctgaattctttttttgaaggaaaaaactgtacctaacacggatggcgtggtttggattctcatatccactggatatagtcctaggttccagaggtggtctagagattttagtgcattcttggtgcattcttgaaacttagccatgatcaggggacttgagcattcttagtacttgggtgatatcctgaggactcaacatgtccaagagagatggtaacattattagaaatcaggcgctttcatgttattgaagtggattcaagttgagttctggggcccaggggcattctcaggacctgtgagctgtctggagatctggaggagatttggggatacaagagcaacttggggatctgagtacgtttttgggactcagacatgaattggatgcattccgaagatctaggcatggtctgtggacctaagcttgcttgagaaatgcagaagcagacttggttcccctatctggggatgaattatttgtctcttaacctgccttgtctggggaacttaattccgtgctttgcaccaaatagtcaaatgtgtatgtatatatacaagtaccaaaatttacatgcgaatgtgcatagacaaaaagaatatatagaaatacaaatatgaatgtgtatgaatatgtaaaaataaatgtagaaattatataaatttatatatatatttgaggcaggtaatgttattgcataacccaaatgtaccctgttccagatgtgtttctttcatcacttgcccaatcctaccctgaattcattttttgaaaggaaaaattgccccaccctggatggggcagtgtacgttcccacaattcacaggtggttttggacccgagtgcattctcagacctaggctcgttctcaaaacttagggttcgggggtggtccaggaatcttgggtggccccaggaggtttggggaccaggggcatgttttccaggacctagacacagttcttgggtctcaaagtgtgatacaacttctgtgaagatttagcatatgtagagatggaaagggggcagatcaggccaaatccaaatccaacccccttttgcatattgcatgaaccgaatccttacagaacccaaaacagatttgttttttcggaactttttggggccgtactggatttatgggttatgccactcatatctgcttcgtatttgatgatgcacacaaaattaagacagaggagcaaatgcagatgtgcagtcaagctggagttggcgctttgaaggcgaagagaaagtggagctggtgctgtcaaaggcgaagaggatgaggagctagcgaggtggatgattgttttggtaaaagatgctgaaaaaactcaaggtttctttggtgcgtgtatagtatcatatatatatatatagacaagtcgggtttgggtggggttttggcatatgccaaacctgattctgctctgagtcaatctattattccagacaatccgaatccaacttgatctgaacctgttggccggttaaaaaaatactggtcgggtgtgggcgggttggcttaagttttgtaaaaatgctatcccaaagcatacatcaagggtagatttgtccttatgtattttacaatatcttttttctcttttgtctggaggaattaaaaatgtgacaattgatggggatgaaaggataaaatttattccttattccctttctttcctaagtatgtctcaaactccttaataaggaaaaatatgattttcttttccctcagctcattctgatccattcctcttcatccagatatacccttacatgcaatatatctatattattattattattattatttttttgaatatgcaatatatctatattatatttaacaatatcttcagaagcaatatttattgcccaagacacaaattaggaacatcttgaactacattttatgcaagataaattatcaaataaaagtaatccttttttcaatggcgactttttttctaagcatgatgaaatgaagcctaaatatgcttgcagttcctctggtaattggcatttcctgtcaagtggaagaagtcatttgttctatgtgttattatgttccaaaaattaattttggcttttacctggagctagttagctctgctatttgggtcctttcctccagccttctagttgcagaaagcatgtccatgactaaattcatgtcatcttggtctatccttactcatctttgcttggtctacctagattgtctctgatgcctccttgaaataattttgaagataaccgaattacatttaactcattaccacaatttatcctttacttatatgatgctagcatttgcgtagaataaataattttctgtacgaactttttgtttcgcaaggaactgtctgggctactttgtgggccttcacttttttgaacatgcatgttttatttcattggatgggaattaatataaagcaactcatatttggatactcttttatatttaatttggaaattttccatgatggacaactggatttagagttagttttgtttttgaagaatgacagtatattttaatttgtttgcttatttaatttaccttctacttagtgtttaattaatttatttttcaccatgctctgtaatgatctaactacaaaagattatgatgatttccttcctgaaggttgattgctagataatcagggaggtcagaacaaatattacagatcctgtttatagtgattttcaacaaattataataatcactggaaaattgggtcttgtttcctgatagaagctcggagcgtttgttcaagttgcattcatgttttggagtcatatttctcttgttgatctttcaggttgctgagtc

SEQ ID NO: 8758 - DNA, 1734 bp, Carica papaya
  Intron number 5 from transcript evm.model.supercontig_3.41 4 (locus evm.TU.supercontig_3.414) derived from phytozome v7.0 (chr-ID supercontig_3; pos 2914464 to 2916197 reverse strand)
gagaggtctatcgtggagactggcgtgggactgtaagttgtctccatccttttctacaatagtgtcggttgtcgattgggtctaatcatcattattgaaagtagaccggtcattaagttggttagagcattgtttcactagtttactagcatgattagtagttccttagttgatctcttgattcaaaaatatagatataaaataatacaatacaaataaaacttaaaaacttaaaaccatattatttaaagtatattgctgatagtttttagtattgtcgggaataactgtgttgtattctcgttgaataatacatccctatgtatacaagttttagggataagaaaaagaaaagttaaaattaattacaaagaatgtgttttactttaattccctttaatttagtttaaacctatttatatatcaagtacattctttaatatttctcatcaagttggagagtaaatgttatcaaatcctagtttggtaatgatagtatgaaatggtagattactcaagtctttagtcgatatgtttgcaagttattgctttgtgagtacatagagaatacatattaaactattgtctagcttctacttgataaaatgcttatcaactccaaagttgttcattttattatgctgtacaggattttgagcaatgtttattgcgatttgttgtcatagtaaaagcgcattcaaccatctcacttgactcttaaattttctaggagtcttttcaaccatagtaattcacatatcttttgtgccattgttttgaattcggaccctaacaactacattatgttcaagtgaccgttgatcctgtatagtttggatcggtgtaaactttaaatatcaatctatcattccttttgaacattatgcatttttctcatgtcccctttaggtaaggtaatttataggctgcctttaaatgtacctctttagagttatgaatgaattggcttgtcatactcacttcataggcagtatcaagtcttatgttagatagataattaacctcctaactagtctttggtacatttgttgatctatttctacatcatcttccactggtcccaacttacagttgaggtcaataggtgttctcgttggcttacatgctagtttaactgcatgtttcaacaaatcatttatgtatttctgaattttttttattttgaatgactactttgatcccaagaggattttagctttcctaattccttcatttcaaattccctggttagatagtacgaagtttaagcttttcttctttattatcccctatcataataatatcatcgttgaacaccatattttattatttaatattatgtaattagaattttatgagaataataatctcatattattagaattctagtaaaataaaaattttcttattagtaaattagagattttataaatagtataagtgtaataagttaaagggtgagaaataaaattatatttttttttccaaaatcaatatgatattataaccaaataaaactattttagggttctaatttcagggtttcttttaaatcttaaaataacacaatatgttggattgatacatttttattcagatatactctcatcaccacccaaaccaaatttgaacccgtcgatgttttggggtatttacggtgattttcagaggtggtttaggtgttggtaaaatagtgcagctacatactggaagcgccggtaaaatagtgcagcc

SEQ ID NO: 8759 - DNA, 1011 bp, Carica papaya
  Intron number 6 from transcript evm.model.supercontig_59.1 6 (locus evm.TU.supercontig_59.16) derived from phytozome v7.0 (chr-ID supercontig_59; pos 176525 to 177535 reverse strand)
agggtggaaccattagtggaaagattggaaaagaggttaagtttatttccattgctgatgctattcacaagttatataattcgcatttcttctctgattctttatggtatactcatgtggcctttaccagcttaataaaatgattttctttaaatacttgattctaaacttgtctcccttctaacttggctttgaaaggctgcatagttgatgcaagctcttttaaagatgtaaattaaatacatagagggaatacaaataaaacatatgttatggaaagtgtctgagcatccaagtttcgtagtacatagatgtatagcatgcaggccttagattaagcatgagcaattatgttttgttttttcttaaaaaagaaaaagtatgatgaattatgacctgcaatctcttgtagatccaagttaaatacatataggaaacacaaataaaaatggttgttctgtaaagtggcatagcatccaaagttccctagtatacagctgtatggcatgcaggcctatgaagaattttgtgcttttcattaaaaaagaaggaattataaagaattgtgacctttgcatagtttatacttggctaatttagagtatcacggatggaaggctctaaattttgagtttttttgcttagacgattttgtttcattagactttcagtagagcatgaagaatatttctttttttatggggataagaagatgataggaagactttgtcgatcatattaatactttcttatactatgggcagctgcactccttgctgtgtcctgatgaattttctttccttataaaaaaagtaaatgataaattaatttatgatttgtctatttgagaggtggtcattattgctcagtgttgctctgtttcttgtgcaagtcaagttatatgcactctcttgctacattttcaatgattacatttatctcacaaaatttcattcaagattttcttttttgacagatactgtttgagctgttagccaaaggtggaactgt

SEQ ID NO: 8760 - DNA, 3751 bp, Carica papaya
  Intron number 3 from transcript evm.model.supercontig_195. 34 (locus evm.TU.supercontig_195.34) derived from phytozom e v7.0 (chr-ID supercontig_195; pos 186862 to 190612 rever se strand)
ctaaaggtcagttatgactcattaatagttaagtttaaatatagcatgtattggaacaagtaagctgtttcattacagcctcttcaattatttgtattatgctctttttagtttagttggaatacacctgtcttatttcatcattgtcaccccatatttcttttgatggaggaaaaaggagatattctaggcgtagaaacagggcatggaaatgtaggtggtagcatcttttgttggacacttgccttgagtatttattatcaggccttgtttgttatcgtttctttgttaacaatgttgggcttggtgcgttttcatgattttcatcgctattatgagttaaatggaaaactgcatggcagttaattctgagtcttgcaaactcatggtcatccatacaccattacattcacatagtaatggccttttgtaaagtttgctgataaattgaaggtctgatcacaaaggattactctactgaggctatgagcactcatatgtgagaattgatacttcattgcctcaagtctcagattgaaggagcttgctccttatatagaggttccttcattaaagcattctaacaacaaaatcagatcttctgaaatgcataagtttgctgtttcgttgggagttcccatgctcaaaatccaattacctaagctcccaaccattctgatacaccaaaagattaaaaggtgttgcaatttttttccctttaaaagtacttcaaaaaaaaaaatttccctttaagaatggagtactttcaacctatgctggcaatccctgatttaccagtccaagcatttcaaatctatgcaacctagatgaggctaggtgtgataggtgggcccacaggacgtaccatgaatgccttttcatttggagcatgtggagcagctacagtaagatgagattattcctatagtcatcctgcacttttggcatctctatatccaaaatcatgaaaaacctaatggtccggatctaatgcatgtattgattacaagttcgtgcttgtgaataatagaaaaacatgcaagcagtgaacaagccttgtagtttcgttaataatttacattttgatgccttgtttagagataccattagattttcctaaagaagaagatgctatttcatttggatgtttagtgaaacatgttaacttgtattattaatatttatccatttggttttcaaggaaagaaaaatgaatttcctttatgttgcttggacatggtgcaaggacccaatatggtgtgaatctacatcattttacactctactgccatttttgctgattctcctgcactagttaggtgatagaaaaagtttggttttgcttgagttttgctgtggatattctttactgaagtgaatattttccactttagtacaaataaggaacatttgttggtagattacataaggaacataggtgggaatgttgtttgaaaaccagtcttttggagaggcctcttgactggaaatgtgaaattgttggaagattttctattgctgtgtacattatagaactggtgggaagacggggagtgttcaagtttagagtataggtaggatgggaacttgggcatgaagtctttctatggaactctattgagaactttctggtaattttttcttaaggggccattacttcacttatttgcagatgtcttactgacatcacttatccaagcatctccttccctggtaccactcaggaataaatttgctcaccttaaaaactgggattcataattataaaaaatactagtgttagttctattgggaatttcaataaaccctaacaatttcacttacgtatatgttttgccaacgacatttagatacataataaagtactttaaaaataaacaaatttactaaaagtaatgaataccaaatctgagactttgatataagaccactagaatacttgaaaaataccatttattttttaaaaaattgccccttgaaaattgaagttcaagtgtttgttcttctttttagaaggtttatggaccattttgggagcttacttttttgaaaaataagacaaaagaaaggatcattttacttattcatttatttatttattttttgcaattacttaatgaagagaggttatttgttgcttttaagttgaaaaagtaattgttcttttgtacaagaacaaaaaggaagtgggaagtgaggattccgacctctaatggttgatttaagactcaatatgtttgaaaacatgtcaggatttgggaattaatgattcctggctatctttaatcaatatctgaagggaacatcactttttgttgtcaaaaacttgaaaggttggaaatcaaatgccatccttttcatcctttaagcatcacctaagggagatactgaaaactctgtaccttctggtagttgctttctgttcatgcatagatgctcacatggagattctgataaccgaaaatcttaaaaagggttgacggaggctatttttgctaggttatgatcatgggatgcaaggatttttaagcaatggtttcaattatgtgatttgggatgaatatcttgtttgcttctctttaggcaaaggttcaaggcttcttctgggaggttgtccttctctctttgaggagggatttggttgctatattgtcctaatgcttttgctttgtctcgttgtactttcctaatttagttggaggatgcctaatcctcttaatcttgtaacaactctctctttctaataaaatttcttcttatatgtatatatatgaaaaagagataatcttataaaagaaattatatttttttggtacttggcattgtatatgtaaagaatgtcgagagtaatatattgtctttttgttgtaaagaatgtggcatttatttcttgcctttttgttttcaacttcttctcggtgttatgcatatgctgtctcatctggttgatgctccttccagctagtattttagatttgggagctgcagctattgtgtctggtttagattagggcttttgatggtattgagggtgattggacaaaagttaggaatacatggtttcatctttttgagtccttaatcctaggtcatgacatatacaggatggatgatttgggaatgtcattgatatgatcactaccttgtaaataattgtgtacataggttgcaccctcttggtgctattctatatatttttactttttatttcgaaaaaaaagcctgtaggctgtaggatctttctatttgacatgctacattcaggataacataactttccaaggggagaggcaagcactgatggcagttgaggaactttttctgctaacaatttatttctagagagtgcataatcctttgcttttcctgagtttgctgatttattgtctttttagtgtctttttttcctaattttttgcgccatttcttaatgaaataacattaaagtttattattttacacttttgtgtgtactgagcttgtgtttttttttgcattttgttgaatttatgcaatacttgttccaaggcaagaaaacagaagatatcaattctttttagttgacaatataccttccgatgcaatttaaatgatattttatagtatcttttatattacaatatgaacaaaaatcagtattgtactgttgtgctcttctagtttaaggttctacttgtggactaagcaagacctttattttctgacttgtgttacaggcattgaaatatattgtgcacctacagctgattcc

SEQ ID NO: 8761 - DNA, 5182 bp, Carica papaya
  Intron number 14 from transcript evm.model.supercontig_142 .46 (locus evm.TU.supercontig_142.46) derived from phytozo me v7.0 (chr-ID supercontig_142; pos 524939 to 530120)
cagctgtgcttggaataccagatactcttgctcctgtgagttagtctgaactattagctcttcatccagtaaagtagtcgtttatgctaaaaggattctgtttattttttgaaatgagcttgatgtaagtaataatgtgtgcataatttatgtctgtttgtgaactcatgtttttaccttacatgattcatcattttctttatcataaattcatagtgaaattatctgttaacaggagtatcaagactcttatttctctctctttaaaaatttctctctctaaaaatcctctctactttctcaatctttttcaaccttctactctctactatctactatctactatctcctctctttctactttacaagcccatattaacacgttctcgcaggcctccgaccgagtgggtcggctgggaggtcgaccgatacctccatcttcccacaatgctccctgaaaatagcaaacgcttcatcattaacgggagaaaatctttcgacatcatttgcgatgaaaagaagcttgacgatatgagaatctacgaaaacagaagaggaaatagaatttctatcactctcaacaaaaaagaagttgaatggatgattgaaaacctaagtgatttctactgaaacagaggcaaagattcgtggggcagaaatattaaaggacaacatcgtcatctcttcctagctttggtttggaacagacagagcagaaatcttgtattatcgaaagaaagagaattttctattaaaagaatttttatccccgatggttttgaggcaggggatggtggcgcattatgaaagtcatttttgaactcactgatacacctctaaagaacttatttattttttgaaacaattagatcatctctctcttgttttctggtctcatcagatacaatctgaatcctctcacatatctttaagctgtcgaactacaagcacacctaccgcttcatcattccgttggaagagaagaaatcatacgcagaagctctggaatcccccaatgctaaccctaagtaggtgatgacaactgtacccgacccggcccggcccgacccggaatcccaaaaacccgattttttgaaattcaaaaatagaaaagaaaaagcgggaaatagatacaaaagagggtcacttcaactcataagaagacccgccatcctaaggagcccagattcacttggactgaaaaaaagaaatggactaacgaggcagacccaagcaacatgaacaaatcgaagtctagcctgactagaatggcaccaaaaagttaagtgggcttggagagaaaagaaaaaggatccgcacccaaacccgaatccaaattcaatcattatatcagagccacaaacgaaatatgagaattcggtcttgcaaattcgagccctagaatcccctatcgagacatggcagctaatgtcttttgctcaaactcctggtctggttctcaacaaatttcatgcagctccgttatgagtctcgaagaagagctactttctggtgcgggctacaaattggtggtgcatcattccgaaactgaaagcctaacaagcaagtttgaagattcaggttgacagagttctgtccgatgttatcgagtctatcgatactcttttgaaagataaacataagtacgatcctcaactattctctgattggattacacaaaatattttttacatcagttaacatgttggggcttcttttttggttatgaaatggaagctacaaacttattcattgagttggagaagaagccagaaatctgcaaaagcgagtctatactcctgcatactagcaaaaagaaataggcagaaagtggatccagagagctaaaacgtttatagacatcaatcaattatgagggttgcagcaaaaaatccaaggaatcagaggtcgttttcattcaacccaaatgactaataaaattatttcttggaatgttagaggtcttaacgaccacaaaaaaaaattataatcaaagggtgcctaaatagatggaagcctaccatcatataccttcaagaaacaaaaatggaggtgatctctaaaaaaactattcgcagcttgtggaaaatggccgacattggctcgaattttctccctgctaaagactccactggaggtactctaattatgtagacaacgaacagagttcaatgtcagaatgtctttacaggtgaagtaattctttcctgtctattttctaacaaaaatagcaatacttggtatttatctggagtgtattgcagaggcaactcaatggaacgttttcaacttgaagaggaattatttaacgtcaaaaacaattgggggtcaaggacattgtgggcggggacttaaacatggttttgaggagctctgaaatatctgacaacaactactcctataatgatattgatgatttcagggctttacttgacaaacttgatttaaatgatttgtctcttaagggtggaagatggacttaagagtaatcaaagaagccaaccatctttctctagaattgatagattccttctatcatccgagctgctcctgaaattatcaggtgtcaatcaaaatgtactctcaagacctattttagatcatttcccaatctctctgactatggatggtgtcaaatggggccctgtatcatttagacttgacaacaaatagttgggttccatcagctacagaattgttgtcaagctaacaatcctaaagtaggaaattaaaaattgggccagagatacagggagaaaagaagagagcataacaaatcttatttccgaaattgatgtcctggacagggaagaagaaattggtaatttgactattctggaaagagagaggaaatgtcacctgaaagctgatttagccaagaaactacaaatggaagctacctcctgaaaataaaaatgaagagaaaagtggcgcaaaatggagataagaactctaaatactttcatatattagcttatcatagaagaagagtgaattatgttgaagaactcaatatggaaggcaagtgcatcaagggtaatgagacttttagagagggcgcaaaatcacattttcggaaactgtataaggtgagtaccagttacaggcccaaacttgacaatcttttcttcaacagtcttggtgaggtgcagaaaaatcaactggaggaggaattctccaaggaagagatttggttatgtttgaaaaattgtgatggggataaggccccaggcccggatggattcgacattaaatttttacaaaccttttggcaggtcattaaatcggacatacttgattttttcaaagattttcatgctcatggaaaatttgttcgctctctcaattcaacctttcttgttatgatcccaaaaaaagcttagcccaagaatatcaatgatacattgaaatttcccacctttgcttcgtggatgtcacgctcatattctgtcaacctaacacaagtcatttaatatttctcaaatgcattctgatatgcttccaggctgtgtcaggattaaaaattaatctacacaaatcagaatttgttgagctgggttgctgcaatactggaaatacattatgtgatattcttagttgtaaaaaattgacccttcccattacctacctgggtgtacctttgggaatcaagaaaaacgacaaaagatgctgggaaccggtgattgaaacgtgcaacaacatattagccgcttggaagaagaaatttctgtctaaatgaggtagattaacactcataaagagcactctctcaaatctgcctatttactatctgttattaatattcgcataaatgttgccaaaaaattgaaagccatccaatgcaattttctatgggtgacagtgaaaacaagaagaaatatcatctggttaagtggtcggatgttaaaaaacctttgagggaaggtggattggggttgagatccttgactaaattaaacaaggccttgcttggtaaatggattttgagattttggaatgagaacaacagtttatggaaattggttatcaactgcaaatggtctaaaggcaatcctcatgatctttcacacattcagaacagcaactatggtattagtatgtagaagaacataattaatttgaatgatgctgtttttcattgttctaagtggtctattggaaatggacaaaaaattcgtttttgggacaaaatttggtgcggaactgaaaaattcaaagacagatttcctcatacctacgctatcgctaagaacaagcatgcatctgtttgggacgttgctggtttggcctgccaagtttcttggaatgtcccggtcgcgagaaatcgtaatgattgggagcagagctggaagattatgaatctctacttcttacattgaccagcattactcttactaatagggatgacagattaatttggaacctcaaaaataatggattattttctgtcaatttgctgcattgctttctggacggtcaaaaacagaatattcaaagaacttttccatccaagataatatggaaatctggtgctcctccaaagaaatcattctttgcttgggaggctgcaaaggagaagatactcacacttgataatttgatgaaaagaggccacactattgttaatagatgcatcctttgtaagtaagacttggaaacttgtaatcacctccttttgaaatgcctcactactcggaatctctagaacatgatcctagggctgctgggggtctcttgggtaatgtctgaaaatgttaacttggaattgatggcttgggagggtctaagcagcagcaataagttcaccagactcatttctcttactatattttgggtcatctggaaggaaagaaacaaacgggtttttgaaggagtcgaatatgattttaacatcatcaagaataactggtttaactattttggttcttatattttagggcgtaaccttgattgttttgacgatttaggtaatactgtagatatgttagtcgagatgtaaattttgtacatggggggtgctcccttagcaccttttgatattaatactgctcttacttttgtttataaaaaaaaaatagtgaaattatctgttatatgactggaaggaactataatttttctctctttttgggctttcacttaatattgcaggtccagcttctctgggtgaacttggttactg

SEQ ID NO: 8762 - DNA, 768 bp, Carica papaya
  Intron number 1 from transcript evm.model.supercontig_14.8 9 (locus evm.TU.supercontig_14.89) derived from phytozome v7.0 (chr-ID supercontig_14; pos 1023823 to 1024590 revers e strand)
cgccgcgcctgcaaaacgcctcgtgcttcttgttggtatgatctctcgctcggaccacccatagtccttgcgcttacttataatacatgatttgttagggggagactatttcgagttagtattttctctgcggttaagaaagccttttagtagttttaagtatgaattcgttcgtggtgttctcttgttgactttgaagtatttattgtgagatatgggattgacatactttagtataaatcgggtttaaaatgttttttcgtgttttaagtacagctgttgcttatgagaaatgggacagacccacgtcaatgcgaatgaaatttacgacgtttaatcgcgttttagtatgtttcaaaagaggttttatgttctgcatttggagacattgtcactaattttgaatatttttgtatctcgggtctattggatgtttctgcttgcgttttggttgcatttttaaaaaggattatcttgtttctctatatggaaattgttatcattattttaatattaaacattttattctgtccagttttattttgagtggtttacagtggttaatctaactggctagttctgttgtgagtgattactttgattaatttaactggcaaaagtaataatgagggccttggaatggaattctatcatttttgttcattgtgaagtttgttttcgagatatcatccttagaatctggaaatttccatacagtttttatgattgattcttgattttcttttgttaaaatggtgacgccagcgg

SEQ ID NO: 8763 - DNA, 1803 bp, Carica papaya
  Intron number 1 from transcript evm.model.supercontig_40.1 6 (locus evm.TU.supercontig_40.16) derived from phytozome v7.0 (chr-ID supercontig_40; pos 403482 to 405284)
cttctcaaaacctgtttgcacccattctaccaaaggtcattttcttatacgtatcatcacttcttaactctctctccattttactattgatttctctctttcatttcttgatagcttcccaattataatctccatatatatatatatatacagacgaaatttaattaccttcatcaggttaggttttgccatatcagatgctcatacccattttttatctataaataactacgaaaattaattactcttgacattttactttttatatgttatttcctatatagactgtatgagatttgtttaggtataagcacctacttatacctaaatttctgtgttcagtatagcaaaattcatacgttaatgttagactcatttagataaaaaacagcacgtgttttcatgagttaataaattaactatatataacttttaaaattcatgtaaaatttagaactgtgtataataattctggaatattatttatatatatatatatatatattgccttaccaattattgggattttaatatcatgtttcaattatactcaggataatagaaaaaaaaaaataagaaatcaaaactccgaccaatattaatcattgtgattttatatatcatatttatactatgaactatactcctgaaaataattaaaaataaagaaagtaacatggatataaaattatgatatatttattgggttgggattatttaatttactattttatggtaggattcttatatatatatatatatatatatatatataatattatggttcagtccaaaaagtctgtattgatggctactaaaatattattcaatagtgggtgggtgagtgcgtgacaggcagaaggcaattacaatataaaaatgaaattttggtcaatcaatctccacaatttttcaatctccaatcattctgacgccactccaaaaaacaaaaaagtatatattatttaatgtcttttttttttcaacaaaatgcggattcatcactaattgcttaagaacataattattgtcatgttccatatatatatatatatatcataggagtaaatattattgaaattaaacctttgtacatatgtactgaaaacgtcgtctaaatccatttcaaatatattataatatatttttcttttctcattaaacgatatgaattgttccttcattaaaaaaatatgtgaattatttccctatctcctaaaaaaacttagtatttatcattattattatttattagatgtatatttcccaaatatatacatatagaatatcgagtcttatatttttattaattaaatatggatggactaatgttgatacaagtttacttatatatatatatatatatgtgtgtgtgtgtgtgtgtgtaatttcagtcttttcaattatattcctttcttaatgtagacccacaaagaaagtttcgaagttataaataccaaaattaaagtatgtattgcctaagcttcaatttattctgtaatattaatacctttatcaattgcttaagttaataattagtatggttctttctgtatataaaattttgtgtttaacgtgtatttcattttaaaattatttatattatgttataatttgtatattacttaattgaatttacattttcttatctcattatacagtatataaattctgaaatttcatttttgtaaatttcattaaaatgtaaaaataaaattttaaatttattaatttgattatttccaaaatacgaaaaaatttgattcaggtttaaagagggaatcgtcgctggaagtagtgcac

SEQ ID NO: 8764 - DNA, 4887 bp, Carica papaya
  Intron number 2 from transcript evm.model.supercontig_128. 66 (locus evm.TU.supercontig_128.66) derived from phytozom e v7.0 (chr-ID supercontig_128; pos 563177 to 568063 rever se strand)
gtaattttgttgctgatccttttctttatattcaggtatgtgtttgtttaactatctttaatattttatttgtgttgctgagggttgaaagaggaaaaaaagtagtatcattataaattctaaaatcatttccaaccttctgatgatattattcaacgacagttatctcctgctgtgttaattacatagaatgagaactacggccttttttgacttgtactaattggtagggaagcttcgtggttaatttagttatttgtaatcaagccatagaaatgtttgccgatgcttacaagcaaacaagaagtactatctaacatatttattttccaaaattcatgctactgttaaatgttttatgctggatcgtagtggttggagtcttgtgacagaagttgttcatggcagcatagtggaaccactcgattgatctgtattcgttgagagttattgcacctctggttgctattacaatttcctcctgaggtctttatgaccgtatacacttggtattatatatgcatgtggggcccaaaatctttaaccctattttccagtcttctcttcttttttctttccttgtcaccatttcagaatgaaaaataaaatctttgttctgttagtttccttcccaattaagccaaagagttgttaccatgtgcctacatatggctacaggaccagaggtccttcgaaaattcaagtgatggacgagcaaaagttgaaaagagtttcgggagcaatttgggttacttagcatttcttctcatcatttaaaacttcaagacttgatttggtgaatatgcagtggatacccaaaatgagttagtagtaggaggttgcagaaattttgtagagaatgggttggagattactagagttaccaaatgggtgaatagcaactaggtgatagatcaattgaaattttatagactaggaaaagtagctttcttcaggagacatggaaattgataagcagcgataaatggacccttgttattttgctttagcaaacgttgtattaaaaaaaaattgatttgtcattgaaaacagcctgattattgagtttccctaaataatgaatttgattcctctagtctctgtggaacctgtttcttgtacatgtcaagtgaagcacttgttgaatcaatggtaactctcataatttctacagcagtaattcttttttttttttttgcctatctgatttgaaaacagaagaggggtgggtaaatcaacgtagatatatgtgataatctgtgtaattatcaatagcatgcaaattaacatagatagaccgttgatttttcccattctgttgtagttttctatggtgtggaagatgcgctgttttttttatcactagaagcctattggtcttgtgctgtcattgtcagcatcctcatggtgcaacttctcaagtcattttcttattttctttatgtcttgcattttttttccaatgattttctcgaagttgcattgatcactatatatatatatatatatatatccgttctgtagaaaggatttgatttatgatttcttaattacatgtattctccccgtagaatatgtattaactttatatgaagtctttgtttgagaagttcttgcaagtgttttcttagtgttcttttcttttaaaggggcattagtgtctttgtcccttagagcttttaatgacatgaaaaattagttgattttattttctctctccccctcacaatttttatgctcaacaaataatgttaaaattttttatagcatatatgctagtttcattattatttatgccgttttatttacttggcgtgtataagttaaagctcttcttctagttttctatttcactcatgaattagctttgtctttttcctcactgatgggacgtgggtatgaatttttatttggtccttttttttatttaatataattctaatctcgtgtaatgtatgtcctattctaacttcacaatgtaacaagaaaatgcatatgtagatgttagatatttatcacactatagtattaattggtctgaaaacttagaagtttaaacaacagttgttgtttccatactaccctataagcactggtgaggtcaaactgagaaaataaatttcaagtcccatcagaattgttggcatgtacttccaagctcaacttgtactttgcaggctcgatattgattaagtcaaactgactttatggagtgccaaaaagaattagataccagttaggattttttaaagagaatcaatgctagttgacctgtgatttttacgattctgtacagtctttttttttaacaattttaaatagtgggaaagtaggaagtagaggaagaagaaagaaatgaaaaggaaagtgttcagtatgaggcaatcctgcatggtgaaaggtattaattaagttcttgaaaagaaggttgtcataaactagagaaacagttggattagcagctgaaggaaggtttaaatttcttcttctcgtcattttttctttctttttgagaaacgaaggttgaaatattttgagaattaaggaaatatagttttactccttcaaaatcttattacagtctttagacagctatttattttggggaatactagtaaaatatcataagatacgataattgggtgaggagatgcattggctgattctggcacaaaattagttttgatactacggaagtgcacccaaatggaaaaatgatttcacaaaatcttcctgtagctatatatgcctgtctgttttttttaatcagcatcagaatacagtttgctatatggacaattgaaatttagttagctcaaacttcaattgaatatgaattgaggtcctagtttgtttcatcggcttaagaaagagccctcgtaatcctcaaaaatgaaatctatgtaactagcatttaactatgtgatcggccaacaagttaaaatagaaattttttaactcatttacaaatttatagtcccactgattaaaccatcctcgccttctatctccaagttgatacctaaactggtaaaaaaatattccaactactagttacttctgctatgaagaagacaatttacataattgactccatacatagcccacaacatactgtcttaactattagtaggtaattgttcattaaggctttaattgtggtacatcatgtctcacgataatggagagattgtggacctcatgattttgtttctgtaaacgtggacttcataactcttgtttcttaaatgtagaaagcttttatagacaggcagcaacttttggtgcatttgtgaatatactctcttttttgtcatagtgaatatattatttttggggttctaaataatatatagttaagtatgcaaatccattcttacgttagattatcattaaaaatttgattttgaagatctttaatttcctttttctttattaaatatcaaaccattttgtatacattttctgttacacctaaaagcatgatgaagcaactaataacatgtaaagcacacaacaaaattttagtagcattgtatattgaatttctgttgtcaaccactggatccaagtctccatggtacttttgcattatctggtgcataaatgtaggtgaggtcatccaaccatacatcactaattattttttctcaaatgttctttatgtgcttcattttttaaaaccccggtaaagctgtttctgtgattccttggttcatttcaattgttccaccacgtctgcccttcttttaccagaaggctttgatggaccaggattatcaaattttctgccccttaaagtggatggtaaagtgagtgcaacatcaattgctccattggaattaattgatatctagagatggactttagtgttaacgtgacccatttttggctttatcttatttttggattgttgatgcctcatggtggctaatgattgcttatggatgttggcgaagtatttgagtattaggttggttagttatgtgggaaattgttcataacattaggcattttttcttaaagttttgcttgggcaatgttctcatgctctgttcttttggaggagatggtatggactttttatagttctatcatctcttagattcttgatatggttgattaggtcatggaataatcttttattgggttttccgagacttgggcttccttgattagatgctttagaattatttgaaatattttggcacctccacagcagctactgactaagtattgcatataaaaaatacacagagaggaagtctagttctttacattcatttaatttttgaacttacttttcttttttttccttttcttgaggtgctcctatgcctcttgtttagtgcctccgaaaatggatttttgatttggaaggtgcacatttaatttgcatttcgactttttttaaaattgttttcttgaagtgctcctatttcttcctgattgtttagtaccttgaaaaatgggtcttttatttgcaataagttcttttttactttgccccgccctctcgcaaagaataaggaaaatctatgtgatttgcaaatgccatatttactccaagagcctattgaatattcaagttaccaatttataacatattgggccatttttctgttttacaagctagagcagttattttccttacactttaaataaattggcaggattcatttgctaaactcctctctcctaatcatgcgcaaacctgcatgcaccaaccaatacatgcagagtgtgtttgtatgtgcatgcatatgcacatgctgcaaagtcttaatagtagcttacttcagtgttttttcaaatgtcccaaggttggaattctagaacttctttcttatgtctccttttgctggcgttatgatacagggcaatact

SEQ ID NO: 8765 - DNA, 2518 bp, Carica papaya
  Intron number 1 from transcript evm.model.supercontig_3.31 5 (locus evm.TU.supercontig_3.315) derived from phytozome v7.0 (chr-ID supercontig_3; pos 2199723 to 2202240 reverse strand)
gggttatcgttttgagacaggtatacagacttatcactttcttgccttggttgaaactagagtatttctacatttttgttctgggatgatattttttttagttctgttttgacatttagtgtaaggcatatgtcgatcttcttacatttcagtggttgggttgtgggtcaattataatgcatcttggattttgaaaatgataatatatataatgcagcttggttctttggcactgtactgtctctatcggggtttcttagtggctaattaataatatgtaaaactgctatttttctactacatgaaatttaatgatgtataagtggcaacaaagatatgaaatgctattagtgcagatttaattattcaaatattaatattggaatagaattgaagaaattttcaaattttaagaatttttttttattttagtgtctgcagttcggatatccttcatgtgaatctatggttctgttcctaaaacaacagtaaatatatccattttcgtgcaccaaatggccattgtttggagtatcatgcactggagatagtagttttagtactaaagcatgtcaagctttaaaacttctaaaattttcttctgatttaattttaaattggctattatacatggttaaattcgttgtatataatgcttcattcaactctgccccttagatgatatctatggctgtgtcatgcgtgttctcttttcatatagctcatctccgaggagaccaggcctatagcttattttcttaggcaagaggtgatttcctttagttacctgcttttgaaaggtgtatgtggattttgaaacagtaaaggagtttaatttaggagaatgtaagtgtgcatcataccgaagtgtcatggaggagccaaagtgcaagtttatacttctggaattgttggaattttcggacaaattaagttttatgtaagtgaaggattcgttgattatgttttatggaaaaggtcatttcttaagagtgttggggatgttatgttttcttctatatgctgtgatttcgtgtcaccaggggaaacacttgttagcctgtgcgtagtaccattttatgaagggcatattaacttaagtgtacttttaacttttacctcaattggcattgtatacttacaattgcatcaagttacacccaatagtttgcgagtatctaacaatagcaccatatactctaattttgttagtttccaccttaagaagatctacaataggcctttctgttattgttggataaatgttttccatattttccaattatggtcattagtgaaaacacaaatgtaaattttgaagcctttattagttgtactcactagagtcatagtgtgcaaatggtgtaaatattcttttctagcatggttggtggatgctagagaatgtttatttccatgtatctgatgttaaggaatcttttataacatcttctcaaaaggaatctcttagaatatgaacaggtaaaagtttgggtttgtaattcatttgctttccgcaatataaaggttcaagattaaatgtagttttcatggttataagagtagatatgtagacttttattttgaaattaaaagctaatgaaatattccacatgcgttaccatttagtaatctacatttttggataatataatggtacaactgatgaatataatagaatgctagattatggaaatcttaaagcataagttttcaactgacaaaaatagaaaaaaatttatactatttttgatattttgaaatgcaaagtgtaaattgggtgtaatttgagtccataatacgagcttatggtttttttatattaaaaagtaatgtccgggagattttgatttgtgaatcttttcacacatagctagttccaatttgatctttgtgctgctatttacgttctttctgttgttttgaagcatttttagttggttatcttttttttgaaatgaatttttagttggttatcttagctactgtttctgtacattctctttccttccttaataaagcttctctttctattaaaaaaatattttgatacatagttttcggagtttagccatatatttgactgtttaatggtttcttagtggcaatccttgtaaaagcttaaatgtttaaaagaaaagatctaaagttagtttggtaatattatttcggaaaaaaaaaaaaagttagtttggtaatgttggttgaacttctgttgttacgatgaaaccttttgtggagaattggaatctcattatctcataagtgcatcatctaaaccttcttttgtggagtattggaatctcattatctcgtgagtgaatcatctaatctattgggcttaaactattctgtatttgatctgaactaacaactggattttatactattgagtttgcaattgaaaaaaaatctttccctcaatgctcatctaatcattttgttgaaaacaatattttttttctcttatactgtggaaaaaggcttttgccaagagagctggagctattaagaacag

SEQ ID NO: 8766 - DNA, 3048 bp, Carica papaya
  Intron number 10 from transcript evm.model.supercontig_78. 83 (locus evm.TU.supercontig_78.83) derived from phytozome v7.0 (chr-ID supercontig_78; pos 959382 to 962429 reverse strand)
gcggcaactatcaatatctttatcacaggtttacttcaaaattattatctcagttgattgttctgtattcttttttattttttataggattcctgaagtttctgttgtggtctctactttaggaccccattatggtttttgatgaggaattagaaagtgtatttgaataatatgatttttgcaacttcctttctgccttatcttgactaaaatggtttgggctcatgcgtaccattttattctttgattaaaccctatatgggtcacgtaacagtaggttacagccctgtaaggcagaaataactgacaacacaaatcttagaaaaattagaaagaaatggtataatcgaacatttcaagttaaaaataaaagtgaacataaacagataaaaatttagataggtaactgaatctcgcatctgctgctctgcccttacaattgtttaaaatcctaacaaaagtactagctcctctgttctgattaaagcccataatatccctctttcctgcaaaaatgcacttgtcctcaagcacaaaagataccatcccaaataatcttgctgagaagatggagcgaaaaagttgtagctaaccttgggtggtaaaaatctcgaaataaatttctttctgaagtcagggaaaccaggaggcctgcaactatttccatgacaatttttatttccttccccatgagtccatgaccagaataatttctgcaaccacctctcattttattgctagaataatttcctatcctgctttagactattgcagaatttcataatctgcatggacacctaagttttaagtgcagccaatagttgttggaaatgttgaagtcccatttgacgtccacctatgcagttgtgatgtgcatcagtctgatcagtaattcttggattttgatgccacaagagtagcatcagcctgatcatttcccaatccagtttagggatgtcagtcacatcttccccagtaaacactatcttctctttctctctaaaatatgaatgggtgtttaaaaaaattctggaaatttcttccagctttgttatcaattcttgttattttgcgtaacttactgcccctcaagacattcttgtacctgatcctcctggtatgctttgagaaaagtcttaacttgttgctggagaggtcccagatctctataatagtaggctatgttaccaaataatatggtccctattttaggatcttgttatggatttagaattaagaaatttgaaagaggatttgtaaattatgattgctacaacttctttcttttctgccttacattaactaaaattatttgtgctcatcaagagagaacagacaatctctgagtatgaaaactactaaggactttctaacgggtaccattttatttttttgatcaacacttacatattttacacaacagtaggttacacgacagtgaggcagagataactgccaaaacaaacccatataactaaatattcctggaaaaattagaattgaaacaaactgacataacagaggatttaaatttaaaaataacgttgataaaatgctaaacaaatagctgagtcttccacctgctgatctgtccttataactgtttaacatactaatgaaaggtgctagctgctgttttttttttttttttttaatttaattaaagctcttgacagtatctcctgtggtttcccattcatgattttggtacttcaccacataaatcttagtaggtcagatattattgtgatttgcaattattctaattttcctgtcgatattactttttaatatgcctttttttaatcctaaaagttcagtaattcagagcttaaattaattttttaaatattaatttcaacctagctctctgctttctttacaaggttctggtacttctctattagggataagtgttagtgggtcagatgctactgtgataacctgccaatactagtttatgttttacctttcttttcaatcctttttgtgaagtgtgtcttgtgctaacctagtgctcaggcttcactctacccgattctagtactgatccagttggagagtcttagtaggttcaatgctattgtcataattcaattttactgccagtacttgtttttgctgtacttctgtttaattctaaaaggttagtagttcagagcttagaattgtttgttaagtttgaagtgccttcacctagttctcaggctttcagaatacattagggtatacgcgcatctaaaactaatactgcaatcactccctttgctattcctcatacagacaattatccactactcgttgcttggtaagtatgttggcagacaatagggtagtcggtgaaaatattaacctgtaaattttcacctgcatgcataaatgacatagcttgtgatgtggcaatcgatgcatgacaaattaagtttgaatatcaacttttcctggataaaatagaattacaggaatttatgttagagtatagaagaatggacataagacacgaaaaaaagggttaaggtggagaaatatatggagagagagatggaacaggtatgcaagaaagaataagactcaagaataaagaacacaatgaaggtaaaaagggctaagagccttcaaatgatctacactcaaatcttgtattctattgtctagtttagtggttttatgcaggtcctaattgtcatcttaattgagatcttaactataactaataagaaaaatgtaaataatcgaaaaaaaagctgaagatactacatcataatcaaatttaggcttactaaactaacttgtatttcttaaatagcctaaatgataatcaaaataattaaaataatgtaatctatcactaaaaatagcccattctaacttttcttaattccaatcagtaagtacatttgtatctcaaggttcaacattttaattatttgtctctctgtatttttcatcaagtatttgtgttttgggactgtgaagatagttatgttggaatttttatgtttagccaagtgaacaattgatgatcttttcaatttcatgcaggagcat

SEQ ID NO: 8767 - DNA, 2229 bp, Carica papaya
  Intron number 8 from transcript evm.model.supercontig_195. 23 (locus evm.TU.supercontig_195.23) derived from phytozom e v7.0 (chr-ID supercontig_195; pos 142150 to 144378 rever se strand)
tctctaatcctcgagtaagtgaataaatgttaacgtgtcttttttacttgtctttctaatatgatgttgatatatgttctagacttttttgtatataaaggacctagagataggatatttggaaactaggggtagaacatagtcgagctgagtctgatatttgaatatttgagcttgggtaatttcaatactttgagctcgctcaaagcttgatccaagccttaacttttcatggagctcgattcaaacccaataagtatcagctttgatgtgagcttgattttatatgagctcgattttgagcttgtattgtcttgaaattgggctgcatctcattaaattattaatatttgtacaatagtattaattattaatttaattgtatatataagtaatattttattgtatatgtaatagatattttaatatttaaatacatgttagcgagtttttgagtcgagttacaagctcaagctaggatcaatgacataaatgagccagataatatgtctgagctggagccgagttttcactgagcctaattgaacttttccatataggctcagcttgttgccagttctgctgatagctggagcaggatgttggttatgctttacgcttaggccaagatttctctgaatatgatgagaaatagatctgggtattctgaagtttcaccattagttcctgttttgtatcacattcttttttctacagaagcaatttggtggatgcattattttgggtttttgttgttagggcatgacatgattagtgatgtaatttttgggcatgtcatagactcactaactatattgtaaagttttatgtataggggtggtacctccagttttatggtaccatgataatatatagttcatactttttatttaaaagaaaaaaagaagcaatttgtacgtcaagaaatctgcttagaatttccaatgtgcaagaataattaatgatgtctagacaaaagaatattctttaatttccaacattttcttgtcagatgataatcctggtgacatcaaaatatttttgcattcggctcccatcatctctgtctctctccctctgtctctctgattattcctgttttcttcatcttttataagatgggaagtctttgcaccctctttcttggttctttttgaagattctagactctcagttacaggggcagctcctccatataataagtgaggttattgaccccacttaatttgttaaaaagtaatatatattgcatgtaattttcaaataaaagaagattttgatattattgttttggtattgacttcattactattaataattgataattttcatcacattattcatgaaagatatttttggcctcataatgttttatgtaaatttgacctataggataaaatctttgggttttgttataatcatgtctagttctacagttattagaaagacaaaaacctagttctctcatcattttttcaaaaaactaaaaaaagcagactataataggtttctctgtatagattatgttcttcttacactacttttttgtaccataatagctaaaatcataagtctttttgtgctttgaccagtagaaacacgtatcatgtactttattatttgacaatcatgtgaccgtgacatgatacatgtaaaactataaattaatctgttaagaaactggactttgttgacatatatatttttatacaaggattaaattgttaattttaaaaaatatggacctagtcataattataagcaaaaattttgaggaattctatgtaagttaccctttttattttgctcagttacgatattgttctttctctagcatgaccttaacactgtgggaaacttgggatggcatgctatttgtgctagtagctttgtgggttctattcactatagcttaactgcacaataatcaaacatttttcctatgtagattaatagttaggataatgaaaaaacgttatttattttcatcattaaattcttatcttttagtaaaatccactttggtcaaagatttatcactacaagctctggatctttttgctgtccagtttatgtatgctcttccctttggtgggcaatatattgattcactggcatgtgcccactagtaagtctattcttatgttttattacaagtctactagatttgtgttatgctatagagattaggtgataaagctgctgatctgctgtaggtagcttgggagc

SEQ ID NO: 8768 - DNA, 2471 bp, Carica papaya
  Intron number 3 from transcript evm.model.supercontig_17.1 66 (locus evm.TU.supercontig_17.166) derived from phytozom e v7.0 (chr-ID supercontig_17; pos 2075937 to 2078407 reve rse strand)
ctattaagatctgttcttgctgctgatttagtcgggtaaacttttcagcataatgctttgaattttatgcaagtagtttttatgtgcccttcattctttatatgtttggttgtcatctacgttgctacttgggttggcatttttggaagacctatttcttccttcttaaataatacttgtgttggtgcttcatatgttcagggcatttcattcactttatcttctaactgtttaatataactcaagtgagttcatatttaaaagcgtttttgctcaaggaatgatatttaaaagaattaagataaagatgcatcttgctgatactagttttatatcttatcagcataagaaaagtatcgtgtcaagcacctactgttttacatcatgagaagaccattcacaatttagctgtacttcagacgccaacgtcagtaaagccaatcccaattacttgaatccaatcgctgtagttcctttcatcccatagtgcaatcttccataagtattcatgtgttctggagacggtcttatgctggattttacctaatgcacattatatgttgcttggtatgtggtacttcaattgcacatcggtaaaaaaagtgattttttagctccataaaaaggttcaagtcccatattatgaataactcgagtttaaatttttgagaattttgtagtttgagtataaaaagttgttggacaaggtggtgcttgaatcttggatattataaccggcattagaatatgtgctaatttgatgacctcaagctagttctactttggaactttgtagcttttgtgattgcaatatatgtcttgatgaggatatcaaatatttgaatggtgaatattgtgatgctccaatcccacatcagaaaaatatgtgattgtcgcattttatataagatctcaagtcacacactattaataatttagtttttaagagtcagtcgtttgagtttaaaaagttattgggttagtagtgtttggatacaagatattacatgctacttgctatggaaaggtgggtgtaagcataaataggcataaacaggcaaactcttatatgctgccaataaggagagttagttctggtacaaccataaacttgagttatgctgccaataaggagagttagttctggtacaaccataaacttttgtgggaatcaaagtcttatagactgcatttctaatctatggactttctaatacaacctcttgagaaggttgggtcccaattatttttccctccactctttgccgatttaaaaagctattctgtataaatatcttctgtacgtcaatacagtttctggtacaggttcacaaatttatcccagtcgaacctgtgctccaattcaggaaacacattaaaaccaaacatatccagtccaacttgtgctccaattcagaaacacatcaaaaccaaacatatccagtggcttgttagcatctcttgtcaggtctttagatgatgacttctatgttgaatagaaactgatttcgacttgaatgtgccaaaaggatacatagaggttatcttagatttgaatcttgattgacaattgcaggaaaggttgccttaaactccggtggagttttatcgaaacaatatgaaagaaaacagaacacaaacaattaccagatcaaatcatattcagattgcatatcgaatttactgtcacagaagaagtatttgaattaactgtattagaaaacacttccacgtcttagcatgaggtataaaaatttctgagtcattttgttcatgtacaatctgcaaacacttctaacgtgtaaaattcttgttttatggcctttgaagtacttggatatatttttatgtaagcatacgaagctaaattgggaaatcagtttttgccttgatcttacatttgtctagattttctgacagcttatgcctctcatcattggattaagtgggctgtagagccattcgttattgaggtccttcagggatggttgtttatccaataggaagccaataaagcttgtgctttaatgttttgttactgttgtgtggttgggtttaagagaggcaaaatgtaagacctttagatggtcaggagagtgttcttttcccaagcacaggtagttggtttcataatattttgtttttacattgattgattacgctttggggatgaaatgggatctcgtaaattcacagaatcttcaatttgtaaacaagcagctgcaaatttttacttagtcttggtgttcttgtgaataaaatgttttcttaaagaagagaagtaactgctcttacctgtacaggacaataaatcaatctcatttttgcatgttatgggtaaaaatttactcgcactgcaatgatataattgcctgaactttgtttctcagccgcaggattttcttatatccagttctcaatttgtaaccataattttaactattatttcttatcttccaggtttcatacat

SEQ ID NO: 8769 - DNA, 3430 bp, Carica papaya
  Intron number 7 from transcript evm.model.supercontig_6.34 1 (locus evm.TU.supercontig_6.341) derived from phytozome v7.0 (chr-ID supercontig_6; pos 2569358 to 2572787)
tactcttattgctaggaggtgtactaggagaagtatgcaaatctttgtacccacattttgtttcaagaccctttttttcttaacaaatgttacttatgttacttttttttagtgtttgtctggctgtcctgcatttattgaaataaactgcaatagaaaagtttcacttatgaacttggttgttcgttttaacactgtcaggtaccagattattgctgaagtggcatggttgacttgaatgggctgaccatttgaaaacatatgcttgtgtggatttctttggtagagaagtctaaaacattggttcttttgtttaatgcttattataattagttatctctggactatcttaagcacagctatggaagccggcagcatcagtaaaatgaatgaaaaatgaatatacttcctctacaacttcttctctctgtcttctttgttctcaatttcttcttaaatcaggaccctatgaagtaggattctgaggaatggtatcagagcagttgattcttcccattctttttccttcttgttccgctaaacctaactttcctttttctgtatgcttcactcctctctctcctttgcccttccccattctgctgaattgtttctacccagctatccaagacaaaaatgaaaaaacaagtgctactatgaacacaaatcaataccacaaaatctagataggaattttgacatggaagaaataattttaacatgaagctttctaagcaaaggaatatccatttcaagcggttagcgtcaaactgagcgagaagctgttctacatgagaacattatggtgttgcggatcccatgatggtgttgcctttcttgaaaggtggtattttctctccgtcccatcggtttttccaagtgtgatttttcagttatcctttttgggaaatgcttcttcctccaagaacttccatcttgacccgtcatgccttgtcttcactgccagtaacagttcttcctcttgttgaacttggttatatgtccccctagaagcttgttttttcctaaagtctaagagaaagtagaatagtgtttatataggttacctgtttgtttattctatggatacagtgtgatgcattgaaatgaagacaagcatcttatgtcagaatgtgtcagttttgtgagaaggagagtataaatgggtcttaagtagttatgtaaggataaaaaacagttcgaaggttggagggaactgtctttttgttgtaataaatactaaaataagaaaattatgagtattcacttactgaagagattgtttagttctctctctaatcgagtcatttgatgtgtgaaaaaataggtaaaggtagaagatcagataaaagctcatctgcagcagcacatttcattgtcaacagaaccataactaaatcctagacaagtgacaatatcaaaatccttctccttttgaaactagtcagtttcgatgctgtctcctaaattttgatgtgataatgtgagagattgttgtgaaatcttttatggttgagaagtttgatggggttgaggtagctggtgggataagcttgctgtcaacgttgatgcttggatggacactatgtacttgtgagaaagttcctctaccaaggattggtttgcgaattatgttaaaatgccaacattagttgtagaaggtgataggtgtttttctcaattggtctttgagtgatgttcggatacatgtgaaataccttaaatataaagaaatactggtcaaggtgagctcaactgggtttgcaatgtgctgatggaaagactgggggctcttaaatagagacgtgaggaaggtggaagtggtgaagaagaaagaggtgagggaggagttgctcatttttctatgggttcttgattgcaaccaagttgggttgcaggaagtgagaaatggaggtttagaaatgggcctgatgagctctattttatggtaggacttgctcttgatgagtctgaagctagacaattgttaagttgacacatactgatgtcaccaaggaagatacatattgaagcaaggcagcaagagtggtggaagatcaatatggctactgctttttatcgtcaatggacataagtattaagttacgggatagaaggaaagctgcacttacactatccatgattctcttatccctctggctatattggcttacaccacagagagaaacagctgttatcttttttgcatgctatgtgctcaggactctcactccaatgatttgtgatgacattgttaagaccttggcgcttgcttaggtggtttagacagacaaagaatgttggctaggcccatctttaaatagcattcatcaaaacaagtttgctgtgctcagttcttatgttggctgattaacatccttgaggataatgatgcttttataaggaggttactgtcaggaaccagaatattgctgaagtagcttggttgagttgactgggttgaccatttgaaaatatatgctcatgtgaatctctttggtagagaagcatagcatgctagttgtcttctttatgacttctagttacggttagttattaaactctaactaaaactattttacttgcgcatgggtgttgtagaatcgtattgttactatcaagaaaaacaaatgaaaattgaatatgcttcgtctgcaacttctcctttccttcctcttatctaaattttattgtctcctcttctttcttctctactttcttcaattaggaccccatgaacatggatcctgacaaacaagttcccatcaatttggtgtatgctctgatttggcagttaggagaatcgtgcaggaaaaaagtccttaagaaaattgcatgtaaactaaagatgcaactatctatgcagttagtatttagttcttaagaaacactggttaggaagtaagcttgaagctgacgttccacagttgattataaagtgggaatattgatgcaaatatttctcggaactgcataatagttagttggtgtgaatgacatacttttgtctaagaaaaatgcataaatattaagggaaaaaccaatttttcttttctgatcctctttgtagcgccaagtgcagctgaaattctactctttctttctgtttattaatcaatggatgaaagccttcaggtcgtagggtaatgtcattgggtaactgtacctagaaagtgcagctgtgtggttgacttatttacttatgcagtaactggttaattgaaagcaacttggttatgttcttaatctttctaggagtactaggaacatggtcatgaaggcgtgggaaaatatcgaggtagcaatagcattgtagacttgttaaagatcgatatgcctattagttttcactgtgtcagaaaagtgctttatcttatttttctatactaatccagttcatttacaatttggttctcttgaaggcactcgt

SEQ ID NO: 8770 - DNA, 5504 bp, Carica papaya
  Intron number 1 from transcript evm.model.supercontig_235. 5 (locus evm.TU.supercontig_235.5) derived from phytozome v7.0 (chr-ID supercontig_235; pos 16783 to 22286)
cacaaagtttttcaggttcaaatctaaacttatgtaaaataaatagtctaaatgcagttccatctatttttaatatttataatttacaggagaaattatttgagagaatattctcaattaaaatttatgtcatttgaactaatggattggcacttaaagttgtgatacaggttatactttttgttctaatcatgataacaaagatcactgaacagaaatggttgatatttgagggaacagttgggttaagtatctgctgggcaatactgtaacagaaagctgttttttggaagtggaaaacttgtctaccctataatagctaattaaaatatatgctgtgggatctttgtaagtagaagttgcgcaaaaagatcaatgaattggcatctgaaatggtacaggttatatgatacttgcttcaatatgcaagggaagtatttaatgcatcacgactgttgcatgaaactgcagcatattgttctgtgggaaaatatactggttatgaaagtctaaaaatgttcttacttgtagaacctggttttccctaattgtgttgcatattattcttttatgaagtttgacatcatactattatcagctgaaacatatttggagattcttcttgtcggtttgcccctaaagtataattttttattttgtccctaataaaggaattattttttcctcacatttcaaaaaaaaaaaagaaattactttttcctaaatttggctggcacatgattctgtgtttttctttaaacactagtgttcctctagattcttgtttgttcattagagaaaattatctggcttgttgatgtaggtgaattaaatctaaaaaaatttcaaaggttttgagtgctccttgtttctgaatttgacatctattctgtaatttttcttttcatacttatctaaaaaaaattattttgctttttgtacagttaagaagctatggttttcttctaagatatgaggttcagtggaaggcacatttgatgtttgttattgtttactgaaaaatgttgttagcatatgaagatgttggcatattaatggatgttaatatagtagttatcaagattgaagatctttattatgtttatttaaagaaagaatatcaatatgttgttgtttccaaattcttatatgattgatcttactaatctggtatgtgaagatttatagctaaaagtaatatatattgactgcatattaacctatgtggttgaaaacttggtcgagatttccctcatttttggttttctttgtaatttgttgcatgtgaggctctgaaaagagccttgttctgggggtaaaagagagctgaaaatatgttttcttgattttggtgcattatagggggttgattaacgagattgacaaacaattcatagatattgtggagtatatagttttcagtagcctgttaagtttctgagatttgtagattcttctggcatctttcttttcctttcttttaatggtgtttaacatcctccagtggctttttgaaccaatctaactttctaagaactctaggtgaatggaaaagagagagctttttgttgttcttgacatggttaagagctgtattcttttaataaggaatgatagtagcagcattatttgctttaggtagccattccagtggagggaactaaaaatagttattaggcagtaagtcttctattagtatccacagtagctctgaattttgtttcttttttttgttaggagtagcttccagaattggtatgatgtctagaagggtagtatatgagatgtaggggagcaaggttgatatggaattaaacttgcagtttaagtttttgagttacaaatacatggctgtataagtgcaaccaagaaaattatacagtggattcttgttaattgattagacttatttcattttggattatcttatcaaagattttaattcgctggacatgtatggaaaacttgcccatgcttttttcatggattctcagtaacattgttcagaaataatgattttggttaagatcactgtcatatgaatgtgcagttaatttttaggatggattaattagttgggaaagtatttgtcatggtacttgcactactttggggtttttcatttttggagcttgcgcaacatctatacagaacttcaaaatactgacacgtgtcccaagaataaaaaggtttcaaagtattgagaggattaatatatgaaatatgatttctttttggtatgtaatgctggatctgagaatgataccattcaggatttggcattttgcaataaatctgatgggaaaagaagtttgaattgcatgttcagttaaaccatgtcccgaaaactttcaaagtattaagaggattaagatatgatgtaaagaattttcttggagcatgtagcacgcgaacaagcatgatattttttcaggatttagtgctttgcaataaatctgataatggaaaaggaagtcgtgagttctgtgaaaccactatagatggtttgttaaccaaattttatttggatggcatcaaggagttgcatacggatggttacattatgtaataatgattgctttataaattgaagggagtcatgcaagatcattattattttctaactttctgttggcttatattaaatcaatttcttatgatggctgggtgattagcaattgcttatttgaaaaaagtgcttatcaattgccagagtggaaaggtgtttaaaaaggatggttgagttccttttcacggagttccatccaaaagaaggatgcactgccaagtttgtttctttgcttgagaggcagctgctatgtaattttaatagttgatcatttgaggaagaaagtgaaagtgatagttaaccatttttatcttgttatttcaaaaaatatttttatccaccaattaggtatgggttaatacactatccattaacattacttgataactacttttttgttcagtagcgagatgttccaaccattattatcttttcactagagataacagaactgtcaagaatcttctctttgggttgtcttgggagtaagaaatgggagagtttttaaatgtgttggaaattgatattgaagataggtcgcgtaatggacatcaatttgataatgaggaagtcatagagttcaaactgtatttgttggtgttattagttttgctttttgtatacaggctccactgtggcatagccttgtaggttagtacttctcactttatgagtgaggtgaagggttctatacaccacttttgttataaaatagtagctttttacatgtcatgtgaaaatcttttgcctcttatgttgtatatggaaggtgacgtccatatgaaggcgaatgctattgcctgttgattttgcctgcagaatgaatacattctaaatcaggttgaagaaagggcgtaaatcatgaatcatcattttttttatatgactcaaatattctagctgttaaaagaaaaatctgagatatgaattaatatttaacagagattatttggtttttgcaatttgttttttgcattagttttaaatcctgaattcatagtcctgttctctgcactctgctaggcttactgtgcttatctgtaaaagtggtttacttttctcttttctatttccttggctaaatgtaacattagtttaagcaagtaaacatattcacaaagtatgtgtggttttcatttttaatgtcattttttaattaagcatgtctttttatttttctacttagaaagtttttttttttaaaaattctttttgtttctttttttcacatatattttcattttgttgtttgacaatagcagtcatgatacctgctgttattattctatatatacgaccttactatttcctaaatgaacgtctcttgtattgtattttagcatataggcttgttgcataagtttttgccacttccttaaattttggatgtcttttttattactttcgtataaattccaagtaacctgaattttctggaacttgggttctgcctgtttgaggtcatcctactgaggtttttggccagtctgaattctgaattctattgtggtggttacctgtttatttaatgttaaagcccacaaatgaggcttctcttccctcccaaaaaaatgtggaatgatgtcggctgtttaattatcagtgcatttcaactttgctgtttttcctgaaatattttgatgctgaactccttgctttgctgtttgtctcctgttttccctgaaattaaaatgctagtgggcttttcattttagttttctctagaaataattgagcattggtctttcagaacttcattggacttggctccctctgcacgagttatccaatctttttatagattgcagtcaactgtttcttgtcaacaaagcagtgctaaattgtattcagtaatcattagtttacaattagtgattgagacaacctctgtgacatggtctctgtgtaatacttcctagttacctacactgtgatccaatctgaggcctgaacctcctgttttctttaatttctgtactgcaaaacgaagttctgctgccaactacaaaattgtcattgatgaataattgtgttcttatatctatactttataatgtaaatagttccatatttaagttgtttaaattactgttttagtttcagatgtaatggctatattttgacacatcaaggttggtcctctaatggttaaattgtctttttatgaggctctttttttgtctgctgctggtttggtatttctccttctcttgccttctagcagggagggcaaacctttgggccataatacgatactgggggcagacaccaccacattttggttctcaaaggaacctatgtatcagggaagctcagctgttcctgggggctacttgtgaaatttttttaacactttggcaggaatggttgcttgtttagtgcttagtgtgcagattttgagatgaaattttctggtattagtatgatgggttattgtaggaatttggttttagggtgctttatagtgaatgaagaaaatcaattaatcatttctattattttttctttatttatgtgccatggtaggatctgtttttccaagagcttatctttttacgtgcttttagggtgtagtggtgtttgtgattatatttaatgctatggcttgttgtagatggtaataattccaataatgaacgatattcgtatcccttggatatatcttacctgtagctaggtagactacctacaggagttggtgttgtgatttgtggagttctagatgaaaatctggtgtgggcttttgggctggagtggggtttcgtatatcctttatcttgaaaattcatgagtcatggcaatatgttgtcaattacattataaaatatgaaagttgccttaattgtatcagagcatctatgtgaaatagaatgctgattagtggtcattggtgttgtgatttttgcagcacttctgggtgcccatttggcgaggg

SEQ ID NO: 8771 - DNA, 1468 bp, Carica papaya
  Intron number 2 from transcript evm.model.supercontig_8.10 7 (locus evm.TU.supercontig_8.107) derived from phytozome v7.0 (chr-ID supercontig_8; pos 712828 to 714295 reverse s trand)
cagaggaactccgttcaagttcacccttggtcaaggtgattgactgattcttctgcgacgcttttgctagtgtctgcgtctttctgaatgttatcattttattacttcattgaatattgcgcctgtagggaattcaatacagtgagtgttctgattgtttgagatttgcgtgaaggtaggcatggcgggtaggacaaatgcagagtttctaaattgattcatttaatctaaaattagcactttgtgataaagaggcattttctagaaatgaatctatcagctaattgcaggcgttcgctgcactatctctatgttgttataagaggattcatcaaaacacgattccttcgcttagcacagatttatctctaatttcaattattatgagataaaaagttttatccacatacattttgttggggtttgatatcttaggttagtgtatcgtggtctaatgattgggtatgaaaaatgttgaagaatgctaactttctttcctcgttttgtcttcatgaattttatcttttttcatgcttaccctgaattgcccccaaaaaaaaattgatgtaatggtcactggttgattagcgcatttatggaaattcttcaaagaagtccaacatgtatggcctttgctcttctgtggcctttttggaactgcattttaatctgtctgacacatactgattgtaactttggatatgatctgtgagactctttaaggttttctcattatgttattggtgatgatgacatattagtttttataaaaaattactaagattcttgcaagttgcaaagctgttcggctagtccttttgagtagttgctaggaatctgcttatgttattatacagttgctgcgtttgttcatattggttaacaccgcactagcagttttgccagttttggttatcctgctgtttggtttttagaaaactgtatttagctatctgatttcgttttttacttactcctctcaatgataaatctcctgggacagggatttttgcaaattttggatttttaagaatattatcatgtccttaggtggaaaatcaatcgctgttattcttttactaatttgtttatactactgattctggtttacttcaaaaatctgccggtatttccttttactgtttagtcataacttggaggcagaaaattttgggtctcctcactttatcttcttttgatggttaaaccaaatagtaaaaattaattgtggagggaaaagtaggcagcttttggtgcttgatagggtattgtggtgttattctactacactcagatagctattcacgggacccatttcatgtcacttgaagtaattaactatatatgatttctgattttcagttgcgtcattttcagtaacaatttagtctttatggcttctcttttggtactgaactcctttcttgttacactttttggttgtgtttgtaggccaagtaattaaagg

SEQ ID NO: 8772 - DNA, 3680 bp, Carica papaya
  Intron number 10 from transcript evm.model.supercontig_28. 33 (locus evm.TU.supercontig_28.33) derived from phytozome v7.0 (chr-ID supercontig_28; pos 509316 to 512995)
catatcaattttcttcccatctctactttgctaaggtacataagcctctaccttgcaatctgaacctatttgtgtttgcatgtgtatatgtttgtttaacatgtgctatattaatgaaatgagatggaatgaaataataacaccagaataactgaccttttttgctttgttcttttaaaatacaaaatgaaacctcactagcatgcacgacattgacggatgtttaaaatttcggtaagacatctctagctttgggtcgggtctcgggcctactcaaagagaagtcccatagggcgaagtttgttggaactttggtgatgcaaattaagatcatcttaatttggaataatattctattgaaatcttttgtgattattattattatcttgtatttttaagttatttgggttatttagatttgtataggtatttaaatattttaatttctttttagatagatttcaaattttataggaattataacattttagtttttctcttttatatttgatataataatattgtagttttctttaggtagattttaagtactataggaatcataatattttatatttcctcttctataatttttcttattcattgtaactagtgtctatacaaaggctattagctactaacgaagaagggatgaaaattatgaattgctaggatttttattccctattttctctttttgtgtttgttattggggttgtttttctgtctaatctatctcattaattctacttctccaaatatttcttcatcttgatctcgaatctcttcttatctatctttgttcttcgattctgttccttatattttcctctatttctctagtttgtaggataatccaggttctactataattatcctatatcagttggtatcatagttttactcttattactaccttttgccactttcttaagctacaaaaaaaacataaaaaaatctcaagtttgtcactgcatcagattggtcaaattgcaccttagagtcacttcagagttgagtacctttgactcgaaaaagaatccatttaacttcttgttccaattcatcatataatctacctgattatatattttatgtagtaccaagttttttgcccctatggaggcatagagagtattgagatatgatccacaggtaatttgtattcaatgtcaatgtataagaggtgttcttatgtgaaaaagctctctcaatgaccattgcacatataaatatcaaatatgtaacaaacttatattcaaaagcttggcaagggtgagatcttctgcaaaagtgaaaggctgagtttaagagtaaaactaacacttcttctgtgttagaagatgaaaaacttgaagttccttccataccaccagtagcagttcaagagatattagttcctgttgaagttgtttttttttacatgcttgtgtttttcctttcctaagaaaatgtttatgctgatggtgttgagcaacttgcttctttcaacaattttgttctacctttgccatggtggttcctgttcataatgactacattaaagagtcttgggataattttgtttttaaacttcagtaggtggaacctataatttttggttaagcttaatttttttttttagtttgaagattatctaaagtctcaactttttgaatattttgaagaacacttttgagctttttctatcttgatgttccacctcttcaaaattcgactaggagctctcatcaagtggaatagaatgatgcataacaagaatatcttagtttggagtaaattttctattaaagaactctttcataatgattattattattttgtattttaagttttttaggttatttagattttatttgggcatttaaatatttgagtttccatttaggtagatttgaaaaattttacgagttagaatcttttaaatgtcttcttttatgcctgatattataatattttggatacattatctaattagtttttgaaatttgacacttattataatttaatattttcttagtaacagtttagtccctaagattttttatttgttttaaatatttagtttttttacattttctaatagaaaagttaaaatagctaaatcatgtttagatcctttagaaagagatcaaaataattattctaactaatttaaattaaattaataattatgaatttattaatttagctaattagtcgaagtcaattttttaaactgtttttaaaacatccaaatatggtttaattgttttaacttttcctattagaaaatagaaggaaaatatatgtttgaagcaaatgaaaaacatcaatgacccagttgtaacaaaaaaaaaaactagaaactaaattgtaataattgtctaactattttgttagtttgctttaatattttagttttttcagttgattttaaatattagagaaattagaaccttttagatttcctcttatataatttttcttattcattgtaactaacgcctatacaaaaactagtagctaccaacaaacaagcgaagataattaagaatatcattttaaaggttttattctttattatctctatttgtgtttgtttttgggttattctatcattgatctctaaattccttaggcttatcattgttcttcttttctcttctgcatattttcctcaatttctctactttataggataatttggttctactgttacttgtcttacgtcatgtgcccttggtggtcaatgattaggctcatcaaagagaatctcacgatctcttctctaaattaagtaattgttggatgctttattcattagtaatagatatttataatttaggaaataattaaatcattataatatagaaaataactatgtaacctaaacaaatacaattaaacaacaattaacctaaacaaacttcctaatttaaaataaagtaacaccttatgctgggaggaattttagtataaagtcccttagtacatccgagtagccaaaatccttatcagaagcagctaggagtcctatccagaagtaaaagctgaaggtgtagtttctccaggctctgtggattgccatctgattggacttgttgtggggcctcctctggtgtacacgacctcaaaatttgttatagggtgaaggttagctgatatgcacataacgtcattcctgttgatgtatttttctcttgtcttttcctaatagtatctattttattttgtctgtaaatcagagggaatagtatttatttcactacaaaaacgaaagtgttcagaaagttagttaattattcctgagtatttcaattatttggaacatgaactagattcaattgtatatcctacaaacactgagtttttatcttcattttgtttctctgagatgtctagaattggttcttgtattgctctctttcaggttagaggctctgatttgcatatacatatatatctatatatatgattacatgatactatgtatataaatattctcttggaggaacctaacatttttaattgtcactcaagcaaaactgattaatggtaacatgccacccatttgtttgtgtagtgctggaaaaactgaaaagaaagatagaagtactgctaaatgtcagctgttttttttgttggattgtatagtgttgataatattcatctaaatacaattaatttgcaggatcatt

SEQ ID NO: 8773 - DNA, 6029 bp, Carica papaya
  Intron number 2 from transcript evm.model.supercontig_121. 6 (locus evm.TU.supercontig_121.6) derived from phytozome v7.0 (chr-ID supercontig_121; pos 23079 to 29107 reverse s trand)
atagaccgcccattggtccaattggtgcacacttggtaagtgctacataagatttgtacgcataacttgctgttgttttgatgcatttttatttgcttggtgtttttgctttttccatgtgtcctttttttttgcgggaggcctcctaggaactcattttgacattgaacaactcaagaataagatgctgcatgatcgtcaactttgccccttttgtcttcatgataaagggagcctttaatcatctctttgtctggtgtacagagtggagaagggtatggaatttggcttttagccaactgggcattcagtggatggtgagtggtttgtcttaccaaagtccttgcttgagagggtactgatgcttgcaagagcaatcattgcgcttatcctcactccatttctcagactatttggataaaaagaaagaggactttgagggttatctagtttttcctgaaaatgaattatcagtgatgctctcttcatctgagaagatcttcggtatcttgactaattctcttttctaatatcccactctctggaaaatatcattgccattaagccaattaaggtgttgcatcagggaatccattcgcatctcctgaacaaactggatttcagagtaatagatgagagaggggcggagttaggtagtcatatcccccaggaaatacactcataggaagaaaacagtacagatggggattaagtgtgtagcgcaaaaacctgcatgaaggaggagaaaacaacctaggaaaagagagtgtcagatgagaattgttatatggaatgctaatggtttaggtaatgagcttaaaaggaagaaaatagaagaggtgctggggacgattaatcttgatatagtcatgctctaagaaacaaaaagacaagaggttgagaggttaatcgtttagagtgtgggggtactcgatataagaaatggggagctcttcccactctaggagcttcaggaggaattttaatcgcatgggatactagggtagacatgttagtagggatgtttgccttgtatgttgtgttgaatatgaaagggaagggttgttgatggttaacctgtgactacaaacccactagttatagagaggtgtcatttttctgggatgaattatcgtctttgccaggtctatgtaatcctttatggtgtatcatggtgacttcaactcctgtagcttttctcaggaaaaaaatcggaggatgaaggagaatgaccacaccatgcataattgtagtcctttcatcgatgactgttgcctgagagacttgcccttgtcaaatgcttaattcacttggacaattatagacagagagttgtttcctctcactagattgttttttgatatctaaacaatagcaggatagtttctttgatttgttgtagatggttctacctagtcctttttagattatttcccaattcttcttgaggctcaaagggtaagttagcccccaaccattttaggttcgtaaatgtaacaaaaaaacaattgggatttaagaatggggttagagaaaggtggaaggatgatgatggtgcaaattgggagagtttcaaattgatgcataaattgaaatgtttgaaaggcattatcaaaatttggggtaaagaggtgtttgggatgtactcttagagaaagcagggattttagagtgttaactaccatagtttattatttaattattttaatttattatttaatattatataattagaatttcattaaaataataatcttatataattagaattttagtgaataaaatttctctatcaataggatagaaattatataaatatccaagtgtaacaacctaaaggatgagaaataaaattattatttttcgctaaaactatcatgatatcagagacaaaaaaagttattttaaggttctaattataggggtacaataagctgggttagtacccatttatccaaatctacacttatcaccaccctaaacagcgtcagagactcattaccggcctccttccgactcaggttagagagagaaagccatagaaaaaccgtatgtgattcttcccgtcaccttcgaccgccacctgaaggagaaacagaggcggtgggcggcagatcagaccacaatgtgtggcagcagtgcggtgactagctaaactagaagcgttgcacgaggagatctacccagacgcggccacatgaagcctgaaaatgaaatatcgcggctggttggaaaaaaatcacgcgacaagcaatttgcttagatctgcatgactgaagaggaagaggacgagacgagcggcaagatctgtgcaggttgacggccagaaaaccgaagaaagaacgcgcgactggccagagaagacaaaccagtgtgacggcggtcagattgcgtgaagcatgatctagggcggtttttggtgtcctcaccaatccaaactggatttgacgattcaacgtattttatgatgttttcggtgatttccagcaaaggcaagtggtggttggcagcggcatgtggtagttccagtgaaggcacgtggtggctcgatggtaaggtgtctggcagtgcgtggcgacgcatgagaattcgtgtggtactccggtggagctgaacccgagccggtttaagagtcaagcccgagctattttgagtcgggtcgagctgttttcagacaggccgagccgttttgagacaagtcgagtcgttttgagtcgagtcgagccgaactgttgcctgacagatttgattccggtttgcagcaccttttggacatcctttggtatttgataaactgcaggatgactctttagagtttggtctgcaagttgggcatgtgtaatatctctgcaccagcttgaggagggatgttaactactatagtttattatttaattattttaatttattatttcatattatgtaattaaaactctatgagaacaataattttatataattaaaattatagtaaaataagaatttttctttcagtaaaatataaattgtataaatacccaaatgtaataacttaaagggtgagaaataaaattattattttttctccaaaatcatcatagagaaaatgaaagatcttaataagttggaagcagagggaaactgggtcatcttaagaatgagatttaagtggtggtaactaataaggaaagaagctggagacaaaagacaaaattaaaatgggtgaaggaacgggatgctaatacctgcctctttcatagggtgatgaatggctgtaagaggaacagtgtcatcaaggaataagaactcaataacaactaaacggagaatagaggtgaggtcatggtagggagatcaataggccttttcacaagctgtatctagaagaaattaatcacagattgtttgttgaagatatagagttggcaccaatcccctttggcagtgttgagagaatggagagacttttgaggaggcaatgagtttgggacttggatagcaacctagtaccagaccccgatggatttactatcgagtttgttaaggatcactggcagcgttgagagaatggagagacttttgaggaggcaatgagtttgggacttggatagcaacctagcaccagacctcaatggatttactatcgagtttgttaaggatcactggcagtgttgagagaatggagagatttttgaggaggcaatgagtttgggacttggatagcaacctagcaccagagctcgatggatttactatcgagtttgttaaggatcactgagatatcgtgaaaatagattaggttgaggtattcgaggaatttttcataatggtaaaatatgtaatagcatgaattatacttctatcaccctaatcctgtaaaacgatggatttaggaagttgtctgattataggcctataagcctaatgattaacgtatacaaaattatagcagagattttatgtttaagattgagcgaatctcttgatattacaattttcattcgtcagagtgcttctatggagacagacagatcattgatgcatttttagtgactacaccaaggatctaaaaggaaaggcttggtattaaaagtagtttttcaaaaggcatatgatatggtgaattttgaaattcctagataggataatgaagagaaaagggtttgagaatagatggagaaaattgatcttagaatgtttgaccactttctgttttgctgcgatggttaatggaaaaccacggaaaatgagttttggcctccagaggtttgagataaggggattcattgtctccttttttgttcactcttgtggttgatgttttgagtagaatgctcttagaaggtgggaggaggtgatgtgtcaagggccttaggtaaggaaggctgggaggaggtgatgtgtcaagggcttgaaggtagggaaggataaggctaaattgttacacctctagttggaatgtctttgcttgaatctatgtctctcatcaagtctttggaaggccacttcccaggtgtactcatttttcctaccacatacccgaatacaagtgggaaattgtctttcatcgaggttttgagaagactattggttggacaatcaatcattagcctctcagttcccaaggttatatatgcttcttgaagacctcatgcttacatatttcacttcaccacaacattggagggttggacatcttgggatttatatttccttcggaaccttttagataaaaagacccttgaaatgtcgaccctcttcaatgtgctagcatccattaacatttctacccaacctaataaaagattgtggtactagattttcttgtaaatctctctttgaataccccataaataatcccgtctacccattgctcaatgttgcttggggattttagagtgcccctgctccttctaaggtgaagctctttgcttggacagtgactcatcaaagccttaacatgaacgatctaattcaaatacaatgtcctaatcgtgccttttctcccaaaacgttgttttatacttctgtggtgatgaaagtacatgctcttgtgttccttcattatgcggtggcttggaggtagttgactgatgtgtttaagtttcttggttgctattgcgttttgcctcctattgaggatagcttcttttgcacttttatgaatggagatgggataaggaaggctgccaaccttttgtggcaatgggtcctctttgcaggtttttggtgcttatggctggcgcggaactcgattatttttaacaacaagaatgctccatattctaatttgtgggagcggatgacctttttggtttccctatgggccaaaagacataatttatttcctgatatctgcataactgacctttactgaagatgagatattatcatacacgagttatagcttttatgtttattgttttttctctgctcatctttttattttcctagctatattcggtcttttctttttctcttgtttgatgaggaggttatcacttcctccttgattgtgttccttctttccattctccatgatatcttcttctttgataataaaaaaaatagtctcccactccatcttttacagagcttgtcggtgcctggctgatgagacttttttagagggaaggggataggtcttgggtttgcttgttagttttttgttgcacacatttaggattttcagctttgcatgtgtggacattgtcctcttcgttctggcatttgatcatatgtttttgcctcttcctagaaactcatcatgcagtttattcatctcttaactttttgtagacctgttctaataaaatgctgaaaagaaaaatcctcaaaggatactattttctttttctctgcatattagaatccagtattctaatcatttagctagtcgattttgctggaaccttccgtaacatttgaagaggtgatgttatattgatatgtaggttctaattgtaagaatcgttttgttggtactcatgattatcagatgttggttagctctcaagcacttgaatttcttatcctgcagagattggtca

SEQ ID NO: 8774 - DNA, 1605 bp, Carica papaya
  Intron number 21 from transcript evm.model.supercontig_3.3 89 (locus evm.TU.supercontig_3.389) derived from phytozome v7.0 (chr-ID supercontig_3; pos 2714886 to 2716490)
ggataactacaagaccacgttacattcttgcaaaggtattttactcagttcaaatggtcatctgttccttggtaaaaattgaactagtggcttaaattcatcttcttcctcttctttccctttgcaaacataagtttactgtagattcttttattctgtatagacgaacttatatatacactccagatcctttctagttaaggatgttttaaatcctgcagtatattttcattaattcagctggactaaggtatggcgaaggagagctcaatattagctttctttttccctctaattttgatgcctgtttgttacccttttgaccctattgtagtcccttttttaggatattgttatggaattttgttagttgtatgggcttgttaagggaaaatctaaacaatcacctagagtttaaagtgctcaagaagcttttttttaacaaaattttatgtgtactttatttatattacaattctgttttcatacaagaaaaatatttaacttccttagttggaataaataaagtattacttctaataaataacttccttagttggaagtaactaccaccacccaaaaaccacctataacttccaccatatcctagaaactaagaaactaacagcacactttatcctacttatcctagaactacatttacacttatccctgtaactacttctattattagataaaactaaataactagatgataaaacaaaaataattttgttctagcagccatgtcatttctaggagccatgtggctcacaacaaatctgctctatttatcactgccaatctctccataatggttagatctcagacaactgttgtcagtctccttacaatcatctacgatggctttatcatattacaaatcattttccatcacgaatcaacatcagcatcacaattacagtggataagtgcatagctaaaaagttcaatttttactgataaagaagtacgctatttatgaggcattaaaggggtagcacccacatgtgaaagttgcacttcaatgatcatgatttgatgtatgtgactggacataaaaatatattatgtgatgtacgtgaacaaatttcagtttgtgtagcatttatagggttcagaatatgcagaggtaaagaagaagaagatttattgggttcgactggtttcttttcaagctgagaaaatgaatttgtatccatgcttgtttaaaacacatgattctgtttactgtaacagttatttttaagtgtttggcagctgtggcaggaagattgagacttgtttcttattctaagaatttcttacttttttttgcagtttcttttcttctccttagaggagggcttttgatgactatttcctggtcatacatattggcccctgggcatattttctttaaaattttgcaaaatcccttagtcaaaatagaaaaactcacattcattgtatttagggctcatgtaggattctattttctcaagttggatattaacataaaaaaactgtgtttaactgccatgatgtgaaaagaacaataatatttgctacaaatacttgattcttttagggtggaatcacatcatcagatattgccacgaaggc

SEQ ID NO: 8775 - DNA, 2770 bp, Carica papaya
  Intron number 2 from transcript evm.model.supercontig_1158 .2 (locus evm.TU.supercontig_1158.2) derived from phytozom e v7.0 (chr-ID supercontig_1158; pos 10035 to 12804)
tggagaagttttaccaacagtgtgatcctggtgggtttactcgaataatacttcgtctttcttcttttttttttttctagctttaatattctatctctgaattttctgggttttcctttgggtgcttatttttatctggtttttacaccatgttgactgtatggttttgaattatagtggtgagctgggttgttttcagtggttcacttatataatccctgaaggaaagaggtgttttcaggcagttggttgcaactctttttttcagtggctcacttattgcgccttttttttatccattttttcctatattttatctatttttattgctttcttactctctaatagttgagtgaagttgggaaatgtgtagtacagttgttgcgcctgttgcaatgacccactggaaatttgaatttaaggtaagagtaatgcaactgaagtgaaatgaaactgtatttggtttctatccgaactttaaacaatctagggaagttacaagtgtcatatgggataactggaagaacaaggaaactggatttggttgatagaaatgcacgatcttttatggttttctgatagcaatcgatgatcatctagaaatcttacaagtgtcatagtggatgatagaaacatgcaaacatttattgtttccggatagtaaccgcaggccatctagaaagcttacaagtgttacgggcagaattaaatgaacacggtaactggatttgtcgaacaacgtacttttatttgtttattgcatccctgaaatcaatccacaagtctgcctgacagggaaagcaccatgcagcagttcaatttttttaaactgctagttctgctatttggtgaaatagggcattcaaattttaatatgttgcgcccataacattcaacttgtattctgccggatggcgcagacccctttcttggagaaagaatacttaattggaatcctcatttaattttttatttagaatacaaatttcatgattgtcaatgttttttacgatttcgtgctttctccaggagcttataaatgtttcactgttattatttatatgtgcatttatcactttgattgcataactcatcatttatttcattgactataaaagcgaagtgtttggagtgcttaattctataataactgttttgtcattgataaagtactatctttttgggggggccttcacaaagtcattcttatctattgattgcttggtaagagtttttcatctttgcaatttttatcatgcccccattctgctgcttgatttgggaaaattccagatttctagcagtgccttctggatggtggctattatttacaaaatctgtctggagtgtggaacttaatacattttcattcacaacatgatattttaatactagctttttttagctcttgtttttcgtcctccaaacttagactctcattggggttccagtgtataatgtgttatgaatgtcactacctaggttattgaattgaaaaaggatacatagttctgtacgtctaaatggctacctgagaagagtaacttgtaatttgtagttagtagtagttgttgaaatctattatcacttatttgtgattaactttttaagagtaaaaaaattattgtgattaagattttgttgtctacctagtttgtttccaaatatgccattttatgatcattaggatgtctaccctagcttgtgtctagagcgtaacaattcattctacttttagattattgtattaccttaagcctttgagagctatcattctcattcccttcctgagaatttttagtttttagttttcctttcctgatataacacaatcgctcttttatttgatgaacacattttcatgttgaagttgcattgtgacataatgcaattttatgaactgtttaatatttgaatgctctggtacagttgagctactcctacaaattgcaatactttactatttaataatcaaactagaatgttcattgctataaaaatcattcagtagttttactctgcttttctgtctatctgtgtgcatgtttatatctattccagaatgtatgctgcctttgctttgtgggtgtggccattttaccggaggtataggtagctatttacctctatgctaacaggatgtgtgctatattgcttggtactaatatattgcagctttactggtattaaatattctgtaaattgttatattattaaaagcatttactcttgctgtttgcattcaagacatgtttctgtgtcctgaaaaagacacaatctaatttgtgactgctaaactgttaacacattcatttcttatcttctgagtctacaattttctaatagatgatattggaagtctactctgtatcggttaggaatcacgtatgaaactctattaagatatatcaccaactgtctttccttgtctcaccttgtcttacttttcctgactggagttgtaaagacgcccaaagtagttaagatccgagtgtaatcaaattaaagttgatcacttactgcagtggttgcttcatgttgaacttattcttgaagagtctaaatcagttggaataagggttctaagcttatgttactttctggttgtgcccttttagcagcatataagatattgaaaatgttccacttctccttgtttttaggtttagctatgctcagaatgtagtagaattacatatagtttctgaatattttttttggattgccctatatagagaaagagaacttgtgtctgtacgggctcccaaat

SEQ ID NO: 8776 - DNA, 1390 bp, Carica papaya
  Intron number 3 from transcript evm.TU.contig_29343.2 (loc us evm.TU.contig_29343.2) derived from phytozome v7.0 (chr -ID contig_29343; pos 10333 to 11722 reverse strand)
tgggcaaactgttaaagtggctgttcttgctcaaggtagataatcttctttgatgtgtgatgagctattacttgctgcttgtttctcatttataaacagcagaaatgatattcttcctaagaggacataattccatggcataattagatcttgatattgttaatacttttattttagagcttcatagtctatttttctcttagtgactagaagtctttgtttgagggagtttgcgattgttattgtcagctctatatgagggacgtcacgttctgctttttctgattgaattctgtggattatgtacttaaacttggcatatgttcttgccaagttaattttttattttttataaaaatttggtttacaatatcttaaaataaggaggtctagaacaaaggtttcaaatacattttactgtttttgtagtgtttaaattccttcttttcgcatggggatttaatgaccttgtttgcaacttttttttctgcacagcctgaagtatatgcatgcttgatacttcattggtctgtctttgaattgtatttagattcgggtctatttggaaacttgggatttccattccatgatgagatggattacattctttcataaaaaagaaatattcttagagaggaatagaaaggtacaatagaggaggactatagttcctcccaaaagagaaaaagagacagaaaagagtaaaggcctggataaccaaaaaaatcaatataaaaagctggccaatctctaagtaaaagaaaatgtcattaacaaggtacctagggcataccgcccatgtgcaagaaaaggctataaaaattgatgataggtactttaagatggattaatacatgttgacgaatctcttcctgcttgttgattggtaaaagcagtgtacctttcatttgataaatactgcggtaacaaaatcccagagccaaacttcaaaataaattttgtaaagctaagatagaaagaatggaagtatgtgcaatcagactagatgagctatgtctgcatactatcagacaggttattccccatcatttgtgctgttcttcttactatctatctgctatgaaagagttatttggctagtggctcttggacgattttgagccaaagtattatgcctttctctgtcctttcctccatattaaagatgcattttctttttcttttgtcgtcctttttacttatgaagataagtaaataaacttttctatctgtttgtgtggtacgttgagcagtatccttgaggggtgctttttgtccttgtccttcaatattatagcactgtctaactgatgatttgtagatcttctctgctgtgtattaacatttgtttactgcactgttatattcatcttggcaggtgaaaaggtcg

SEQ ID NO: 8777 - DNA, 795 bp, Carica papaya
  Intron number 3 from transcript evm.model.supercontig_244. 11 (locus evm.TU.supercontig_244.11) derived from phytozom e v7.0 (chr-ID supercontig_244; pos 253109 to 253903)
gggaggaaggtggcaagacattcatcagtctcttggtaaaagttacttatatttcttgtaaaaagagcataaattgcttcagttattgtcactgaaattaaatttgttgaaattcttcttccaatatccagcaattacagtgcactttacacttggaaattagaaataaccaaaaagtttattccctgctttcaagcaaccaaagaaatcttggttatttcctaggatcaagtgaccacgggaaagaaggaaacttacttgcattataacaagttacggtctggcataatcaaacatatagttgcttttcataattattttataggacctttttcaggtttagaaaacacgaatcctgatttgattatctagtattggagactaaactgaattactttggtggactggagtacacaaatttcctttgtattgcttttgtagttgtcttgatttgtaaagcctcagagaccttttgaaatcatttgatgaccaaatttcttagacatattacaaattgaaaatgttagatattctattaaattgctactcaaaagatttgcttgtcatattggcttcagttgatgttcaaatttcttagacatattacaaattgaaaatgttagatattctattaaattactactcaaaagatttggttgtcatattggcttcagttgatgttcaaatttcttaggcatattgcaaattgaaaatgttagatattctattaaattactagtcaaaagatttggttttcatattggctctggtctaattcgtgtcttcttacagaat

SEQ ID NO: 8778 - DNA, 1298 bp, Carica papaya
  Intron number 5 from transcript evm.model.supercontig_34.3 7 (locus evm.TU.supercontig_34.37) derived from phytozome v7.0 (chr-ID supercontig_34; pos 255583 to 256880 reverse strand)
gtaaagaaaacgaggtgctttctgatattacgcgggtaagtcaactggtaacatgtctgttttgacttcactagttggtatttccaattaattattctccactagaaaagtttatcatggatagcaactgcctagatctgtcatgaattgttagcttttcttttaactatcatggccattcttaccatctgccgaaaaaaaaggttccttgccaagaggtgatttgcacctaacatcatttttaaagttcttgcacatgcatataaacatgttacagagcacttcggccatatgtctattattcacaaaatttccatgtttttcttcatgatatttaaatagaaagttgatttttctcatatatttctgatgaccctatgatgaaagtagtacattaattctactaaatatttatgtattttttatattttatggattatggtagatagtttgtttaggaactaccaagtgttctgatatcgatatgttttttttgggggcaaaagatatagttttattatttcttattaagtttaatttcctaaagtattcttgacataataggattcttaggaatttgtaaatgcaagggtgatattgtgttgttggacagattgcttatgaataaaactacataaatattttctcaagtatgagtgtataaagacaaacctaatgttagttgggttctataatttctggaatgctatgttttgtctccctcttttttttcttccatttctacattctattctacctagccatgttaatttggtagagccaaatgcttatttttgatatcaaactcccaaaccacatgaattggcaagacacatttatagggattaaaagtaaatttactgggttatttttaggcactcaaaaatcagaaagcatctatacatgtttattcttgagcaatctgtcggcagtacagtatccttcatgtattttctctaatgttttgagtggctaaacgcaattttgtgattatggttgtctttgcacatcatgaaattgtgagttggatttttttttctactttttctatagttcctaaatcctattctgccaagttacatcaattgtgaattggaatttgattagttgaacacttaaatgggattgattgagtaaatagatggagattattacatggatgattccaactgaatggtggcatatgtccgctgtacacaactctatttaattctaaatttttaagaaataagaacttttgtcttataaggattctgaacttaaaacttcaggtatacaaagctaaacgtgtggcaaca

SEQ ID NO: 8779 - DNA, 6101 bp, Carica papaya
  Intron number 10 from transcript evm.model.supercontig_249 .10 (locus evm.TU.supercontig_249.10) derived from phytozo me v7.0 (chr-ID supercontig_249; pos 169865 to 175965)
aacaaggtaattgttttggagtcagttttttttatcttgaatttcatgacataagattgaattctaggaagaatcatgcagataataattttttttatcaatattactacttccgaatcaataaactactatgaacaagataacaaacgaattcttccttccgtgaaattataattggttaggtggtgcaaataaaagaattccattttcctcttgtactcgtgtatatatgattcaaaaatagaaatgtgatagatagagtcttaatctttttacaatctcaataattgaagagtttcaagaattctggcctgtgttaaaagatgacttggtggatatgtttgaagagtttcatagaaatgactcttgtgttaaatctttggatgcgactttccttgtgttgattgctaaaagagctggagccaagaatagtagtgagttcagacccattagtctggtgggttgtatctattagttgatgattaaaatcttggcaaaaaagatgtcaagagttctaaggagtgtgattggagaaagccaacatgtgttcgtggaaggtagacagatcatggatgttgtcttggcggtgaatgaagtggtggatgatttagttggcaataaaaaagatggcattttctgtaaactcatagaaaaggcatacgattgtgtgagtttggagttgttgattatatgcttagtaggttgggttttgacggaaaatggagaaggtggatcaagacgtgcattacaacgacatcttttgctgttataataaatgggggaccctctgatttcttcaagacgtcccgggggcttagacaaggcaactccctctcaccacttctctctatcatcttgatgaaagctctcaacagaatatggttgaaagagcaaatgagtgtgagctatttagaggtacgcggatgggtaaaaatacgcagcaggtggaagtgtcccatttattttttacaggtgactcgaggattttgtgtcaaccggatgtggagatggtgcagaatttgagggttgtgcttgtgacatcctgcttcccagagtgcagcaatgtccaatacagagcagacacgtgtgtaattaatttaaaattttactggggaagttacatatgttccttacaaaatacaaagtgtatttctaaagcatcgaaattagctattaaataattataaatattatttaagctaacttctgcaaaatacaaaatagtcgtctaatagagtatattgctctcattgcattcatcttctaaggatcaatggatggatctaagcaagcatcaagggtcagatcaaggggtagattatcttcttctacatcatctgggggagatgaatttagggttagttccatgaaacttagtaaggaaagcaatattaattaaacactagtaacgttttaaaggtcattaatatagtaagtgaaacacgtgtttatcatcctaaaacatatgtttgcgtaatagagattgctgaaaatgtcataatactattacaatttgttttagaaactgctgaaaattttatagtaaaaattttaacttgaattcatttaaaataacattttcaaatctatttctaaccatagaatctagtggaataacaatcaagctattaaagaaatcacaacttatcaataacatgactaattaggcattctttcacattcttatcaattctaattattttgactcgattaggtttccattatttacagactttcgcgtgaaactgtttagacctatattagtagaggatagaggggattcacgatgctgttgtaagtggggaaatagttcgatttgcagtgcagttaattaataagattctatgatcacgacaatacttcactactgtgatctctaactgtcaatcgcgatccactcttgttagatggaagaccaatatggtatccattcacagggagtggctcaccaatggtcagtgagcaaacagataacggtaacctctccatgataacggttaaacggatttaaaactttctttgttgatttagttttatgttacaacaacagtttgttcctaaagttattctcgaaatctgtcattcatttacagataaacatataaattttattgtccgacccattaggctcaccaaagcacttttcaaacaccattcggcttaggcccattaaccaactcttgtcccattagggcccataaaatctacctcagcccatcaagacccactaagcaaacccgagcctaatcaagacccaatacccaattatgggctccgtaaagcccactagcgaacctcaacccaatcaaggcccattaacacattttgggctccttgaagcctgttaaacaaactcggaccaaaatggtccatcaaccagtccaaaggcccacgaagggaaacccttcccgcattcgctaattgggcaaggcagaggccagctgcacggccctctcggcacacgagtgtgcctggcaaggccgcaagctgtgcattgcagcgtgcccagtgtatactgtcccagcacttggatgtgtcaggacaggccctcatgcgctggtgtgcatctccacttcagtcagcacagcatgctatcaggcatacctgtggcacaacgtgccagcacatgctcgcgcgacacagcatgccagcgtgtgcttgcgcgacacaacacgttcacgtgctcgcagggcacgttatgccagcgtggcacaacatgttcacacgcttgcgtggaacggtacaccagcatgctcacattcccctgtgcggcacagggtgccatcgtgcgcacttcctgtgcgtggtgcctggcaaagtggcacgtgtgcgcgtgcgccatgcgtgtcaaagactgtctcagcacttcgggcataccagatcagtctcacgcacgcatacgtgtgtccattacagcctctcggcgcacgtgcaccaggcctagccaggcgcagcttgctgtgtgcacacagcgtgccaggggaccctgttctggcagttgggggtgcctggatagtgtcccgcgcacactgtcaatacggcacagatgtgtatggcagtcattccattgatctttcctgcttccattcggttaatgtatttcccaaaatgaattcaaccgcacatcatcgttcagtagacaatatacaatttaaacgaacatttgaaaacatgcaaacaaatcaaaatcattacgtgtaagcacgtgcattaccgaggctaaagaacgaacatgcatgcaaatttcacaaggtcttatggatttaaaatttagaaaaacctgttaaaagtatcaaattaaataccccagtccttacctaagctgtaagtgatgatttgtgtccttaaacagaagaaaagagctccctaaaacggaagaagaaactgttgcagcagcggaggtctgcttccagaaaacagaggctgttttctttgcagcttcgaagaggaattgtcgcagtgagaggggagtgaccaattaaggaaggaaaacaaggaagtgaaagaacgagccttacctctcggggaaggaagaattggtgcgtggcagaaggcttgcactgtgtgcagcagcagaagaaaatgcggtagcaaaaaatcctcaccgaaactctctctttccctctggtttttctttctttgaagaattgaagagaaatgaggaagaaagagatttaaataggtgaaacagaggcgaggaggtctgttggatcacatgaagaaggggttggctgtcaatcgggtgagtggccgaccgagacaggcctggttccggttgagacgtgccacgtgttccaagggtgcagcagggaggtgacggcctgcagtggtggtcaattggccaatgaggctcgaacagagcctgttttttgcatgcatgcatgcggacacgacatgccacgctggtggtaaagtgcccccgtgtatgcccacggtacaggtctttcgcgggcaatgcctggatgcggggaagaactgttctgtgggtcgagtccgcgtgtctgcgaggctggggcctgcagacgggggatctttcttcacgtacaagccacgaggcatgctgggggattttatcctgcagtcggggatcttgaaatcctgcgaaccgttttaggggattttgggggattttctcttatgcattcaaatgtaatattaaatgtaaaataagaaatataaaaatgaagaatagaagatttccaaaacgaaacaaattcaaagtactttgagcgttaggttacaaaacgagggatgtcacaggtatgattggggaggagttgtgggcttgggcggggttgaggagaatagataaaaagttaaatatgcttatctccttgactgttttttagatcatttagaaggaaagggataggagggtctctgaaggaaaagaaaatgatattttaaagattcgggatagatagttttgtttatttggatcactaagcttagagcacgacttgtatagggtagatggttttggatacataattgattgcctaacaaatatgtaatacttttgtatgggttgcaccccctttggtgcactgtaaatatcttacacgctttttatttcaaaataaataaataaataaataattgaatttatcagcattgcaatttgatgctggtttctataatttctacatgttttaaagtggttgatctgcgataagctataatatctttctctggcttctttgcatatttgactgttgctgattgtaatatccttttaatgcgagttactaatgctgttcttatttagatgtgttagataatgaaatgtttatcgcatatagtcaggttcctgtataataaggttcctattcctgtcatatgtatttctataaatatttatctcaaaaaaatatgtctttctataaatatgtagtattttacattcaaaaaaataaataaatacaatgtagtatttctctcaatacaataacaagaataatacagcagtaaatttcagtctgtgcttctatttgatgttggagcaataagtcccgaggcttcgcaatctctactcatttatattcactacttatgatgaacaaataaaaattgccaaggcttgaatttagtagctatttcttcctttcagttttaatttctgttcctactgttcattgacttcccatactcatcttgtttcattcttttttattttaagattttaagcgtttataacttcacactgttcattgattttattattcttttactttgtatatatagttttccatacccttcctgtatctaaataattcgtctgccagatttaagaaaaatctaatatcacagaaaaatcctcatatttgtgggagggtcactgtatgtttgttaagggtgtgaggggctccatactgcaaagggattattggtcccagtaaagttttttaggtaagcttcatgaagtaggcacattgggacaccatttactcattatgttcttactctcactggcttttactttaatctgtaattattgcattgatatgttccccacagattgtttaatctcatgcaatgattgaaaaaatgagtttacatcaagctccaaaatgagtcattttaagcaaaaaatcaagctgtgtgggtatcctttgtcctgtgaacaatagggtgtattgtggatcatttgaagagctaagactccacacaagtatgtgatttacagcagcaatcgtgatgtataacagattacaggaaaatcttttgtgggttggtaatatttgcaattgaagtagtaatgtgctgtagagaatgatgggcctgtgagaactacatgaaattatatgagtgcccccttgaaggtcaattcttttagatgattgttcttaccaacttaactaatcctgttcaggtggtttttttttgcttttgaaattaaaaaaacaaaaacaaaaaaaccacctgaacagaattagttaataaaccacctgttctgatggtttttttgtatgtctaactagcactatttgactgctaatttttattgtgttcctgtgatcaaaattggcttttgcaagttttgagagatttctgcatgttttgcaggttttaagtgcacatttccgttcttatattcaagc

SEQ ID NO: 8780 - DNA, 2950 bp, Carica papaya
  Intron number 1 from transcript evm.model.supercontig_60.5 (locus evm.TU.supercontig_60.5) derived from phytozome v7 .0 (chr-ID supercontig_60; pos 87806 to 90755)
ataatcacgaaattttgggccaatccttgtctgaggttagatatattttccatttgttactattttttccttctcatcttggcagcatggtgttttattttgttcctttcttagattttaacacttctattacacacgataacagatggtgctcttggattttaacatctctattacacacaatataggtggtgctactacatctttgtttgttatgtatttgaagtctctggatgaccaatttgtgcttgttgttttcaatgatctattacttttttttttaatttcccattggctgtggaattttttttttggatagctaaaacttgaaaaagttaaagaaaagaaatgattattgtaatatcttgtttggtttagctttataaaggaaaggaatggaaaaaagatgatttgttttaaggaaattgtcaatgagatcctttactaataaaattataagttaagtagtgaggatatagtaaaacttttaacttcttttccctaaaattaggaggaatgagaaagtggtagttttaagaaaaatggaaagtaaatggagagatgctcactgtccctccatttccttttctaattatttttttaacccaaacaagtgataggagagtgagcatctcctctttttctttctttttcctttactaccatcaacccagatatagcattaactgaatgccaagctattttttcctctgttcaaatcacaaccttaaatttttccgactatcctatttattttctttcatcttccctcctttttagttacagtgatggctaaatgttgatacagctagcctgctatggactaaaatttcagttctggtctttgtattggcaatcttctgtgagaacttgtctcttgaatcttctcaattataggcctttattttgatatttttttaattgtagttcttacctacttgtttcaggcattttgttggcattgatgcagttatttgtgtttcaattacaaatacctgcttggtatttggttcaagatttgttataatttctagattctttctattaaaataatttcttcattcttgtttcgggaacttctggtgattttgtctcttggataaatgataaattctcaaggattgagctgattgtttcgacagtatattgtcctaggtatgttaatctacaattttaaatccaaaacaatgatattcggtgcagtgggatattattatttagatattatcagagttttggtaaaaaggcagcacatgaataagacttcaaaatcatgggtattagaagaatttgggactaaactttgccgagcataagtaaaagcatgatttattggaaaagttgatttaatgaaagatcgaccaagaatgggtaaaaatagtatgtccagactagaaacttaaaacttgaaacttgaaacttgaactgattgtttacttttccatcttgactggaaacttgaaaggagagatggttaccaagaaggtagcaacaaggtttcatcagtagttattctccaataaggaaaagaaaaagaaggttgagttcttcatataatatagagaaaaaggtggtttaattcattaaagccagttaagctattttgattatgacataaacaaacagacatgattgcagtaagcgatgtaagaatttcattgaggaaaaactgaagtatacgagatcagcaatcttgggattaaggttctgtttagttaaagctattttgggttttatcttctaaactcatatttgtatggtagatcaagtttgttaacaataaaaataagatttggaaaataatgatgaaaatatgatatgagtttgagaacagttttttattcttttcaactcatgctatattttcccttcattttttaaatcttattttattttcaacagttgtatatcattttttttctatgtttgtgtgtgtgtatgtaaatttcaaaataaaatttcaaagcaattatctacaactaactatggccgttgaagcatgtcatgcatgttgttcagatctaaacttttactcactcttgtactacaataacactctctgttacattaatttgaagcttcttaaggtcatcaattgtctaagttacttttagggatttgaagtcctaaaatattttcaagatggtttttttgttcaaatttcaatttgatggaatagaaaacataaaatataataccaatatgatagagatttgattaaaaatgacattataattccaagtcaatcatgtttagttcaagttgtagaattgaaatatcagtgaactttgttcaattatgtactaaatgtgcaagtcgtagttagcttttagatgtcaaataattaaatataagaattgaataggaatctaataggtttgaaccaaatgcagcattagttcttaggtggaccaatgcttaatcatatttaggagtaccttagaataaagaggtccgaaaattcttaacttcagaatctagacatatttgggagtagccttttacttattcatgcagtgcaaagcttcttggcaagcatgaaggaaataggacttgggattttttacttttaagctttaatccttattattgtgtgcccgcgattcattaaaggtcacagctttatacttgtgaggatctaaggtaacttctagattctttgattgatatgtaaaaaattttataaggacttgcactcccttggtgctcttgaacataatttctttttctttttcaaaaaatcgttctgattgagtgcctttagagggtccgaatgctctattcagatttttcaagctgcctctttcccatacatattcacattatgtgaataaaatttgattgcatatagtcatatttctattgataatgtttatttggagaattatgcatattgttataaatgggctgctctgacctgctttaattacgttacttactatttcacagg

SEQ ID NO: 8781 - DNA, 7990 bp, Carica papaya
  Intron number 36 from transcript evm.model.supercontig_51. 21 (locus evm.TU.supercontig_51.21) derived from phytozome v7.0 (chr-ID supercontig_51; pos 294163 to 302152 reverse strand)
aagccctccagccactgcttccaatctttctacaggtatgctttctcttagccttcttgactccattaaaattgtggttgcaggacagagtgtggtctaatcttcttttttttttttctcagattcaaatattctctgcaaaattatttgtgggctccgaaagtctttttagtgttaggttatataacaaaatgacttacactagaataaattgaatatatggtttttttcttaatttagtgatgttttaaagtttactttattgctttccagctctaaaactttctttttggttgtggaagaatgaattatattttattaaatattgagaccctatatatacaagtacttaacaatcatataagaaaatccagttaattagcaagattacaccaaatggaaatagtactaatatatcttttactcacttacacacgtacacttctcaacactccctctcaagttggtgaaagagatttttcatttttagcttgccaataatattctgaaactcggggctacttaaaccatagtcaatacatctgcaagttgcaaagtagtgtttgcttatgtacggtctggatatcaatctactctcctgttttttcttgatacaatgttaacctacttcaatatgtttcgtcctatcatgttatacatgattgtggggcgatgctatttgctgtcttattatcacaacagagcctcataggttgattctagtgaatcttcaaatcttccaaaattatcttcagctatatgagttaatacaccctttgggaaatagccttagattctgactcaacactggattgggatataacattttgtttcttactactctaagtcactaggttttcactaagaaatgtgcagtatccagatgtaggtcttttgtcaactaatgaacctacatagtcagcatcagcatacgttgcaaggagcagtccattgtttttcttgaacataattcccttttttggagtaccgacaaatgcacttctttaggtttgtgcaagaattgattcactactcttattgcatatgcaatgtctagcattgtatctgataaatatattagcttttccaccaatctctgatctatctcagctcctttctctagagtcgcattttgtgatcgggatcaactgaggtattggcaaatttacatgccaggttgctagtttcccttaaaatagttagaatgtacttttgctaagaatatgccagtcttagagtgggacacttctatatggaggaagtactttaatctttctaactctttaatttcaaattctttcaccaagcattgcttgagagttgtgtcatctccttcataattcaatgtaacaataatatcgtctacgtccaccagtaggagtgtgactcccactgcctccaagtgcttgatgaacaaggcgtgatcttgttgactctgtttgtagtttatggataacattactctggcaaatcctctaaaccatgctcttggagactgtttaagttcatgaagtgcttttttgagtttaaataccttattcttctttatttcggacttggaacattttccatttaaaatttctcttaaaatttctaaaccctaaaccctaaaccctaaaccctaaaccctaaaccctaaaccctaaaccctaaaccctaaaccctaaaccctacttcacatcaaactgtagtaactgccaattaaaattagtaggtaagcataataggatacatattgtatccatttttgccataggtacgaaggtttccgtatgtcagagtatatctattaggcagcaacttccgttgtatctctcagtagttccatcagattatatttgatggtgaacatccttcagcagcctataggtttttcacctttaggtaagtccaccatttcccaagtctagtttttctcaagtatctgcatttcaatattcatagcatttttctattccttgcgggctaaagtcttatatgaatttttcagaatggatattgtattcaggctcataagaaattttttgtgagctggagaatagttttcaaaagacacaaaattggaatggatagagtggatgtttggtgcattctctagtctattttctaagtacaataggtaaataaatatcagaaaaatagtgattctcatagttttcaccttacttcctgtgccccactcaaattccagaacttactttagaccaaggttgaagtattttcttgtttaatagtgaactcccttttgcagcctaaagattctttttccctttaggtaggttcaccattttccaagttcctatattgtaacattcatagcaattttctaattctcgttggttaaagtctcagataaactttttggaatagatattgtattcatgcttatgagaatttttttgtgagttggaagaacagttttcaaaagatacaaaattggatttgatagactggatgtttggtgcattttctagtttattttctaagtgcaataggtaaatcagtatcagaaagacaatgattctcatagtttttaccttacttccagtgtttggcttaaattcctgaacttgcttcagatcaaggttggagtttttgtttcttgaatatgcctggacaaaacgtgggtccaatataggttgtgggttaggctcatctagtgaggtttggattctttttgtgagttgtgatcttctactgaggtgatgtgcttagataataaatatttgaaggcagagtatctgaaggtaggagaggaatttcaagaaatgagtcttataagtctcccttatcttttactatagtctttcctataaggtaaggttgattgaagaatgattaagtcttaacaaaggtcacatcagtagaacataaaatttctttgtggatgggtgatacacttgtgtcccttttgaagtggaagaataactcagaaagacacttgatttccctaggttgagtttctctcgtgaagatgtgcaatacacctggaaacaagagtgtataaggttattggtgtctcataggcctgcaaataagttagttagaacttccactgaaattccaaagtctagtagtctagatggaaatcgattgataagtacgtggcaattaacatggcttcttctcaatagtgttttggtgcatggttttgaaacaaaaaaacatgtgtggtagcaagcagatagttcctttttccttctagaactccattttgtgctgaagtatggcacgggaaaactcatgaatatttctcttactttgaaagaagacagttatggtatagttaaaataatctcaggcattatcagttttaaaacatttaattgtggctccaaattgttttttaatcatgttataaaactgggaaataataggaataagttctgttttagatttcaatataaaaggtcaagtaacttaagtatggtactcaataaaggaaacaagttgccgcatcttagaaatattattaagattacaagatctcaagcatcaatatgaatcaactgaaatgaaatcttacttctgttattaataggaatgaaagttaagtgccagtactttgctagttcatacacattgcattattatttttttttgaaatataagaaaaatatttttatgcacaaaagtatgaagggggtaccactcatatacaaaacatagttacaagtcaatcaaattgtctatgacaatctcaaaatcatctcaatatttgatgtcatggcctaacaaaatagagataaaaatgtgaatctatctatctctaatatttgtaaaattagtctcaataccctcaaaagcctccgcatttctttccttccacacaattcaaaaaataattagtggaattaggaacaaatgtctttttttttttacaaaagccctccgaagcccacagctcgctactcacgttatcggccatcagccatcacccaatttaatcccagcaagcccaaatagttcagatgctgtaagttgtcagacacgttaaaagtacatccacattgctttatgaactttcattattgcaattagaaaataaagaaaaaaacaggtggagaaaaaggggtatcctaatctcttgttatataaccatgggttgtctaatatggtggtggagagaatagtgcttattcgtcccaagccgtggcgcatccaatcatccttgctgaattctggtcttgaaattttagaaagagaataagaaaagataattttatagttaacattatgagataatttggttattaatatttataagatttgtacacgatttggtacatagagaacatcttgaagagtgaggtagggattaagtggtgtggttccaattcctgttactatagttactgaaccatcagcagtgacaatttttttattgctggaacacggagcataagttttaaataatttagaggagtttgtctatgatccagagaatataaccatagcttgtctaatttggcggtggagagaatagtgctggatatgtcaggtgtatccaggaaatataacccgtcccaagccatagtacgtccaatcatccttcccggattctggttttgaaattccagaaagataataagaaaagatcactttatagttaacattatgagataatttgtttattagtatttataagatttgtacacgatttggtacatagagatcccaaagagtgaggtagagattaagtggtgtggtgccaattcctgctactatagttagtgaactataagcagtgaaaattttcctattgctggaacatggagcataagttttaaataatttagaggagtttgtcatatgatcggttgctcatgagtctactatccgtgataatgtaaagattttatctaatacatttaaaccatgataaataggaaatatacctgagtatgctatgagatttgcacctttaggtttctctagttgctgaaatcgggtttgcagtcactcaatttctgactggaaatcaaggtctttgaatgcttcttctcctgagctacatttgcctgtccctaagttctctggtgtccccaatccttgcttggggtggtcagcttcccatggagttttcaaatctttttctctggtgtacctttgtttttttaaagaaggtacgccaaatgttttccctgttcttcccactagtggttgaagtgtaactgtgttttagttctttctccaattgtcgaggtttgaggcctttagttgccgttatggacctttcagtggtgcgggattcaagcataactcctcttctactttcctatgcactgaataaggacttacttcattgatagatgtgatctcttctttccttaaaatttgtactcttacctgatcatattcctcattgagccttgcgataagttggtatgttttgtctgtctcaacaaacttcttcaaggtggttgcatctttgttgtttcctataataatattatggtactgatcgacctcctaccttaagcttttcagaagatttgaatattctgtgaatgtcttgtagccttgtttagttctcaaaactttgatggtcagatcatacatccgggctacatcttttttctcggaatagatttttctggattaaatcccaagtgtcctttggctgtgggcagacacataactggtttactgatttctggtaccataaagttcaggaccaagcaataataataacatcttcctcattccaagtatcataagtaggagctcctggctttagtctgataccaaggaaatgacttagcttttcttgacctttgagagttatccgaattaactgtgactagcttaggtaatttttgccattgaagcgataggcaacctgaattagttgaaatttgattttgttatgtgaggagtttcccattatgagatgacttagcttttcttgccctttgagagtggtccgaattaagtgtgactagcttaggtaattttgccattgaagcgataggcaacatgaattaattgaaatttaattttattatgtgatgagtttcccattaggaaattttgtaccagtagattgagacgtaacctccgacattcttaaggcatcccggatagaatagtgacagctcgaggaactgtttcgggtttgatacttggtgcacaggtggagcagcggctggttggcagaatagggggcgcacactgggaagcgctcagctgaagggtctgactgggcacgtggctagctgtgcactgcaggagggacaacagcgggtgcagctaaaggaggcgagacaggctgatctgtgtggctgcaggtggctggtcatgcaactgctggtgaggcgcctctgctggtgtgtggctgctggtgacagcagcctggtttaaggctagtggtggctggccggctgctgtctgactatgaaggttggtagtggctggtgtggtcgctggctattaaggctggccccttctgggttttcttgtttcggcaatgaaccgactaagatttgtaaaagttcaggtttcgtaccacaggactctgataacaatgtggaagaatgaattgtattttattgggtattggaaccctatatatacaagtccctgataatgatgttaggaaacttaattaattacaaaggttacaaggattataccgaaggggtttattactaatataccctttactcatttgcacatgtacacttcccaacaaattgttgtcaccaacttaaacttcttttcatgttctctttttatcttgattaattcaaatggtaaaaggtctccacccgtgtgcttggatgctataattgttctatggtaattaatttaatttgttagtattgcttaaaacctgtcttcagctcactatttgttttagcgtttatttctgctctgagcggatatgtgtttgaagcctaggactattcgtgcctattaattaatttgttagtcctgcttgaaacctgtattttgttggatcggcagcaccagcaaaatacacttcctttcctcctgtgcctacaagatcctatttttcctgatttggaaataaattgaagaaaatattaaagggctaaatagagtcttatattttgtctatatactatagtttgtggatatcaccgatattgcatttttttgtatcattaaagttctataaccaatgtttataagattagatctcaacatcttcatgccttgtagcatcataaatagcatatcaagtaaaatcacctttcagtattaattcatacctgcacgaacatatggacgaggattctgaaatggaatattctgatagatagttcaacacaagtaaatctatacttcatggcatccttattttattccatgttaatcttgataagatgcaatttattttcctattgtcgtcttattttacattagagaaaaatttaaccaagtttactttgtttgtacatatccacatatcttaacatgaaataatatgagtgtcatatgtgtattcgatttttgtgaaaaaaggtaaaagtatcatacatgatttgagtttaactcctgtctaagtctaatatgttttaccttttctgttatttttctacgccattttgatttacctactttcaccaaataaatgaagataaaatgttttgttccatttcctttctccctgacctttttgttcaaatctaattattgtttggtaacatgctattcttttagatagtttaataacactcgtttgtcgcttagcacctgtgatagttttgtctgtttcaattcttttatttgtgtgtgtttcttctctatcctgtttatatttctaataattatgtaatttaatgagaataaaatgggttttctctaagtctatgttctgttatggaatactattttttatgattcatcttgacctctgttatattctgggcaatgaatccggagattcagcgggttatgtattcttatcagttgtattgcatctgtagggccttataagtgggtcagccgagttaagggagca

SEQ ID NO: 8782 - DNA, 613 bp, Carica papaya
  Intron number 1 from transcript evm.model.supercontig_135. 38 (locus evm.TU.supercontig_135.38) derived from phytozom e v7.0 (chr-ID supercontig_135; pos 576032 to 576644)
atcaggtgagtccatctttcgaggttcatatatttctattctgtaattttgatatggaatgtccaatatcatatggttaatatgatactaaatatgtggcctaacaatcactgacttcaatcacttttgtctagtatcttgttttatcttcaaataatatttctgaaggcttttttaacaactaattctgcccttcattttgatcattttttgcagataagcttatttgagaactttcaagtttggtaggattttatgtttaggaaattttcttatatttgtctttatccttagctggatctatgatagttgtgttttaatagccatttaatgtatttaattctggtaaaaagacttaagaaagcatttatttctgcatgttatgtttttgtagttggttttaacagcaaaaaaggtagaatacacagtttttaatcgctttagacttgttcgcttgaggagtgaaaaacattgaatggttgtttacaagcaattaatggaggatagatatcataggatttaatggtaaaacaatttattttgagttaacaatgcatactttttcataggctactttcaactatgttctagtgacataacttagtggcagatt

SEQ ID NO: 8783 - DNA, 1532 bp, Carica papaya
  Intron number 10 from transcript evm.TU.contig_26180.1 (lo cus evm.TU.contig_26180) derived from phytozome v7.0 (chr- ID contig_26180; pos 19026 to 20557)
tcatctctgataatttattggttggggtaagtggacattacatgtttgtttcaaatatattttatttcaatttattatcagattgtcagatggtttctttttctttgtttaacattagacaaatgttttcagagtttatagttaatatatctggaactaagggaacacagtgaaaattattagggaagaaataggaaagcattactggaatcacatgtattatgaatttgtggctattttaaccaagaccaacatttagaacttttaagtcaagtcctgtaacttttcaggttaacttgttcagttggaaaatattaaaaatgagtagaatggaaatatcaactagttcgagatattctcttgaaatttcttttagtatgttcgtctgcctgccaaaacaaactagttatattgtagataaagtgagttacccctcctgattcttcgagataaagtctgctttttggctctgtatggcaaatgggtaacagatatcagctttttttagacattggccagctattctcccttttgattagttagtctctctctttttctaattattctggaggatacctaatgttcctattaatatatttcctttttctttcagaaaaaattaatggaataatgccttttataagtagggaatggttgtagttagagcattaagtgactaactggttaagaaaattggaattccgtagcaagtatcctgggttacatagagagaaagaggagaagagatttctgaagggtggacacccctttttatggggttatgaacaactggcttcagaacttgagcctgtggtgtttgaattgcatatatcttgatcttttgaccttttggtttgcagctgaatgtgtatttatcttttcaccaaatcattcatattttggtttgtgtacattagtgattctactttactggtctatgattattactgtttcttgtcaaaacagtataatgttgtttaattttgttttgctgatgtccatatttatcttaggtagatcaagcattgatgggatgagtgtaaaatttgataaactaaaactacataagaattttttaatgaaagtgcttgtatatttggactttaatgactaaagagaacgaaaagaaagcaaaatctttgaggaacaccattgggtatatagtttcactttaaatgttctcttaatttattggttctattcaattcatctctcttttcttgtatttgtaccttgtgattgaatatttgattattgtttcctttatcattcttgccttattggtttctctttggcttagaaatttgaaactctaacatcttcatttgtgaaagtaactgtaatctggtagtagccacagtgcaaagcattttgatattttaaacaatttctaatatgtactgaggataaaaggacaattatatattacgtgagaaaaccatcttattaattatctcaattctaatttaattcatttaatgcttggtctttatgcagatcttctacttggttggttttggactattttgctt

SEQ ID NO: 8784 - DNA, 6795 bp, Carica papaya
  Intron number 7 from transcript evm.model.supercontig_70.7 0 (locus evm.TU.supercontig_70.70) derived from phytozome v7.0 (chr-ID supercontig_70; pos 465939 to 472733)
attttgttgccgcggcgctgtctcaggtgaatggaaaacaactcatacaatgaatttttagaaattattttacgcattttatatctactgttaagattgtttatttcccgtcaaataattttcagatctttattttgttggagaacttctgctgcactcaggtctacatgttattctttttaagaaattttattgagatgagaggaaaaaaagtacaaataaggagaataagtaccttcctcaaagaataaatctgagtacaaacatagcaacaaaataaatgaaaaagtgggcctcttaatggctaggaataatgatctcccaagtttgatgtaggttggaaaccacaatattagagtgcctcccgtgggctttagtccataaggtggccaaaaaatcattatatcagtcatcgaatatcctacaattccgacgagccatttactgcatagacttgagaaaatttccctttgctatataggttttgctctctttctcctccccctggatggatgagagtaagaagctttctactgctggagaagcaactggattcagaccaaataagttgaatcttctaatctgtctcgcaataaacaaatataggggaatgtgtttcatctgctctaaagcacatgatacaaatatctgtagataagcacggtgggggtgagaaacttgtaacatattattagtattgagcctttggtgcatggctgtttatgaaacaccttaaccttcaaaggagcttgagcttttccaaaatgctttggcaatatgaaagcggctaaagagaggttctctatgaggtgatcaaaacaaaaatttccaagagtataagcccaagggttccaataaccaacggctagtatcgggttgaggtgataggataatcggttccaacaaactaagtaaatttttcatttcaagagtcttcctatcggatagggtaagggtaaactggcagttcaaagtcaatatgtcctttgtgatcaaaatgaaacttgaaactgggagttgtcttgagatgataggttaaacagctgaggaatcaggtggtaaatgattgatccctatccaagtatcttctcaaaacttcactctaactccatctcccacgtgaagcgggatacaaaagaaaaaatagatggacttgagagattaatgtgcagatacttcagtgagaaatggatcttcctgatagagcatctgattcgtccctaccactcttgtggataccgttgaccactctatgccacaaagagtttggtttcatgggaagtgctaaaatcatttagccaataaggataagtctttgatctaagattcccaacactctcctcctatgaactctcgcattgacaacacacctctcaactactagatggtcctagtctccttcctcttactcaagaattctcctcattcgatcatctagtctcttcgccatgagtatcctaaacaaggacaagaagtagaatagaataccgaagaggcaaacttagataaaggtatccttaccatctctctttctgtctctaactctcaaggcgtttggtcacttgttctccgccgcctcccaaaaagatctacttcttgggtttctaccaagggaacgtgtaggtaaatcagtggccaagttaacctagtacatcctatggactctacgagttactttgtagtttcctcctccttattaattcctatgactacactcttagccaaatttatttttagttttgagacatgttcaaatgcttaaataatgatgagcacattcatgattggcctatcatcatattgcatatatgaaattgtgtcagacatctatccaatccttcctatcactaaccccttaaccatgtcttcttcattgctccactcaacattctactcaaaatatcgactacaagagaaaatacaaaaggagataggggatccccctgcctagtccacttaatgcctgaaacatttcctgaggttttccattcgtaattgccacaaacaagaaaaggatagacacccttgtgtccaccttctacattttgtctcaagttctttactcttcatgactccatctaagaatctcgaataagccttattgttggctttctcgaaatccaacttaaggatcaatacttttaccttagacctatgaatagagttcattaccttgtttttaattagggagaggcttctagaatttgtctctctcctattaaagcactttggcttagtaaaattgcatcattcaatatgtcactaaatcttaaagacagtaccttagtgataatttatacgcacttgcaataaactaaataggcgatagtcggagacctttatagacttatcttttttggggattaaagtaatgaatgcgggttcatactcttgcctgcgttggcatttagatatacctcctcaagcactctaatcaagtcagttctagtagtgtcccgagaactcttgaagggccctatgaaaaacctatctaacctggtagctttatcactatctaaatcccacaggaccctcaccttttttcctcctcctcaaagggtctttctgaccactcagcctcatttctactagttgatgcccactcaatcctttcaaggaatgacctctgaaccaccttttctgaatacaacttcccatagtattgagtgatctctctaactatgatatctcctatcctttccaataccttagattcaagttctagttctttgatcacactcttccttctttttctattgaccactctatgatataagtgtgtattggtgaccctctctttagcctatttaatctttactttggtctccaacttttctttttcatcaataaaacttcttgtagttcgtctttttagatcaactagatgttcctttttctttttaaagatagtgcactcaactaccattatatctaactcctttatttcctcaaaaaaaaatttcttttctaaacccacattctcaaccacccccttattccatgttttcagttgctccttcaaggacttcaatttttgcatacatttgtgactctcccacctaccttctataccttctcaccacaactccttctcatcccaaattccagatgttagagcaacatgctcaaactagaaaaggatggaccccatataatacactaggattctagaaaaatgtagaattgatcagatataggctgtggacgatttcctataccagagtaaggaagctattcccgcagcgcatagagattaaaaaccagcctaggcatgaggagacagctcctttctatctgttgaccatgtaattgactatttgctagtaggacatctctcaactcacatcatcttaaaaagcattgaatgtttcatcgatgtggccatccaattcccctctaatttctcatgttgaaacctacatgcattgtaattgcccttccccaacccaaagacaacaaaaagggctggacaagtttgacaggaaaggaagtttatcccaaagctaggttctaagcctccaactagctggctcatacacattagtaatccatcaacactcctcttttacattgagaagcattgacaatgagaaaattcatgcatcaccagaacatcttttgggatcatagtgaatgaagatccctctttttagtttaaggcatctagatgtcttcaataaggagacctgttatctccactgttatttattattgctacgaaagttttgaaaaaattattgttgagagatagggaggtgggtttgttcaaaggacttaaggcaggagaaggagagctaactgaggaggttacccatttatttttcacagataacaccttagtgctttgtgaagctgacgaaggtacactacttaacctaagatgtgttttacgttgctttcaagcactttctagtcttaagatcaacctcactaaatctgagctggtaagactaggtgatgggggaacttttatgagattggcaaaagttttgggatgtaaggtggtgaaacttcatattaactactatatgcctttgggagcaaaatacaaagatacaagaatgtggaactctattttggtaaggtttgagaggagatttgctgagtggaagagaaatttataatctaaatgtgggtgtctaactctcattaaaagtacgctatcatgcctttctttatactttatgtcccttttaacaacttctgtaagtattgcaaagaaatcaaaagcaattcaatgcaaatttctagagtgattctgaggagagaagaagatgtcatttagggggtgagaaatgttgaaagatctttgcatcaggcagtttggggttaagatgtgtagtagaaaagaatcagagacttcaagttaagtggattaaaggtttatggaagaaagcaaaatcctatggcggatggttattgagggaaattttggtacaattgatggagagcttatattccaaagcggtgacaagaccgcatgggacgggggtgtcaaaacattatgcattggaggggatagttttcataaatgcatatagtggagagttgataatcgggagagaaccagtttttggatatatccttggctcagggaggaagcctaggagccaaatttttgcggatttttgcgactgaacaatacaaagatattttagtcaaggagtcatatagagaatttggggaagcaaaggagtggcatggagaggtactgagaaatcctaacaattgagaaataaatgattatgaatctctcttgaggtaaccatcttcatatctttcaatgagagtgatgattaacctatttggatcctcaacccaataggaacgtttacagttgggtcctataaatatttggttaagaatgactcgttggaaagtgaatgaagttccctttttcagtaaatttgaaaagtgaaagctccttccaggattgctttcttcgtttgtgaagtaggacgtgaatgtctttttaccattgacaagtggatgagaaaggaaaaaatttaggtgaagagggtggaggagacttttgaccatattttactataatatcccccaacgtatgatttatagtgtataacgtatgggttgttgggaattatctaggtaatggcgagtatataagagagtagatatggacatggaaagtgtcagtggtcgagagaaacatttgggtcacattgtccttgtaatcttttgggtggtgtggaaaaaaagtggaaaaagatttcgataggtttaaagttagatggtttcaaccctaagtgttttcttcatgagtaacttttttactctatggaagattcaaaaaactttattaatatcttgttgacaagtaaatattttttgtatattggttaacccttggtctgtaattaacgatacattctgtatttttttattaagaaaaaattgataatgagaaaacccctctactatatccattcgagttacaagtcgagtgtctcgttgattaacattcccctcgatgcccctactaatgggaggactgcccattctttaaatcagcactctcatacggtatgaactagcaagcaattgacctcttttttatcatttcctgtaacaacactatgtccggagttaccctcaaaataatctcttttatctattttcttttcaatgcattgcctatgctattaacattcaagctaaccagtctcatgtataaccagttcacaacctttttttccttaatccaaacatctcctctttatgctattttcctaatctctagtaccacctgtttttcctgtggacatatgccttaggcggtaccgtcaccctcacttcctttcccatatcacccataaagctaaagtacaatttgttcatgtggttgtttggattttcctgatcaaggttgtttgggttcatgacattactgtattctcttgatttacaggttgaaaaccatattcatgtttgcttggggatcgggtaatatacctttgcctattagttccatactctcatcggtttttataagtgaatataaaaaaaggtaagttaggagaaagtatgaaggtagaacagttaccaggagactctaggtctcaagtatccattcgagcatttatctaactcaccatttatctccagcttagccctctgagaatactgttcatctatgcccttaccttgccacatctctgatttattatctgtaaacatatacttttggtctttattatctgatcttttatagattccttctaatggatggtcccttggtgcttttaaatattacacttttgtcacctcgaaaagaaaatcctgtggttaaagcaagaaaggacatgattctttttatatataggaacacatgttaatagaactgttagaatacccatggagcaaaagctttcaggaaactagtaatgaatttgatctcatttagttgtttttgaatcacgaatagttagtgttgtgctcaaattcttccactcgataaatgttgccctccttttggacttcatgggaagaaccatgccatgatcacttgtgcttcattatggcgtatcacaatcttcatgaatatgttcctcatgtatcaaatctaaagtccaccctgatctcagaaatttgttaaagtttcaactgatataacaaccacatgttattctggatttcattgttgctttttttgattaaattttttatattggttatagaagccagcattattttttgcttacagaagacctcttttagggttgctaatatgaattggtttgttcacagggcaacattactagaaccaatcacata

SEQ ID NO: 8785 - DNA, 2412 bp, Carica papaya
  Intron number 1 from transcript evm.model.supercontig_19.2 39 (locus evm.TU.supercontig_19.239) derived from phytozom e v7.0 (chr-ID supercontig_19; pos 1833819 to 1836230)
tgtgctgaggcttggttcaaaattaagggaaacaggtgaagtaaaaccctaatggataaatcaaagttttcatttttactctagtctttcttgttgaattcttgtaggttatgtacacgttaaaagtctgagattaggtcattacaatgttgtctgagtgaaatctttgcctttagtttatgtattttttgggatacttttacttgatagagctttctttttttctgggtgttttgcatccgtttttaaggtttcaatttcttgttatgagtgcagattgcagagttctttttatgttgattattggcaactaaagtagctagacaatatacatgttcttgagattttatcattttggatgtgatttaaattgggaattttccattggttctacaaaaagaaaatcttggtttattccaaatatatccttagtgggctgatgttttacactcctcacttctgagtttaattattaaattttgactattgatttgtcttctatgctgttcaatgctctatttattgaggtagtgattctctgaaatttttattcttgatccttttagcttggagatgtagtctttgatgcatacgcaatgttgaagaatattccgctttgagatgctagcaaaagaagctagtttaatgcaaggaacaaatcgacagggaccttacttaagaaccaatctctattttttatattaaagaaaaagttgtttccatatattccaaattaagagaatcaattttcagacagttaaaagaaggaaccacttcaatgttcttgcttctagtttccatctgtcactctttgttcttttcgaactagcttaccttcccggtatgacttgtggatttttttcatatatgtatgtatttactaatattagtattaatatgctattccagtatcttgtttttcctgctttaaagttccaatttgtttagcgcacagattccttcataggctgacttgaggaagtcagatcccttttgccatttgcccatatattttattcgaggagacatttataaagtttccaacttgtagtatcaatagtatgaagtaaatgtgaatatatatatataaatatattgtattaatcaatggcccaataattacaagaacttttagtgagtgtacgactatatgatcattatgattctacattttgtagaatcaatgggacaccatggctatatgttcagaatgctctgctcttaaccttgcagctagaaactgaatcatagtttctatagattccatattttggatgtttattattttttctctaaagagatgtagttaaggtgattcttaattgataggaaactgtacgaactttcttctgtgccaaaattctcttattgaatcaacatttctattttatcatttcgctgggatgattcaccccattcaactctttgatttcagaaagaatctagaacttattcctgtgaaatgtccacaagcacatgcttgtatttttttttttctgttatctgcccggggcacttgagaacgagcctccttgccgaggccatggaatgtgaatttactaagatccattatctttttggtggttaaggccaattggagataaaagatgatgttttctttagattgtttttaagaattatgcaattctatatatataatttcttttgcattcgaactatttgtatttcttgctgattccttgattatctgaaggatgttaatatatcacacatgaggaacaatacttatgttcttgtacttgttgagatatatatacttcatattatggtggtcctgagctgttgcttgaaggtgtttcccatttgtccctgaaccaaaaaaggaagtaatagtttctggtgcttagttgatcttctgtgtgtttatacctgtatatacgaatatagtaatatgaatcaaagcagtaagttgtgtaaatgatggggaaccagattggaatcaggagaaattcttaggcagcataaatgaatattaggttctcttcaaattcggtcagtaaattggtatttttatagggcttcaagaaaaaagtgttggcaactgattacaaagtattaaggtagaatttcacctccaaacttcaacgaataccgggatgctaactgttcttcaaaggaaaaaactagaagatgggaatctaggacatcaagctatgaatgaaacaagaaggtcgaaataatgatatgcttcgtgattttatttaaatgtcaattgtccaccattttgaatggaatagagattattcttcttttgactctgtttagttgcatattcattccatccacaactttgcaattttttattgagttgatttactggcttttttaaggaaaccttctgttgaattgtataagtcacatttcaagattgaatttcagaacctgcgaaat

SEQ ID NO: 8786 - DNA, 1151 bp, Carica papaya
  Intron number 1 from transcript evm.model.supercontig_3.27 1 (locus evm.TU.supercontig_3.271) derived from phytozome v7.0 (chr-ID supercontig_3; pos 1922979 to 1924129)
caagaagtcacacaaatttgaatttgagacttcaggtaatcttatcgggtcctttcttcttttcctttgaaacctcaaggggggttttatttactttttcaaaagagagttttgttagtttagtttaccgttatattataatgatactggatctgtttttggtgttgggtgccagtgggtttgcgctatatctatgttgatgacgatgggtataaatattctgggtcgttttatgtgtggatagaaagtgaggtaggctagtctggtagaaaggagtttagggtttttggaagcttttagagttgaatttaagaggatatttgtggggtttgatgaggaagtgggaccgttatatctgagttttgcccatatctgaaattaatggtagttgtgagggacaagaggatttgatttgattctgtaaaaactgagggaatctctatcccttctggctagaatactgtacttattattgccttttgcttgggaaaaatagcacactccttcctgccaggaaaaaaagaacagggtgagaatttgtgggaagtcagctgatttgaccttttctaaatctgtctcacccatgtaattatttttaatagaggttctgggttttgtgctggatggctggaaacaaatgattttgattgcatgagattcacatggaaaagttagcagattattattaccaaacaatataaaaagctgtttaagtgtcgtaccgaaagctactgagttagtattcacactgttatcgagcactatggtcaaacattactttcaccatgatttcgtcttccattcaggttgtgttaaatttgatagtccattaccagaagaagtctgtgtaagaaatgtaaaagaattttacttattatatcattaaacagtctacaaattaattccagttgatattaattttttgcatccatctacaggactaaatgctgaattagctatgctagtcttgtagtttctttgctctgacatgatctgttaactatcttttccagtttgatttttttcctgtctgtaatttagattaatgagttttattcaagttcaagcttctccaatttcacgtatactatttttttccgaaaaattattctctaggtgaccgaattgcgtattttgtcggtgcaaacttt

SEQ ID NO: 8787 - DNA, 4195 bp, Carica papaya
  Intron number 5 from transcript evm.model.supercontig_26.2 07 (locus evm.TU.supercontig_26.207) derived from phytozom e v7.0 (chr-ID supercontig_26; pos 1524954 to 1529148 reve rse strand)
gagcttagattgttcaaaaaaggctgctcaggtacaggttctaatggaagtcagagtccaataacatgcagttttcaagattgtaatgtagaatttgtatggctaattttcattccagtccatccttttattttgaaaaggatagcattctattcacaaggcacaagcgaggtgctgctcatgcacatatttgattttagtatttcttttcgtagttaaggatataagaatatcttcttaaaaattgatagtgtgatcttaatagaaaacaaattggatgcagaaatgatgagaattagaaaacaaggaaggcaggagacatacaaaggacaacagagatagtcagagagctcgtgaacttggaaatttggtatagtaatatactagaattaatcttcttgctatggactatgaaagagggtgatgcaaacactaggttttaccactgggctgttaatggtcaggagaagaagtgagattaaggagctagaattggattgggggacggggggggggggggggggtgggcgttgggagggtgagagggtgagccagataagggctgatagggcatgaaattactgagttctgtcatagtttagataccgaggatgaggtatctaggccattccttgaaggggttgattggcaaccattagtcatgccaaagtcaagtatattgaaagacattttgaggaagatgtgttgaagtatggattcttccttcgtaaacctaatacctaagaaagacaagtcaaaaagggtatttggttatagttctatcaatttggtgactagtgtatatcaaatcgtagctaagatgttgtccttaccccttagtgaagttttagatgacactatcttaccaaatcaaagcatatatcaaatcatgggagggagataaatcttggacgcatcccttattgctaatgaatatatggtgtatatgcaaagggcaaagagagaaggattagtcctaaaattagactttcaaaaaggcttatgacagggcaaattggggatttgactcggtgatggaccgcaagggttttggacctaaactgaggacatgaatgagagggtgcttgcctcctatctcattagcggtgttagtgaatagaaaagtcaagcagtggtttcaggataatcaggaaattagataaggtgatccattatccctatttctcttaactttggtattggatggcttaaggaggacgcttattaagggatctgagagagagcaattgaaggatttctcattggtattgatatagttgagtgtcccgcctccaatttgcagatgacacaattctattgctatctcatgataatagatccatctttaatgcactcactttggtcggggtgtttgaacttatttctgggctttgaattaacatgataaaatgtgggtcggttggtactaatatgtctgctagcacagtgaaatctttaagaaactcactttggtcggggtgtttgaacttatttcggggctttgaattaacatgataaaatatgggtcggttggtactaatatgtccgctagcacagtgaatattcttgcagaggttatcatttctgggacttgtagttcattttttataaattttcactttttttataaattttcatattttttatttcgaaaaaaaatcagttctgcgaccttagcatgacccattacataccttggcattctgttgggcagtaattctaggtgtaagtcattttgggacaggatgctcagtaaggtgtctaggcgtttaaaagttaaaaagggagtcctttttcgctgggtggtagagtcactcttatctaggcatgtctgtttagtatctttatctactgtatgtccttatttaaaatccccaccagtgtaattgagcccttagagggtgtgatggggaattttctataggttgtgatagtgaagataggagaggtcacttagttcaatgggaggtttttcgtaggtctaaaagttttggaggattgggcataagtaatcttaaactaggagtttatcattattggttaagtagttttaacattttcagtaggcataaggtaacaaaaagaatttacaggagtcagtgaaatggttgggatcgtgtagctccgagatccaccaatcacaaaagtccatagaagaccatttgaagtttgttgaacatctataggcctcttaccagaaacaaagtgaggaaaagtttcaaggtccttttttgtgaggatctttggacgggtgattgactcttgggtgtccagttcccatgcctttgtcgcatatcttcctgccacaatatcccgatcgaccaatccttttgtctttccaacggttttctaatttggaattgtcatttcttccgtagcttgattaatagagcagctgttgaattccttaccatgttaaacttgttacaactgtttcaacatttcctgcagcctgattgcaggatttggatccttgactcattgggtacattacctgcaaatcatttttcaatcatataacaaagaactctggttgttacaaaagtacctttacacaaggcattttggcaagtcaaggttcatttgatggtgaaggctttcatatagactgcaatgctgaaccgacttaacatcaatgagttgctgcaaattcataggcttaggtgagctctatctcatgatatgtgtgttatgtgccataagggcagccgttgtgaagtgttgtggaaatatgggttaggctctttgacagttttagctggtcatggatgactcctccccctttggattgtttcatcaacacaattttggatggttttggggttaagataaaggccagacaagctgatcaagagggggacaattttggtgaatggtgtttcttatgcaaaagggaggcaagcttgtaatcatatccttctatgatccttttgtgtataagttgtggactcttatgtactcttgagtatcaattgggtgatggttggttcgttgagggaagaaatttgggcgtgggaggacattgatggagggaagaaatatgttagtctcattccccttgctatcttttgaccaatatggaaagagagaaataagaaagcttttttgagggcgtggaatatgattttgatagagtagaaaatagatggtttcagaccctaggtttttgtattatgggtcatactctctattcattcgataactatgggaacctatagacatttgaatctatatgtaaatatctttctacatgggtttgcatccccttggtgcatgtgaatgaatcatatcatattatttttatttttttaaaaaagataaaggtcagaccattgtggcagagagtgttgtttacctagtctgtggacaatttggatagaaagaaatcggtatattttgaagatcatcctctgcagggcaacctcatacgggaggagacagcatttctggcttccctttgaaccaaggctaattggaaatactctgacatctctctcgctgtgcttcataagagctgggatactatagtcatgtgatttatcctttacttggtgctttcattttgtaatttttgttttgatttcttttttttttccagctaaatttattatttgcttctctttggtatcttaaaaaatttttctatccaaaagaaacagtaattttatacacaaaccaggaaaattaaaaaaaaggaagataaggaaataaattaggcaaataaaggacaataggaaaagtcaagtagacaaccaattgataacctgatcttaataaaatagtaatctgatgcacaaactatgaaatttaaaaaggaagagatgagaaggtagaaaatgaaggacagcagatagagtcagaacgcatataacttttacaatatgatatagtaacattgtataattagttgtgtttcctacatttttttttgaaataaatgtaagaaaaaaaaatacaaccaatttcatgtgtttcttacatgaaatttaacaatttttttttttgaaatttgacaagttatacacagtgttagataaaatttttagtcgttccaatagttgcctgactgttgcagctcactaaacacaaccaattagttttgtttgctttttctggaaccatcttatcatattatccactgaatgcagattagatttcttttataatgtaggtgcaatctaaggagtcagcaggt

SEQ ID NO: 8788 - DNA, 922 bp, Carica papaya
  Intron number 3 from transcript evm.model.supercontig_233. 1 (locus evm.TU.supercontig_233.1) derived from phytozome v7.0 (chr-ID supercontig_233; pos 5191 to 6112 reverse str and)
tagaagagaaggccagagtagaaaaggaaggcaaggtaaacggcttagttttcttctctgactttttaggttttttcattttttaaaacgatagctagggttttgttgcggggcgtatataacgtgcgcttggggtgcgtagtatattaaacgggtccacgagatctaggcatcaaaatggttctaaagtgaaacgggaatcaatggtgaaatttaaagaatcttaattaatgatccgaatcccaataaccaacaaagaaagaagaagaagaagaagaagaagaagaggaagaagaagaataagaagaagaagaagaatatccatacgtccatttcaacggctcagatcttctgggttttcttcttcttctttgaaaaacacagacgaccattagattttgccttgtccactatactgcctacagtgcccatttttacagtacttgaagaacgcttttgttacttagtttttgttcttatttatttttggaagattctaacatatgcttttgatgtttctttatgtggcatgtacttatgctccccgtggatgctcacattatatcattatcatcattggaattcttcagtttatttgggtaagtaactacttaactaaacatactaaacatagtacttaatctatgccatgcaataattaagatcatcactatatcatcatcatcgcagggttttgattagtaataataaaatgataattacgataattaataatgacatcataaaattccaggtaggattagacttggacatgcatgcatagattctgtaaatttggtgacttttgcagaggagaagaagaagaagaagattcttttctttcatgcatgaaagtgtcgtaagctaaaagtcctgtttggattctcttaaataattttttattttttctggacagggggtt

SEQ ID NO: 8789 - DNA, 1296 bp, Carica papaya
  Intron number 3 from transcript evm.model.supercontig_87.1 07 (locus evm.TU.supercontig_87.107) derived from phytozom e v7.0 (chr-ID supercontig_87; pos 840239 to 841534 revers e strand)
tagtatatcgtcatcaggtgagtatctttattcctttcagaagtctacttaacactcaaattaattttgaatgctagtgatttctttataaagtaagctgattgtcatatattgatatatctgtgaccaagaagagccaagttcttaccctgtcacttgtttaaagcctttctgttgatcaagcggggaaactagaaacttgaactaacttcatgagctggtgacgtctttccctcctctcagaaatgggcttttagtcttcttagattatttggaaatctttgttaattactttacaatcggagctggttctccctgtatctgatatctgatcagcgcaaagtacttattagaagtaacaacagaacagagttggatcaaagaatacctttcctctccctatcccttgtcctcaattcacgacaaacttgttcctcattaccattttcccaaggagatgtttatttctctctttattagtataaaaaatttaattatgcttacacttaatttttctaatggtacaaaaaaatcatcccaacaaattatggaatcccccttgttcaatacaaaatcaaaaaagtaaatatccaaattattttacgcatgcatccaaattgtgtaagtaaagaaacaacaaaatattcaaaacaagtataccgaattattcaaaactttaatatatcatattcttaaacatgtaatatgagttttcaaggcctaaatttaatcattttctcattcagattcctcaccggatccctgcagggttcagataaaatagtcatcctcgtttcttaacccatcactgtcttaaagcatttacaatgatcaaatggaggaagctacaaacctgaactgcttgaaagctgataaagaaagaatttattttttattttttgttttttgttttcaatgtggaaaaacaaagcagcagaagaataaagaaaacaaaagcaatgatatattttgtcatagaaaatacaatactagcgatcttccttgtctgacacccttaatattcagatagggcttagcttgaattcattttcttttgttctttttagaattcttatcttctaacctacgtagtttaacttgggtttatctgtttgctaattgatgcagaacaagttaaaacatgtattatattatcatttccccattccccccatttctactgtattgcagcataatgcatttctaccttatagcagcataatgcatattcttggcaattctttcgggtttgcttgttccagtaaatacccgcttcgatttccatgtagatcataa

SEQ ID NO: 8790 - DNA, 2147 bp, Carica papaya
  Intron number 3 from transcript evm.model.supercontig_73.2 7 (locus evm.TU.supercontig_73.27) derived from phytozome v7.0 (chr-ID supercontig_73; pos 399215 to 401361)
tgaggcggtcagtgaagccaaggaattgaccccaggtaaggagttggcatgctgtttcatataagaattgccgagcaactgatgggtgaattgtgttgttggataagggtcttgtttttcttctggcaaagcttgggattggggaaagaagaaaaataaattcttaatttcttttaagacctaaattgtgcagtcatggccatggcatttcatgatggcatatggagaaatggttcaaataaataactgtcaagagtcagcttgtttcctttttcatttttcatactttcttttcatctcagtcgtatatgcaagatatatatatagttacaaacttctaatctgaaaagaaagaaactttcttatagtgattgttgtagttaaaccttggggcactggagtacaccaaactgttttggttcagattttttattatttctacaaatttgtagcttcgatagaataaatatactacttgattttttctcttcaggctcttttatgggaaagggaattatttgcagtggttatcggggcaaatggtatatataatgagtgtggagtgtgaagtagatggaagagaggcccacttttgttcattggcctttgtgaagaagtatgcctctgttggccatcaacttctgttgctattgattcaatgatatcttagtttaatctttttgtgagccataccttagcttagatggttcagtaatggcttgaaattaccatcaccttagcttagatgttcagtgatttctcttataaataattgttttctttgaaaaagatcaggtataacctgatatatgaacgaggtgattagttgcagaacggggtgttgaaaattaaatggatatccgagatttttctcagtttgaggttgttttacgacaagggtgtaatgacatggtgacaaaactatcttagaaaatgaaactagatagtactttttttattagacagttcttttatattaagcatcaatagtttgtttgaaactttggacatgaaactaaaagagcttaaacatgttaagcaaaattccgttggtaatgctaaatgctgaggaattatgtctgatttttaggaatatttataaggattgttaggcatgaaaatggttggcacaccgagccttctgcagaaagcctgaaacttttctgctgaataaaatttcagctgttagttctagagttggagtagctctagaatagggctataaaggtagcaatatattagaagcaaacagaacatacctgacataccttcagtgaggaggtggattatagaaattgctgtttcatgtgataatcttgaatattgtgaatttgaacaagtattgagggaaattaatcacgatgctgaatttgtctaatttctatagggaaaaaatgatagaaaccaacatcttgaacccttagaaccactaaagtaataaggagattgacacatagaaacctggaggactcttacatattaatactctattgctgggtaaaattatattccttctccctaagatatgaatgtatatatacatacgtataccaccatgtatttgatagagcaggaaaaaaaacaacttgcatatggcaacacctgaacccttaccctcattctaaagaggggagctaataacagttgaactgctacctattatacacccaaagataagttaattttatctgtttcacagaacaaattatttatcccacatgtactctctttttttgggaggaatattctagatataattcggaagaattattcagtaacatctttccccattccttatgtaagtttgtgaagacacaattcagttcctttgtgaaaaatttggtgcattgttttgcaaactcagatccttacgctgtttcatgtacaggcattattttatcaaaagtcaaaagttaaaacattcaggctcttgcattccatatttgccctatatgagaattttttcatccaatgaaaagtaaaactctgtaggatttagtcaccatgtgatacttttcctgcatgaggcattggcagcattatatgcatactatattattgtttataaagcttgcattgttgcctgaaggactgttacacatttcattataggtgggactctctccttgattggacactcagcagga

SEQ ID NO: 8791 - DNA, 986 bp, Carica papaya
  Intron number 4 from transcript evm.model.supercontig_152. 61 (locus evm.TU.supercontig_152.61) derived from phytozom e v7.0 (chr-ID supercontig_152; pos 528049 to 529034 rever se strand)
aaggttttgcaaggaaaacgcagatctttgcacaggttagtgtcttccatgatattgcatccaatatctcagctgttttgagagaaaatttgtattctgtacttgaaaagatttatggctatatttggaatgatccaaaatttttatgaaattcatttgcaaatttaagttaattcacatggagatggtgaaaatatcctttaaatgataaatgaacttgtgtagaatgccatatgaggtcaatttttttaatatcctggtataatttgcatactttcttagttaaactaagtgtgtatttacaaatgaattttgtaggatctctaggtctattctaaaaatagcccaagggtccgtagtttgaaccaagacacagttccttaatatctgatgacctttagttcagtaaaaacatctcgattgttaattcattgactcaattgaatggatgagatttgagttcagaaatctggcggtgataaaaggtgaaggtatgacaccttcaaggcattatactttaatccctctttgcttataaataatggagaaggttcaagctattttctgagcatagtgaaagactattaaccataaccttcttgcacatcctgaagagttgggctttagcgttggattcttgtggcatatttcaatattttatttaaggatgggtatctctttttttagataatatttaaggacatatatctagcttagtatgtaagatggcgtgtatgcattagatgagccagttctcttgactggctactatactatatttcctttatgctggtgtgagattaatgatccctgatggtggctatacaaagattgcattgccaattgcataaaacattatagataagtcagtaccagtaaatcacagctttaaatgattgattcatttattggttggttttactgtctacttctcataatcttctattacagtttaacgacctgcaagagtgttatctacaaaagcg

SEQ ID NO: 8792 - DNA, 8202 bp, Carica papaya
  Intron number 10 from transcript evm.model.supercontig_10. 74 (locus evm.TU.supercontig_10.74) derived from phytozome v7.0 (chr-ID supercontig_10; pos 1203154 to 1211355 rever se strand)
tttcggtacttatctgttttattttcattaggtgcagtttattcagtgtttgcatcttcttaagatgaatactcatgtctcttgcgttctggttccctttgctaattgcgatccgttgatttgggttaaatctgtccttccggacataaagaattatgacatttcttttttttttttcgagggcaacttatatattgccacggctttgaatgtcttttacaacgtgttcagttcaattttcattccatccttagcttacactttcttttaattgaaaaagaaaatatacttgtagggagaaagagatacaagaagggagcattgaatacctcgaagaagcaaaacaaaaaacaagagaagctaactaatcacaagaaagaatagctggccaatctctgcataaaattaacgaagaaccatccttgaagtggctgtcagccttgcccaaacttgtaaaaaacattcttccaaagaatcataaaagttgattcataatttctaatgattctagcatggtcaaaccagataacccacaaactagcaaaaacaggccccacacatgaaagaaccttaggtccctcttcatccttaggcgtagcacaaatggaagaggaaaactctccacattttgaggagagatcaagtagtgccaatagactaaaaaatacaccaccaagttctccaagccatctcagagtgtaagaaaatatgatagtgggtcttaacattttgatagctcgtcgcacacatccttggtgataaagcacaattcagtctgcgaatcgtatataacattttggtagctcatcacacacatccttggtaacaaagcacaattcagtctgcgaatcgtataaagcctattctaaatcacaatccaaacaaaaactttcgttttaaagggagcttgaactttcaataagggttcacgaggaggaacattatgaatctcatgattgtgtacaatttacaggaccagatccaaagactagatcctagagcttggataactagaaaacatcatagaatcaagagcgtcagttacactagccatggcttttgcttctccatcattaaggttatggaagaaagcaaattccaagagaaaattgttttctcgaatcacaatagaggatatgagagaaaaatgtttattgaataatctataaagtttggggaagcaggaagcaagagaaacaatgtcaattcaaggatcctcctgaaatagaaaatgagagctattgccaaccatcaactaaagtagtagtaagaatgagacattaagaccaaagatagccttctagggactcttgtaagtgcttgaaacaatgactttagaatcccacccattctggtgaggtccatactgggtcttaataaccttgtggcaaagatagtagatttctgaagaaaacctccataaccatttagctaaaggagagaaatttttataatgaagattcccaacaccaagaaccttttcttctctcctcagctaacatctctcccaactatgtgatctctcttactcacttgattcccatattaagaaaaatcttatcactccctcaattttattatcacccttttaggaatttaaagagatgggaaatacgaagggatgctggacaaagacaattagataagagcaaccccatacccttggagaaagagacacccttctaagaatctaaacacttagggatcttataatggatcccaaaagtaataaacctgatgattgcctccaaggggaacaccatggtaggtaaaggaccactcattgacatcataccccatagaatctacaagagccttcacgtcctaattttcaatataatgatcaggaacccactcttcccaagattattgcacaaaccaaaatagtcaaaaaaatgtacataatggtgatcacattatagaattgagtatggtcattggatagagattggtttgtgaatatgactagaaatctgaacgactatgaagtgggtgagtatgaagcattgcggtagctactatccacgaaatagatcaatcctaacagggatcaagtcaaaacaaaatggtgaattcactgttaagttttactacaactactttggtgagaggtgagactgatagagtgcccaatttctctgcttattagatttggaaagtaaagacacctccaagaattgctttctttgcatgggagacaagttgggaatgtattttgacgatcgacaagttgagataagaggcaaaatcatggttaatggatgttatttgtgtaagaaaattgctaaatcttgtaactatattgaagatttttgaaaaaaaatactttttatttcttattctttttgtttatgcttaagatatatatgtatatatgtgtgtaaggaattatccttatttaaggaagattctaattacatgatattattttattattagaactctaaataataaaatattctatttaacataatatcttatttgaattcttattaatactgcctctaagttggtgcaaatatatcacacatgcttgacttgcaaaatagattcagaagagatttattgtatagttttttagtgaagatatctgctacctgatcatcagaaaatacatgatataagcatagggagtcatcaaccactttctcttttctgaagtgtcgatcaatctcaatgtgttttgttctgtcatgttgaactgggttatgaataatgttaattgttgctttattgtcacaaaacatgaataatttctcatctttaagcagttttaattccccaattaacttgcaagcataataattcatatactacttggaccattgctctatattttatcttagcactagagtggacaactacactttgtttcttactttccatgtaactaaattgtctcatatgaatgtgtaataacccatagttgatcttctatcatctagaaatccaaccgattgacatttgtaaatatatctattttaaggtgaccatatttaggaaagagtatacatttttctggtgcagattttatgtatcgtaatatgcagaagacatgtaaatgaatcttgcgaggatcatgcatgtattagctcactagactaactgcatatggtatatcaagtctggtatgtgagagataaatgagtcgtctaactaatctatgatatttttccaagtcgactgatgtagtactacttgtttgtagtttgtgattgctcctaataggtgactttaccggcttgcaatctagtgcactagttttttctaataagtttatgatgtactttctttgagaaatgaagatcattttattagatctgataacttcaattcccaagatatattacaatttttttaaatcgtttatttcaaactctcgagtaagaagttattttagtcgggacatctcctccatatcatcttcaatcaccacaatattatttatataaataatgagaaaagtaaccttaccctcatgatgtttgacgaacaaagtatgatcaatattgctttgttgatatccaaaagagatcatacatcttctaaacctttcaaatcatgttcttggagactgattcaatctgtataggacattctttaatttgcaaacttttccttacgtaatctcatcttcaaatttaagtgaaattttcatgtatacctcttcctctaagtctccatagaggaatacattttttatatcaaactgttgtaggtcccaatcaaggttaactgtaaaagacaaaagtattctaattttgttctctttacaacatgtgtaagatcttctgatagtcaattctatagatatgaataaatcatttagccaccaatttagttttgtatcttataatcgattcgtttgttttgtgttttacagtgaatacccatttgtaaccaaccatcttctttacctgtggaggtgaaacaagttatcatgttttatatttgtcaatgctatcattttttcaatcacgacttccttctacttgagatttttagaatttctcttaaattctgtagaatagacacagagaaaacaatttaaatataataatcaatttgaaatttgatcacatctgcaggacaatttgtttggaagtcttgatggtaatctaactcctactgtaatccacttagttaaacaaattattgagaaataatcatattttcttactttgtgccatgaaatttattctgaaatttataaatttgagcgttattatccacttgtaaatatttaggagatgttgcatttcatatttttttgacagtattaagcaacatatatattctggtaatataggttgcatggaattaatgagtcacgatattaccaatgaactctcaaagtcccatctattatattctaaactatcaacatttgactttttcacctcaccagtaatgtaaccctgcaattttttagatttgatgaacaatctcgatcaagtaagataattagttcaattaaattttacgggactgatttgtaatgaagagttatcaaaacgtaacactcacattttttgcttatgttattttagagtactaaatataagaagaaaaatatccaataataaaaagcagacctccaaatctgtattaaagcagccaacgaaggacaaaaatttggaatcagatctggcttgactcaacttgactcagttcagcttagctcaacttagtttgacttggctcggcagcggctcagatgcggacaactatgctcaggcatggatggaccaggtttgagttgtctagtgcgcgaaatggccaaatcagatgtccccgtgcgtggaaaacccgaatggcatggcggaggagatcagtctggtcaatgcaatgtaattcagcgcgtgactgtagcaacatggtgtgcgggaggagcaatcaagtcatctccagacgcggataggccggaacggagcggcggagggcgcagaatgacaaatatgccaaatgcgcgcagccgcgtgaaaaaaaggtagatgtgagatcaagccggatattgtgtggaaaggaaccaaatttgtcacgatcgagtgtttctgccggtgttccaaagttttttgggacgaaagggatgaagtcgacagagcgtgtggctcacgtgcctctgttgtcaacagcgcgtgaggctcacacacgtggaaaccagttggtgtgctggccggtggtgatcggtgccgtctgggatggtgatgagtttggttttttggtagttaagtattaactcagcctattttattattttaaggtttggaaaaaaattccgaaattataattctaaaataatagtactttgactctggtaccatgataatttttaaagaaaaaatatattattttttatttcttattctttgtatttacacttagaaaatatatatagggaattatttttattttagaaggattttaattacatgatattactttattattacaattctaaataataaaatattttatttagcataatatcctatttaatatagaattcttatcaacacatatccttctttgctgcgctatggcttatgatttttagacaatggtctatgggcttatggggattaactgggtgatgacgtgtactgtaaaagatgagatttgggcttgtgaaaaggtttataataaaagaaagtttgtaaagctgattccattaagtattttcagtatggtacttggctcctttgcctgttagtatgatttggaagcttcagatatcatggcagagctgttattggagcgagctccaaaatgattcctctcctgctttcctatgtgactataatagagataacctcatttagagatgatatatcttctttcccaagatttggactctgatttgatcagattatggacttagactagccatggattggtaggcatgatccatttccacaaactgctttaggctgacggcattccttgctgcagtatccgtataattcttgcctccagttttttaataagttaggatactaagtaattgacctgtttccctgctgtgtagatcatgttcttcattgtcagtatttgggcaacattgttaccctgcaataggtttctcaaacttcattccacacctcttttagaactaggaagaaacatacaaaatattggttgtctctggtgacattgagttccagagccagatcattatcatagagtctttgtcatcccatacatcaaattgctggtctccctggttgaggtccagtgcccagaatgtggctgagttccttttttttttcaggattgtttggatcggttatgatcagtttaaataattctttccattcaaatgataggctacctgagttggttaaaattctttgttggtttgtgttttctacgtggaatcttttccagcaatttgagacataacttccaacatgatttaaagttcttttggacaattaagaccaatttaataggacaaaattgggggttaccaggctgaataggtgcaaattcggagctggaagataactcccgtgtgtcaagacagtctgcctgcagctgatgtggtgcataattgcggttctagtgactggacagagaggtagctggaacaggcacacgaggggcaagcacagctggaagctgctcggctagtggttgcacatggtaggggcaggcgccactagagacagtgcagctggtggctgcgcacaggaagggcaggtgcacttgaaacagctgactagaaggctgagcaaaaggtggcgtggctggaggatttggttgtgtagttggggcacaaccgggctgccactgccagtgacgaaggtcggtcttgattggtggtggccggctactgtagtggtgtcagcaggctactatggctgacctcctttagagtttttttttttggcaacgaaggcgaactagatttggaaaaggagctagaatcttttacctaaagatctgatacaatgtgatgtttattttcttgaatatgaaggctctatatataatagttctctagagtaataaagaaaaccaacaattaattccatagggcgtattttaccagaatacaatttaacttaattatcctagattagttacatataaagtacattctctaacaccattcactatcttttgggtaatttagaaagaacaaaatggtagggcttttgatgatatagaggatgagtgggcaaacattaaggatgggtggttttatttttttggcttgctgattttaggtcatgacatatacaaggtgaaaaattttgggaatgtcattgaaatgattactactatgtaaatattttgaatataggtggcaccctcttggtgctttataatatactttatatttttaattaaaaaaaataatacattctccaacacaagccatatggactagtaaattggatttctctttcaagctgaaataggaagtaatgatcttatgattgagagtctgcaggaaatatgtatgcatgtggtattaagtagtagctttgaagttgaattgtagttttatgtgactctaatttctttgttgttgtgggtgaggttgttgcacttttagaagtacagttaatatatttctagataaacctttgtatcatttgcagagaatgggctatatctgttattttttagtttttctatttgtgttatgagattattttttattgtagtcctactaaagttgcacatttatctagcatgaaatactttctcctttaggctttgggccacaatgttacttggaagtttggcgtacagtataaactgttatctttatatgtttggaaaaacgaaaggaactgtttggtttgcgtcttaggcatgaatggaaaagtaaaatcatgatggaggctcaaatgcccttggttacttaatgctggtaaagttgggatgaattgcatgacatgaacatggttgctgattgattaggggaatgtagttcttggatggttaatttgtcacacttctaaggtcagtgacacttctcccacaccatggtttatccttctaccacctgctaaaattccatatagtctgctttcttaatttgttttttttcttgtccttctcattcatattttagtatgaaagatcttgtggaccaaatgaattctgatatgcttggcatgtgatcgtgaagtttattcttgagaaatcatatatgaaacacactgaaatatatgtaggttctgggat

SEQ ID NO: 8793 - DNA, 7160 bp, Carica papaya
  Intron number 5 from transcript evm.model.supercontig_0.16 7 (locus evm.TU.supercontig_0.167) derived from phytozome v7.0 (chr-ID supercontig_0; pos 4407196 to 4414355 reverse strand)
agcattaccggttccacccttacatcaaaggtatgcctacaagtgctctagttagaatatttgactttattttctggtgcttgcttcctttctcattttcatattctagattcactttttcttctttgaaatgttattgctagttctagttattatcgacatgtttctttctttgaaaaaagtacaaatttaatacctatgttcctattgtgacaagaaataagaacccttagaattgcagagttagaaagaaaccagagcttttgatgaatagattctgcttaattcccgaacatttatacatcagttacaactaagagcaactgacctcgttgcagaactgttccataaaataacaactacaagaaactaaaaagaactgaaaagaaaagctactccctgactttcagaacagataagaaaataattcttgggaaaagaactgggcaactaagaaaaaaaaaaaaaaaaagatgaagtcttatctcctttgaccaactcagccttctttttccattaggataaattttataaaccttccccataaatggaacaactttgactgatttagtcccttcagctactggttcttatggctggtgtttcaggctcataatatcactctctcgcttagccaggtgcttgtcctcaagtgcaaatgaagaataacaaacttccaccataagtacccaagaagcatcagctgggactgaatggaccttcagtggacaagaacttacaggattttctttatgattgcagtaatccaagactgccagaaaaggatgaacttgcccatctttagcaaatggaactattggaatagtcaaagaaggactcataaattttttaggcaggaaacatggaatagtggatactgcttgtaatcagtaggtaaatcaagataataagccaccagctagacatttgagtcaaaacagaccacagaactgtggataattttctgttagatctagcagccaaggagagcttcctataaggctgcaattttagcaaaaccaaattactgactgaaaaagcaacttctgtgtgatgagcatcataatgatgtttcatggcatgttgagactataagagacactggcacaatttccacaaaatttcatttctaaaagaaccatatccagtgcctcagcttcagtaaccccaggagaataagaaagcaatttgcaggtcttccatacactacaaactggctagccttaagagaggaatggaagcccatattgtgaggatactctgcccaagttatccgttcaaagcatttcttaggatgatcgctgatgaagacacatttgtgcaaaccagtttagtttgcccatccggttaagagtgataagcataactaaaagaaagtctaaagtcttttggaatcactcaacagtaacaattcagtaaaaagagcaggtgaaattaacatcacagtcattgactgtggtttctagtgaatcatggagcttaaaaatgttattagagaaaatacggccacacttgaagcagtacagggatgaggagtaacaaaatctgcaagttctgcaaccagtcaaccacaaccagcaaaacagatttgacatgggaaaggggaaggaacaaataaatcaagagacacccagacctgttgagaaattggaagagaatgaagctgccaggctgaagacattccagtttatgttgttggcaaaccaaaccagcttgcacaaaattctgaacacctgatttcacccctttctaataaagttcaacaaccactgtcttgtagttttctgatactcatgattttgaaatacctgacatgatggtagaaacaagaggaagttgaggtttaaagatacctaagggccatatggttactcctaagggcccaccgcctgcccaccgcctcgttcagcatgactttttgtagattttcttgaaagcagcttgaacttcagagattaaatggtgaaactctgtaaaggcagcaacttcattctgaattaatccagctatgggttggaaattgcacctaaatggcttgagtttcatgaacctgtgatatggcattagcaacaatattgtcttggccagctttatactcaacaaaaagtcaaaaatgctattgggaagctgttaaaatttgccgttcgagaagaaacctcaaactctattaattagtgtgaataacaaactttggtcccaaagatgtggatgccaatgccggattgctgtaacaagccctatcagttccttttcatagttgggcagtttgtggtgacacacagccagatggcggctaaagaaggcaatatgatagtttagttattgtaatctccaattgccaaatcagatgcatcacatctgacaaaaatttgagtaaaagccagaagaacaaaagggggaagtgcatcaaaagccttggatgagtcacctgtccaattaaaggggctttcatgtgacatgttaacaagaggtaccacaatgataagaatgatctcacacaagcttgtggtcgcaccctataagccccaaaagagctcataaaccatatacagttaggtcttgtccactatagcattccaaggaacatgctgttatcagctgaaacgccatccttggaaatcacaagaccaagttaaggattgggttatgcatctagaagtggggtaatctaagaggaactcaagagttttcaacaatttccataactttctcccttactgtggcaggagggcttgttagagagaacccctaagatctcagagtttagaaagaaaatctaacttctggtgaacaagttctgcttaattttcgtcactattcttatagatttataccatcaattgctactaagagcaactgtcctcttagcataaaaccaggacaatcaagaaagtaaaataaaatagacgaggtcttacctccctttatcaagttgaccttcttttccatggatataaggtttataaaccttccccataactggaaccactttggctgatccagtcccttcagctactggttctatcagcagttttaggctcataatagtaaccaaaatgtcagtcctatgtaagacagagttaaagtttcatttagaaattgaatagtatgagtgttaactctttcatgctatgcactgtaagaaaatcaaaacaatgttagcagatggttccaaaatttttagaatgaagatgataagttttatgctcctcttacttcattagtattgctgttggcagcaaatttcacatgtatcgcagttgtcgattattacattttggagacacagttgcttttcgactttaactctcctaggaatgtttaaaattctctgtccgtatgtgtcctctttgaatctgggttagcactgcttgatgcctttttagttcacttcttttttcttcccccctccccaacagcaccaaaataaataaataaagagtcgcttgatctatattgtaagggctccgaatatcctgaagaagtgtcatcctgtctcttttttcttttttgaaataaaactttattcatatgcaccaaggatgtgcaaatccatgtagaaaagtatttatacatcaatcagaatgtaaagaaggtccccaagtcttcaaaggaataaataggatgattcttaataaaaaacctagggtctgacaccaactagttttaatcttattgaaattgacatttttgtccttgaaagctctattgttcctttctttttacaccatgcaaaaagtgacaagggaaataaggctcacgtctcttctcacctctgatccctttccacgcccaaatttcatccttcactgaatcagccatcacccaattagtacccaataagccataagtaaaggtatatagtctatatacaaagggacaccagaatagtagatgcttacatgactccacgtctcctctgcagatataacaaatttaacaaaactctgtcccttccgatcagcttgtccagggttaaatgcaacctcaagtagcctcccaagcaaaaaagaaaaaacaactttgggcaatgcgttaaccctccaaatttgcttgtaaggaaagcctcttcccatagtctctctatttgttagatggttgtagaaagtacttgcagagaaagatacattaacattatgacttcccaatcattgaggctcttcatgacctccacagatcattcccaaatctcgtagtgttagtccaagcatcctatatcaaagcatctttgttgtaagcaataatatatatatatgaggaaactaaagctttgagaggatccccctccatccatctgtcatgccatatcttggccctattcccatatcaatcctctagctaatgcaattgggaaactgtcttcttcatataaatttttttccattgtctgttgccttgatgtctagatgttagtctagtgaatcaacctctttcctctgtaccatgcttcgccttaattacctttcatagaaaattgtcatctcatttatgaatcctcagagccatttcccttgaagagccccattgagctccaccattgatctcaacccaggcccaccaaggtgaaaaagcttcttcacctctttccaagccacaaggtgatatttcctttttcctcagaatcaccctattaaaatctacactttatggactcaagtatctcaaccacactcacgaggattgtcatgagagatatgtaatgaatggggatgtgggccaatgtgcttttaatgagagtgattctctccccctccctctttcctagatagaagatttctttttcatatgactaaatgttattcaaattgagctaccacctgatcctacatccggacttccttgtatttggtcccccaatggtactctcaaatacttgattgatagattaataatcttacatttaataatactagctaatctattagcgtcgttccaattctctagtctcaccaattcagacttttcaagatttatattaaaatccaatactacttggaagcttaacaaaatacatctaatatttagcaaaattctctcacttgggtcacaggaaagtagcgtgtcatcagcaaaacaaatatcagtaatctccttcgcatgtttcccatctttgacctttaaacctgtaaatattccaagttcgtaggccctcaaaatcattttattgagatcctccataacaatgatgaacaaaaatcgggacaaggggtctccttgcctatgacttatggagtccttggagaaagatgatggtcccccattcaccataataacaaaggaggtcctagaggtacaatgtctgatccacttttggcatttttccctaaaaaccatcataatcaacatgtaatttggaattcccagttcacatggtcgtaggctttctccatgttgagtttataaaggatctcgtctaaattcttatgtttcagttcctctgtaatctcatttataattaaggttgcaaccaaaatctgtcttctccctataaaagcacggtgatcctcttccactgctttctccatcactctagccattcttcttgccagaactttagtaataagcttgtacacacttcccacaagattgatagatctgaaatccttaatgcttgttactccacaatttttgggataagaactagaaatgttaagtttgaacttttaacaaactgccccattttataaaatcattaaagagttcaacaatatcatgaaggaaaccaatgttaaatccattagactcaggagctctatccttattgtttgcacaaggtcatcatgaatttcatccttggaaaacttctgtcaaaaacttcacgactgtgatcatccagtgacagaaaattcaaggcatcctacttagtgtccacctaaattatcagagtaaagccttttaaagaaagtctaggccccttcatcaagtccccttcactagaccaccgtcaatctccaacctatcacataattgattctcctataatgattagctatacaatggaagaacttcatatttctgtcactctccattatccacttggcttatgagttttctctctgtgagatttcttccatctggattctatttgtcatttcgcggcaaatagattctctacgggcttaattagtggcagacaatcctctgtcacccttcattctatcaatgctctctaattcctgaagtaaggattgattaatagttgattctcatctccgctcccttttacactactttttttatttttgccttaaccaccgaaagcttcttagccactctattacttgccttgccctctaccatcatgccattccatcaatctttatcgttatgatgaggcgcattatctcttaaggagaatgaatgatcataagaaaaggttagtcatgagggactgcatggccgcctaactttacatcaccgccttattatagttgatagtatgtatgacatcttactttgctcctcactcgtgatcttcaacattgtcttttctgagcacagttcgctcgcctctctatgattgggtgccttaaacttcctccccatcaattttgtgcagcaacaccatcatcctccaccatcctttacctgcggtccatctgggataaactttcccctctctactttgtgagatccaagaacttccctcttctgttcgctcctaaagctacccaaagatttggtttttgcggaaaatgtttgtccctagaagttctccccttttgttcagtaaaattcctgtggggcaccaaggagccactcgatttcctctctccaaacaaagatagtcaatttgaaccctttttcattcttgctatgaatttttcattttttgctggtaattagaatatcagatggcttacactttgttgttggattgaaaggatttggtttgtgctgtttgtcaacgtgtgcatagcagcatagtttgattgaccattctttgtttcttaaacgtttagggaagttttgagatattgtgttttttcggataatttttagcagcaactaattcattggactgtaatatgtcactaaatttatctgttgctgtatttacaattgattgtgcctaaatcttttggagttattaactaatacgagaaaatacttgtttgcccttttcttacccctttttcacatgttgaagtggtttggag

SEQ ID NO: 8794 - DNA, 1608 bp, Carica papaya
  Intron number 2 from transcript evm.model.supercontig_5.34 9 (locus evm.TU.supercontig_5.349) derived from phytozome v7.0 (chr-ID supercontig_5; pos 3251250 to 3252857)
ccatcgaggaaattgtcggaatctgcaccgaggtaatattttagtttcttgaatttataccctatttcattttctgcgacttctgatgtttgcttaaattatatatttaggatttgaactcatgaaagatggtccatttcttgattttaagtctaatcttttgttcacccgttaacttgaataatgatatcatattagcacattcaccgcgtaaatgttcaatcaatgagtgcttaacgctggggagtgtttttatgtacatacatatgtatatatatgtatatttcctagtttcaaacgggaagttgtgaatgggaaggctaagagtttttagaagccttcttttatgtttctcattttgatggatgtatttttataattactttcatttccttgtttttacattcagtagctatacagtatagaaaccataacttgaataatgttgatgcattttgttatacatatatcacggccaaatgtgtggtgcaaagcagaagcttgcctcatattccctgagcattgttttgataacatagatggtcatggccgtaatggcactaattaaacgagaccctgatattataattatgatatagaaattacttgtattggtagatccccaaagtttgtggtgcatataggaccaaaacctttttttagattcgttctacgtgcttgctaatcctccttaatgtgaatgcaaagtttgcttcacaaacatcccatagtagcctgcttattagaaacttgttatgaggttaacctcacaagacatgccaggttggagtttttgcatttaccttgttctggtttaactgagcagaatgattgtatttaagtgatctttagaaaattagactaagataacttttttgtttgttctaaatgtgataaataagcaagtaaattgtaacaaaaaaaaaaagtgacagattttagggggttcaatcaaggtgacttattttcattaagagtaattctaaaaattaaaatatgttttattcccaaacccaaaccaagtatatcaaatctcacagaataacataaaagtcggttctgaaagaaaacatatatacatatctgaaaatataatatatatatatatatatatatatatagtgctgtgaggaaagaactgtaaagtagaatgtaccatgccccaatatatggatttgttctttttagaggcatttaatctttgtaaatcaaggtgattttttttggtggatttctttcatcaaactgttataaggaatctgtcatctgatttattgtcaattagaagcccctgcttctctgatgcagttgtgatgtgcaaatggacttatacaccttctgtaaatatattctagttgacttcattcttggcatggatgtgggagtagaacaacaataaactatgtaaaattttctagtcgaatccatctcttggcatggatattttgaagtagaacagccataaactgtggaagtagaacaggaataaaactatctaactatttccgctgaatttatctcttggcacagacattggaagtataacagcaagattatgttgtttatgataattctggcagattttcagcaccttcttgcatactgagt

SEQ ID NO: 8795 - DNA, 830 bp, Carica papaya
  Intron number 4 from transcript evm.model.supercontig_25.1 89 (locus evm.TU.supercontig_25.189) derived from phytozom e v7.0 (chr-ID supercontig_25; pos 2010823 to 2011652)
ctgcaaaagcagaagctcaatcaagaaagcttgaggtactctctccgtttctccttcgcttgttttgttccaagcattattagttgcagttgtttaagatttgttcatgttaatgtggattgattttgggtgcatcatcgggaatattatgtacatattctgtagaatattatggggtgagaaaccttatatcgggtttacaattctatgggtgatgtaatatcattttccatcatagtctagagttgttaaatttttgtttttttttattttgctctttattttgtgtaatttagtgttaattggagatttattttctctgtcttttaacatggaattcaatgaaaattaaaacactttttagtcaaattatttaccaaatcatgttataagtttccttcaatgagtatctggtagttgaatcagcaagttattatgagtttctattggtttgatgtggacatatgaacaaggtatatatataaatatatgtaaatatatgtatatgtatgaagtgtatatattattagtgttgaccgtaaatagatgaaagatggattattatcgcgctggttgagctttctcctcgagccacccgcagaggttgaagacagcctgacccttttgttttcttgactggtccaccataattcaatatgtacatatacttgcatgcttcaaaagtgatgatggtttcagtattttatgctacattcccacgtgaaaatgatcaggcgtttggaaatttgtgggaaattggaatattcacttccctctgaatttaataaagaaataaatataataataatttttaggtgaagatacagaag

SEQ ID NO: 8796 - DNA, 5323 bp, Carica papaya
  Intron number 11 from transcript evm.model.supercontig_34. 205 (locus evm.TU.supercontig_34.205) derived from phytozo me v7.0 (chr-ID supercontig_34; pos 1915351 to 1920673 rev erse strand)
gtttaagcaggtaagaaatgggagaccaactcctgtaagttaaagaagtatcttaaacctttggtagccaaagtttattcaattttgatttgtggacatactcctcagctacattgcatttggcaagctgacagcactagatggctagtggttgaggaaaaaaagtttcttgggcataaaaaaaatgcttgtgttttcttatttctattaaatggttgttaacttttaaattgctgttggcctcatcctcatgcattcttatattgtaaaaagagtggatagacttcattgctgttaatgtataaaaaagcgatagatattttctttcaacttaaacattttaagatagatggtcataattaatattttaccatggtattttgttgattatcatattttattacttaattattttagtttattatttaattagttggaattatataattaggattttataaaaataatagttttatataattagaagtttagtagaataagaacttccctatcagtagaatatgaattttataaatacgttaaatgtaacaacattaaaggtgaaaaataaaattattttttctcttaaaatctacatgacctcagagtcaaataaaactatttaaggattttaatttcatgattttttttcaaaccctaaaataacaaaaataggttgagtagaaagagagtcaaataagaggaagagagccagataagaggaagagaggaagtagttgatctttgcggtctggtcgcatctggagcagggacgactggttgttgatgttctcctttcgcacgtatcaaatccacctcaccgtgccgctgccgcgatctgagcacaaagctgctggccgcgactccctagccttccgcgtcgcacaaactcgagctctggccatctgggttgcacaaacgcacagatgcacagacacactgccttcttcttctgccgtgcgtaaagccgcacacgggaagcttttctggccgcgatctgtttcacttcacagacgcgttggctgctatgccttcgcaagatcgcatatacgatatgttttactttttctggctgcgtcgtgtgctatagatttgcttgagccaaggaagccgaagctcgagccgagtcgagccaagccatttgtgccaaaccaagccgtttttgagtcgagccattttttgagccgactcgtttttgagtcgaggtcgagcccttttttgagtcaagtccgagccgttttagagctgaattgcgttgagctgctacctaatacatctggttctagtttgcaacacttttaagcgtcttttattgctgattagaaagtctgttcttcattattgagtattatttttccgtgtttctagtactctaaaatgacataagcgaaaaaagtgatggtttcttattcggataacccctaattacaaatcactcccgtaaaatttgatgaaattaattattttatttgataaagatcttgtttattgtttatcaaagttggaagattgcaggagtatatcacaggtgatatgaagaaatcaaatgtaggtgatttggaatataacaaatgggactcagaaaactctttgataattttttaacttatcaattccatgcaaccttatattgcacggacatatttgttactcgatactgcaacaaaaatatggaatgcaacatctctcacatactcacaagtgggtaatgatgtttaaatttatgaactccagaataagcttcatgacacgaaacaaagagatatgactatttctcaatatttttcagaattgagtggattatgacagaagctagattactatcaagaatttcagacagattgtcctgaaaatgcagttaaatttcaaaaattaatagaacaatagcagattaataattttttaactggtctgaacatcgaatatgatcagatataggaccaagtactgggtaaggatcatcttccctcattacaacatgcatattgtatgtctagtaaaaagaaagtgaaagaaatatcatgctttacataacaccagttgagaaaacttgattagttactcaacctgaacagttcaaaaatctacagaagtgtgactattgtggcaagtcaaaacacactaagaaaacttgatggaaattgcatggaaaccaactagaggtcgtgaaagaaggagtgatagacctacgagagctcaagaaaatttggttgagagaagtgaaacacctgatacatcaacagttgaaatcttttcaaatgaggagattcatctcagtttaattcttcatcaagtataggtgcaacaaatctaggaaaatcaaaattttcgaatgaggaagagaattgacattggtaaactgtaggatgactcttcagaacttggtatgcaagttgggcatgagagacatccctgcaccaacttgagggagacttgctaactaccatattttattagttaattatttaattagttagtatttattatttaattagttgatattatataattaggattttatgagagtaataatctcatataattagaagtttaatagaataaaaattttcttatcagtaaatagaaattttatagataccataagtataataacataaaaggtgagaaataaaattattttttcttttaaaatgtacatgtttaaaatagagactaaaatatttgaatcctagccaccatcctatttttaagtaattaaattcaacataaagtaggataaacttgtgcttgatccacattttcagctaactgacttgcatctgggggcacatgttacaatataaatattataggaattcgacttctgtaggagtttaattcctatataaattggtaactttagagagatctctttataaaatagaattataattgactttcatgactaaagttcttttctttttatgagaccgagttttatttagttttctactaaaactttttctaatatatatatatatatatgtacaattgttataaattaaatatcatgaataaaaatttagaaaataaaaaaatttaattacgaacttttatggtactaaaataggatctgtgaaacctaattttttttttctctcttgccaatgaccggatatggaataattacggcaaaaactaataatctctctgaagttacatctcaatctaatagaattatttatgacaaacaatccgaattgggagcaactcaaattctaatcaccaatagcaagctaaacaaaaacaactatattcaattgtctcaactgatcaagatgtattggcagaagagggaggaaagaatacctcataagagaagtcaaccaactgagcgctaaagatccaaagttctgaacttggaagacagagaataatcgaatcatgtcgtagctgattaactccataacaaatgatatcagtaagaaattcttgttgtacgggatgacactcgaaatctgggaagtagtcaaagagttctattcgaataaagaaacacgaggtggggtcagtgcacacaggttttctccctctcgggttagttcctctattgtgcccccattcccagaatgtctaatagattctgtctgactacacccttctcccacaaccttgtggattgttctggctgacaattcttccaaccggccaaccagaaattccaattttgattctcctgctccctattcttttgatgagtgtgcaaatatttatgtcatgtttcattgattttctacctttatctatctttagaactcaaggaaaatacgtaggactcattaaatggagagaaccctgtgatctctagaagaggaatacactctccattaacgtcaaattgcatacataatgctgtcctgttcccacagcggaaggatatgtacaaagaagagatgttcaactggaattaaaatttttagaattatttaaactaccgtcgtcttaaaaatagacttctttcttactcttatacacacttccacttgtttaaatacacttatgattattatacaaaaacattaccactaatgcacacggatgtttaagcagttttttttttttttctaaataaaagtataaagtaatattaatgtgttggtgccaaaagggcaccacccatatacaaaagatttacacacagatataagcagctatagaagattattaattttgttccttctttaataaatcatgggtaaggaactacattgttcctaactgaatcatttgtctaaccaatttctgatacttacagtctcaactggtatactaattccaccttctagtttatgatttgtctcaataggagaatctgttggtttacaacctagtatcatggtttcttcaaggagtacatactgtctttacgatcaaaaatgaaaatttatttttccaatttgaaaacctcaatgtcaaggaggtaatacaatttactcaaatatttgatctcaaattcttgagctagagacttcttgagcttcttcatttcttccatataattcattgctgttagtattcatcaaaatagacagtgagcatactaatcttcccatcgtggtttttggaggatagggtattataaatattacttgtgtttgaaggagttcatagcattgcttcagttcatagctttcttcaattgaaacacttcaattttattttttctcaatattaaagcataaatgaaacattttaactttattttttcaatttattattgctgtaatgatgtaaatgttcatgtattcatacatgatttccgtggtagaaaactatataagtatgaaaatataataatgtgttgctagatgttggggattccaaacaaatagagaacatctgcaaaatagaatctggaattattctgttgactgtaattcaaacattttaactttattttttcaatagattattactgtactgatttaaatgtatttatacatgatttccatgataggaaactatgttggtatgaaactataataatttgttgctaggtgttagggattccagacaaatagagaacatctacaaaatagaatctggaattgttctcagcagtcaacagataggcatgatccaagcctggatatgaaagtcttaaggaatgtgaattccaaaacagaagtagcatttcttggagcattctaataaaaaagacgcatgagaatggattttggtctagtattttatagtaccttctattgaaagcaaacatatgttacagaattgggtaagtaatatgtcctgcaaaattttccttaagcaatttctattggtaaaatcaggattctaaagctgaaggaagaggaagaactgcccg

SEQ ID NO: 8797 - DNA, 1643 bp, Carica papaya
  Intron number 2 from transcript evm.model.supercontig_13.4 9 (locus evm.TU.supercontig_13.49) derived from phytozome v7.0 (chr-ID supercontig_13; pos 558078 to 559720 reverse strand)
tcgattcagttggtaatcttgaatttggtcagcaggtttgttaacaatctttctctttggtattactgtgtggaaacttcagctaccatgatcatcttaaccacacttatgagggtgtttaacctaatatatgtttgggtcaaagagaacttagaagttttttcttttttttctttttttcttcaacttgtttaggataagataagatgaagagtttacaagttagctagcttagaagctcttgtgacagcttctttcgtaagctagtaagcgggaaacatctttctttctttgaaaaaatcttgtaagctttctaaaatgacttagtactaacctagtgaaagactatgatcttaagtttgaccacaatatttttctctctttcaattaacaggcaagacactatgttgccttcaaacttaaatatcttaaactaaaacattttgaccacgatttttttaggtgcattgaattaaatgacaattgaagaaggcaaagttaataaaaaaagaacctaaatgctctcaaatcatattcatttattatacaggtctactaaaactaaaaatatgatcttgaagtgaaatgcatgtaacattggagctgaatgaatcaaagaaagtattctgttacaagcatatttctatgatgtgatgtctgtaaaattcttattcagtccagagtttagcatttcaatttcttttctggataaaagaagcattataaaaaagcgaaaagcagcacatggtgtccccctactaaaaacctaaaaagagaaataaataagaaagaagcttaaaaaaaaaatcaacccagtgcttctgcaaaatggacaaagtgaattaatcatcacaaattctagccttttatggtatgtggatttcttttttgtttcctgtgagctttttgtacagactgaacttagttgagtgaaatatattaggaaactgaattatgtaaagaattacatacaataagaaaaaatagcagcttcagcgtggttaattgaaactacaaccacgagtgtggacctagggtgcatttataacttgagcctcataatgtgaaggacgtgttggaagatatttgcttcaatttgaacatcttctataccattctgtgcatatcctctttttcttctctattaatcctcctctctccaatatatctcttcttatattcttttttttaaatgaaatttatgccattctgttggggggtttaacagtcagtgttgagaagttgaaattttgtctttttctacctagttatttgtgttccttttgtttccttaaacaggtcagtttgtctgtcatggtcaacatgtagctaaaaaattggatttgtcaaggttatttatctcagaatcttttcaatttttaatttttcattgtttagtcttgttagagcgtcttcctcggctggtgttattagataagtatttatatggaggtgttttgaattttggttttagcatgcagctccttttgaccagaaaatatcctgcaggccatttttgcacaactgaacacggggttgaactaaatacaattatctttttattcagaatgcttaactatttttggtgtttctttggacctgtggcagaatattttcttcttgtcgtctcttctcaagcgcat

SEQ ID NO: 8798 - DNA, 9536 bp, Carica papaya
  Intron number 3 from transcript evm.model.supercontig_7.22 5 (locus evm.TU.supercontig_7.225) derived from phytozome v7.0 (chr-ID supercontig_7; pos 2258305 to 2267840)
gtgtcaccagaattctcggaatagatgtgagtaagaattcaatattgattatatgtacttgattgtggctgagaaaaatgatattattggagcatgcaagtcttacagtttcaatttcttttcacgctttgcctatgtgtgacttatttttgtctctgagaaattatattcttatttataagccttgcatatattctggtgatttgcaaggcagttagcatgcataagagatgaggaatgctagttcaaatttgagaccgagcatgggatctggaagaaactcgtaatctttagatttacctttgtgtcactcttaattatgattaaagctttatcaatgctgttgtgttcaattgaaaatagttccttataaattttatagcattataaattaggctattttcctgtatgttttgcactttcttctcacaagtttatgcatttttctatattgtttcagtattactacatgttatacatgcaagctacttttcctagttttatagggcttaagatgtttccattaaaatatatttccaaaacagttacgataacatatcggtagctcaaggtaagccgtgacattcaaaatctaattacccgtgtatttatagggtgtttacttggcataatattgtctagaattgctaaattggtaaacaagaacaaaatatgattactaactaagaataaaaccttaagacaatataatgggtgtgaaagtcttgctaacatataatagtcattgtagtaatcctatgttagtaaaaactgcttgatggtcccagattattctccctctctctagaagaatcaactcaatgacaaatccttgataatagtcatcaagtgtgaatccatcatgaaatatttctctgcaatttccatgaaatgcttgaatttggatgagctttcaaaagatttggtaatacatagaaacctctacttataaaaataatgtatccgttaaccaaaatacctacggtagtatttttgatagtaacaaaaatgtaagggcattaagaactaagtatctgccaaatcacttgtaggagaagtaagaggctcgatattgccttgactagggacaaatcctcaatgatgattggtgaaaacccaactaaaatttacatgactaggtaaatcgagtaaataggtattaggtttaagcttctcgaaatgaaatatagctctgtggtgtttaaattcttaagaaggaaaagacagcactgagttctagtgcaaataataatatggtcaccattaaagattcttcgatcctacattggataactctaataagcttatactctgtgttactcattgtagtctttacatttgatttagtatacaaaccagcaatatgttggtcaatagatatagttggctaagagagacaagaattatgaaaagaattatcaaaaaaatcgataggcaaatgtggtgaatatacatgaagaaaggtgaaaacgtcattgttctaatggatcgaataacaaaagagttactagtaaactcaataatgcaagttaatgctgttatcttgctttaagtaaacatgtacccaaataaaagccttaagcaagagttggttatcctattaaaaaacatcgtctacactgtcactaacacagaaactgcttttgaccaaagggttattgattagagaatccatacacttatcatgagtgttttgcaatttccattttaaagacaaatacttcaagattaagtggctttaactatgagatcaggttcttaggcaggatgtaacatctccgttgatcgaggtggtctattaaaacatcaactttcttgtagaaagtaaaatatccctctccaaccctacacaatatatgttgaaagattactaaaggggagtactttacctactcctgagtaatcacaagagctatcaaataacttatcttgatgcttcacgaaaagaggtagctacataaaagaagagcatgtgaggatgaaggtgtaataaaaccatgaatagtgtattatagaaagagggctaaaatggtaataaatttacagaaggcaaaagagtaaaaatataaaagggtaaaataggattcacacccttgatagaaggttcttgaagggaatgatatgtcggttgttgtaactagaactcgttacaacggttgcaaccggtgcaaccatctctgtaacaagcaggagcgcctatcaaactggcacttcctaccccgatttcgcctttaagcaggttgtaattgaatgaagaaatcaatgcctaatcatttgaatcaatctgagtttcctttcttctctctatcgctctctctctgtggactaaacattgtcttctatttaccaaattaagttggaatcaggaataaaggttttgaaaaagtggtattaaagctatttgaaccggcggagatctatgattcggtagcttccccaccagatctaaaagaaaggcggtggtagtggaaaccgtcaaggcagaattgacgaacctattgttaaggaagtggactagcgactgaccaacttcatgatagaagtctatgaagttcatagacaagctcgatagcagttggatctcatagtagagttgttgcatgacgatatttttcttcagagagcactggatcttatattgcggacggccgtcctcgttgggtagagaggaattgtgtgctcccgccgctgccagccgcatgaaagaaaaagatatggactggaggaaatatgggagatgtttaaaaccagtttgcaaactaaaccggatgagaaaccttgggaaccgctcaaacctagttcaaccggccaggttaacatcccacgagtcagctgccaaatctaccaaaaatggaagttccactatttgaggagtaaatccccgtacctggataaggagatgtgataagtattttttggtacatggcaatccaaaagaacaaaaggtgggagtagtatcgattttccttggtgaagttgcgggtgcatggtactgaggatggctggtaatgatgagatagagtgagaatatttcactatttgaaggagtaaatccttgtgcttggatagatgtgattagtattttttaatacacgacactaagaaggaacaaaaagtgggagtagcatcaattttcctttgcgaagttgcggatgtgtggtacttgggatggttggtaaaagatgatgagacagagtaggaatgtttcgtggatgagctttgttgcatatttggtggtgtttcgagaaaatattttaagaaaaattcaaaaaggtcacacaaactagtccaattgtagaatataaagaatgtttcaaatatttgcaagtcttatttggataatcttgcactctcggaaaacttttttatctcaagctttatcagtgacctcaaacctaaattacaacttataatataattgctcaaactccgtacttttaaccaagtttttgagcaaactttactctaagaacaatccattatagagatgtatcagagtttatatgtcattcggagaattgtccaactattggaaggatcaggagcgagcttcccaagccacgggaagggaaatagagcctaggaagtcaacaacatcctgatataaatgtgacgactgttattttttagggcactgttgcccaagtaaaacgtaatggtagtggaagaaattgcaagcggggagcccttggaaaaaaagaggtacctgaaaactttgttgagaattgagaaaatcccatatgtaccttgtacatccaagcaatataatggttgactacaggaagtatcctcaaaatccaagaaacgttagcaaagcatgacatcttggtctcttagacaacggaagtttgctcttcttcttggacgaaggagcaatcgaataaatcaagaatcacgtggttagcaataaaacattaatgatgacgatagccaacaagcaaaagatatctaacagcatcgagtgtttagaagtgtcttggacgctgcaaagatataagtctttttacggttttcgcatgattccgttggatagatatgatatgatattgagtttcgattggatgaaataattcagtccaatgatatttggctttgttcaagccactattaagtttaactttggtgatttagtcataatgcttaatagaagcaatacttatagtaagttaactggtgaagcaaaagagattaaggtaagaaagtggcttgaataaacaaatgggtcaagcaaaaacaagtaattgagggcggaaccttatttttggtgatggatattgtaaaggagatacaaacttaagagatcttcaacaagacactcgaaacattacttgaccaatataaggatgtctctaaggaatcttgacggttgtctccaatcaaggtcttcaatcacaccatctcgatgactcacgagaatgccacggtaaatacaagtcctgatataaattcattacacaaaaaaaaaaaaacgaaatagagaaacaagtacaaaatatgctagatgattcgcttgttcattctagtatgcgcctttctcatcacaagcattattagtcaagaagaaggacaacctggaggttcttcattgattacagagagctcaattctctaaccataaaagataagttctcaattgttgattttaggaggaaaaataataattttatttctcaccttcaatttgttatacttagatatttataaaatttttaaattactaattagaaaataactattctactaaaattttaattacataagattactattctaataaaattgtaattacataatactaacgaattaaataatatatcatattcaacaccttccctcaagttggtgcaaggatatcacacatgtgtaacttgcaaactgagttgcaaacccgaagcgtacgcacgcgaaagagttgaataaggactaaaaaagactggtcaggaaggctcgtacgcaaaagaagcggatttgcgccggattgccaaattagaggcagacacgcgcaaaagagtaaaaaaaaagggtcagaaaaggttggtcaaaagggctcgcgtgtgaagaaggtctagtcacaaaattagaagcggtcacctgtagaggagccagaaaaaggaccagaaaatgttggtaagagtggtttgtgtgcggaggaagcagatctgtcggacaacacagcggcttggctcaaacggttcaaactcacttggctcaggcagcagctcagctcaggctcgtcttttctggacagatctttggacgtgcgcagaaaaatggaatgacgtggtcttttttacccatatgtgttgatttgcggctgtaattttttaccagcgcttgtggatgtgcagctgcacctttttactagcaattgtcgatatgcgactatatctttttaccgacacttgtagatgtgcagctgcacttttttaccaacgactgcgatgtgcgattgcaccttttattgtcgcttgcgaatgtgcggtgacacttttttactagcacctcaagaatgcggctgctcctttttaccggcacctccagagtgcggttgtatctttttaccgatgctttcaaggtgcggccacaccattttaacggtacctctagagtgctaccgcactattttactgacgtcttcagagtgtggttgtattttttactggcacttgaaccgccactgaaaatcaccataaataacatagaacatcggcgggttcaaatccgttttgggtggtgatgagagtagatttggataaaagggtaccaactctgcatattgtgctaatttaagatttgaaaagaatcatgaaattaaaatagtaaaataactttaattggcttagatatcatgttagttttaggattaaaaaaaaaaaaaaaatttatttctcacccttaacttattacatttaggtatttatagaattgttaaactattaattaggaaataaatattgtactagaatcttaattacgtcagattactattttaatagaattataattacataatattaactaattaaataataaaataataaaatatcatattcaacaccaatatccatgattgatgactttcttgatgaattatatggaacaactgtattttctaaaattgatattcgagcagggtatcattagattcaagtaaaaggaaaggataaacgtagaactgcctttaggacacaccaaggtctctatgagttcagagtaatgccttttggtcttatcaatgttgcagtcacattttagacccttatgaatcacatcttcaaaaccttcatacggaaattctttcttgtcttctttgatgccatattagtttacaataccactaaacaagaacacctaaagcaaattgaagaagtcttgaagttacttagaagaaacaaattatatgccaaacaatcaactattgcttcttctagactgaggtagaatatttgtgacacatcatctcctgtcaatgggtaaaaacagactccgaaaatagaaaccatcgttaattgcccgactccataaacattgaaggctctcagaggatttttagggctaacagggtattactgcataggagaaacgtgatgaagatgaatttgtaatgaaaaaactgttttcgcttctcgtcttgttgcttctctgatttgtcctcttaatgatactaaggaacctcaggaggttcaagctgctatgaattgtgatctttatcctctttgcctactataacttgaaaagctctctcgtctcccggcaccccaaggtcctatttttcttgattattatattaaagagtcttttcaagaagttgattttgttatgattaattatttaccacactctttgaactcacaccctcttagcccattcccagtcctttagaatatggaccaactacttatcttcttgacagacctgacgatatggatattaatcatctttttgaagttgggaatttatgaacttattgaggtctcttggagtcttttgcatcgcttttgcatatttgtgcaacctggcctaaattcaagcatatgttcctgcgaacaagggagaattgcaacctaacccctctacaggcagttttcatgaatatctttgttgagtggaaccgtcctcctaagtcttgctgctgtttggcttgacaatgagttcttatgcactttgaattccaggctctcagctaactatctgcattctaactccaaaagtatagttctttgtaagtggaagagaatgatgcagaatcctctataaatttataccttttaagatatttctttttgtttatctaattaggaaataatatcttgatgatgtttgaataatttagttatttaagaaattttagaaacattggatttgttttcttattaattgttttcctttttatttaaagttacaacctatataaaggtttctaatccacaatttatggaagtttgggattgacaatttttagtgaatttatttacatttctatatgttatttctgtatgtctttcttgttcttcatccctgcgtagtattcttctactctccctcaaaagtgttcacttaatcgtgtacttccttctatctatctagtcttctattctcttccccatattttcctctatttctttatattgtaaagtaattatgattctatcattacttgtcctgcatcacattgagcttgtatagattaggcaatactcttccccctcacttgagcctgacttatcttcaaaccattagcaactctctttcccttggccatacttttatttaccaattgggagaaaaatctgtctaaaatcccctcaacattacggcttaagctttctcatgcataaattgtttgcagctttgaggtgaaagaggattttcaatggtccaaagtaaaatatagtcctaataatttattgggtatatggttcaattgcaacccgcaagtgcagtcctgcacgagccactttttgagcaaagccatgtcttgacttgagccgtttctagagccaagtcgcctcttgagccgagttgctttctacagcttagcctcatcaaagccaagccaacctctcaactatgctgctttcctagttgtctataagtcaaaattttctttgcagaaattttaagagggattgagcttgattagattaggcaatttccacccctcacctcactttaacgttatcttcaaatcattagcaactctctttcccttagcttttcatttttttctcttacactgtttgacaatttttggtaaaaagggttctgaatgggtgcatggaatctagtcctactcttttggttatattttactggacatatagtttagttatgaaggataaactacaagatctatcaagcttttgatcaatatggacatgtggagaattaaaatatatttatattctctttgttttttttttccttccagcaatggtaaaatttaaaggaatgcagaaaggacctaatactaattaataatctaaacttagtaaattttgaagcagaagacctatgcctaatattaaaagcataaaaaaagcctctacaatagaagtgcttgaactttttcaaatatgttgtagtttaattttccaaatgaaatcgtcaaaaagtggaaagggtgtgcccaaaaacctttggaactagtgtagaacagtaaaaaagtggtctggaactgtctaaatcgggcgagtcaaatggttcggtcaattttggattaactgggtgaatagatggagcaacctcaccaattttagttttggcaccagattagtattggacaacataataggctttagaaagttagaagaagaaaataaggataatccacgttacctccttttttctcgaagtcctagttttctatggaggtggggtaagaaaagttgctaaaacttctcttgcaaggttctgtttttgtgggtttatggcactatggttagagtggaatactaagatttttgaagatcgctcctctccaattcaagacctgtggaagatgatgatatttttcgatttcctataggttaaggcccatggaaaatttccaaatattgcttttttttttttctcaacatggagacaagagtgcaataatttattgatcctctgttagttcagttgtagctattttgtgatttgagctttcttctagaaagctttagaaggataacttattctacgtcattgtaattacaccattcttgtttttaatgatacttcttttgctattaaaaaaattctaatctacagcagcaggaattcgcagttagcaaagttgtcacaactgtaatgacagaattgctagtgactcaattcaatagaagtattaatatatttttacttataggcaattttttttaatattaatgaactatctttcatttatggggtgtttacgcacaactataatagaaaaacaatacaaaataagcctactaactaaataagaaatagaatatcaaagaaaatataattgtaactaaagagtcttcgcagggaggatacagaggtttttattccaaaaatactat

SEQ ID NO: 8799 - DNA, 2272 bp, Carica papaya
  Intron number 3 from transcript evm.model.supercontig_161. 15 (locus evm.TU.supercontig_161.15) derived from phytozom e v7.0 (chr-ID supercontig_161; pos 212197 to 214468 rever se strand)
aacttctgcgggaagcagaatattatcagctgctggtaagctagaatttcttctagtctgctccgtctttccctattagatgtcattattattatttagtttattttggccgtaagtgtctgcaacttaataaacatacttactgctttaagggaaatggaaaattcagtgttgtggctcttgcattatttcttttctcatatcaagtgcttgatgatttctgattaagcattttctccagttttaaaggaagattagtgcaggttcctggttctttattccttgtttccaacaaaagaaagataagagcagctatcctataaccgtacaacgtaaaagcaattaatgaaacatatgtaaatataagaatttttctatttttatatgtatgatattcttatagttattgaaaatgaaaacaagttctagaaaatgatagtgaaaatatgacatgttcaaatttgtggcatatctttgctatcattttttaactcatgctgccattttcaactactaaatgtattctgtctatagacgtatataacattagatataaaaactcaaaaacattttttacgactaaaaaaagggtcttcggttttattcatagaagcgtgatacagcttgtgaaaaaagcacatgacttttgtgatttcagatatctgttgataaaagcagtatcagtgtcaaaagggggcataagcttggaaattactttcccccagtttcagaaccattattgcatgacattgtgtcatagaagccacataattaaagttaaattttttttcccttcttaacaagaacagaaaccaaaacaaaaaattggggttaatatattttcttttgttttcttgatgcagaatgggttatgtctaaataggttagaagttatatttcttttaaatataaagagtctattattatattatttaggagcattattatagtttttagttatttaggatttctattcttattagtattaattttttattcttattaggatcagtactccaaattctactggtttattatttcttagtttaattctaatcagaaaaagttacttagaaattattataaatagctctataattttatttattgatcattcaaatattcaataagatttctaagaattttttagaattgatttcgtgattcagttaatttctatgtgatgcctaagaaccctaggtatgatatctaggtttttccaatcttttagtcggcaaattaacctaaaatttgtcctacatcatttcttctttttggtcttaattggcatggacttacttctagacatcctattaactgtagaagtgatttagttggattaagatatttaggccttgtttaattgtagacaatattctgagtttttattttttaaattctcatacttacggtacacagaaacatgtgtagttgttgaaaacttaaattagttttagaaaatgatggtgaaattacatgagtttgataataactctttactcttttcaaatttatttcatattttcgctatcatttcttaaatcgtgcttccactttcaagaactaaatatattccatgtataaacattatattagaaataagatttcaaaactggcttctgcaactaaacttagtcttaggttttattaatggaagtatgatatagcttgtgaaaaaggcaaatcaatttgtgcacttacacttggaaatcatttccaaggggcatgtggatgaaaacaatattagtatcaaaaggggcatgtacacttggaaatcatttctcccagtgttggaaaccatcactacatgatattgttgccaaaattctcttcatctgattgaagaaggaagcattttgttgttgcattgtgttgagcctgttgacaaggccctaattttcttttaggcaaaacttgtgatgagtgctacagttagttaaatgtggatatattaatgaaggatgaagtaaatagttatcttctttttccacttatcaattgaatactttacccattttgtgaatccactgcctgctaaacgctcatgttgcatttattgtctattattgaatttctaaaattcacatttgcaagtgattatcatttttgttctggatgaataaacttgtccaacatgtttatcaggcaactgctattgatgctacctcatcggtgaataacgtactgtcatctctagtcttaacaacagtatgaatcttgatattttcccctttcagggactaatagaagaaattactcccatcataaataa

SEQ ID NO: 8800 - DNA, 5271 bp, Carica papaya
  Intron number 1 from transcript evm.model.supercontig_7.93 (locus evm.TU.supercontig_7.93) derived from phytozome v7 .0 (chr-ID supercontig_7; pos 833550 to 838820 reverse str and)
aaggcccagatttgggatactgctggtcaagagaggtttagcttcttaatttcctttttactttatagttttcgtctttatcatctgggtatttgatgttgtgtttgcttgccgatacaagtttggaaaggaggaaaatttgggttccgatgtttcaactgttataattttctttgttttaaacgcgtttatatttttttttgtttgatttcttattgttttgcaatttttttgggatgatttcgatgttttagcttttaaatgggtaaaagagaagaatccgatagggtagttgtagtattatgattgataccagtagaaagattcatgaaaaaattgatttgcgttttgatctcttcaacgaattggagtgtgttttgggttttactgggtaaaagaaacagatttggtctgagtagatctcgtggtacctgtgtcaaagcaatttagcatgaagtagttctaatggtgttttgcattttgcgatttgcctagtagattccatttgttgttgttatcgtctcagttttggtagatcagacatgggtttcttgtgtggatgagtagatcaaggtttcctgttgctcgtggtgtcattccaggtgcttgattctatgaagtaaagtagtgaatactagtaaaacataggtggaagttcaattgaggcaatatttagaacaaatctagaaatattttgttaagcatgaatatctatttcgttttcataagatgaataaagcaattgttacgtgagtgtatcattatagaaggctttgtctttccaaatccgttgcagtgtaacctacggtgagctggagtggatgtgttttgtgcctgctgttacccttttcttagtatatgctgattttatgatataaacttccacgtagtaggttttcctgcttgcttttttagtgttccaggtttgattggaaaaattcacaagctttataccactttttgagcatattgattatttgaattaattaacatttattcgtgcttgtaacaaagttattggatctaaaacatattttaagcctttaattggtttggtggaagaaagaatgagtatacttttagcaatatcatgtcgtcttttaggaaaaggctcgaacattggcttatgaacattggtcatatgcttgcacatcattgttgctcgactaactgactacattctagaccaagttaacaattgtctgtcaaaggtatgccaagagccatctaagttgttaacagagacttcttttcaattattaaaagcactggtagctgatcaacttcttaatcacccagcaggtcaatgtgaaatgaaatagctaggatactgtacatcggatgataaatagatgtacaaagttttcagttgactgtttctacttctgaaatcttaattgacagacaatgaaatcacatgttaagaaaatcttaattcttgaaaggattgcaaaatttagattatatatctagtcatgttggatcgtggttatgaaggattgattttagagatgttcaagctcttcctgaaatctacacaatcttagtggtagaacattatatcttatatatagaagcaattatgaccactttcttacagaaggcgataacatgttggtagatcttggttgatcttggtagaattgctttctatactcctacccatggtttgaagatataacaagaaagttctgccaagtgctcatgggttgatagggagagttcttgaaagttatgccaccaagcttaaaccatttttgatgcaacaataaaatatgtcgcattctcttccacgattacagtgattcagtgaccacctcatgcaaggagctatctactcctatggagcaagatgaggtcagtaccatcaatatttactaatgagagcaattaaaaagatcaagtaacaaagagacttacattgactatccagcttatgagaagcaagttagtgaatgagttaactgaggaaattatgaaagctgtaaattctatcaaggaaattgagtcatgttctaatggatcttccaatttagtggttagtaatgatgtcacttgacttgagaatgatgatctattagtttatttgaactacacgaagaagagtaaggacccacatgaagaggccacactatcttttttttcttttggtatcctaatagtgataagtaaagtttgttggagctgaatttgtcatgataacttcattccctaaccctttgggatacacttaggatatatgtttgttttctcaggacactcccatgttttaccttccttatgcttcatccttccaaaactgaaggttgagtttttatacgtggatgagaataatatggaaaaagaagacactagaattgatattttttaatattatgggatattcatataattacaatgctgatgtatgactgagagaatttagcttatttaggaattattttaatggacttattattaacttgtagttttatttcttatgtaactagaagccttattttattattatttttctatttaggtgctctagtcatattaagttatgtaggtgcctataaatttatgggtgattcatcattattaaatagcggcttatggataaaaattaattaatttcctgtaatggaattgagtgtttaacaactatgtgatagtggttgggaggatcctgggacaatccagatgtccttttatggaagtcgcgacttaattaggaatgacaattcgaagaaagaagagtctctaaactttattacttttaggagccaaagaaattttttggactagtacctttagatgattcctcttttttcttcaaatgaactagcatattatcgccttcaatctcggcaacatcattgcttacaattaaatccagagattcattattaggtgactcaatttgtgtggtagtaatcacaatatctatcacaatccccttcattacctgatcccttgactagttatcattagttggatagtcaatggtgatctcttcgatgaccatttattaattgctcttgttacttggatcatcaatgataatgacgttggtttgcttcatagtctcacaatttttaaaagtcttcctagggactcatggaagctttttcttatctatcccaatattgactgagtgttgggatatgataactttcttgtatgatagtggtcataattgcttgcttccatatatgagataacatccttcctttgaaattgaatgattttagaaagtgattaaatgtttctataattaaatcttcacaatcaagatccaacatcagtatatatagtttagttcttgcaacatttcaagaattaagatccctctgacatttaattacttcgtcctgttaactagtagtttaaatgtaaaaacagttagctaagcactttttttttaatttgtgcatcgtcataaagactatctggtaaaattttctagttagctcacatatatactaaggtctctataaccgtcttaactctatcaggatcccatgctttatcaatcgaagttggaagcagtataatctccttccttaaaaggtctccctaactgtctagctctagcttcgtcagttggactctattccaaaccttcaaggaaaggtcgatttaggacctccttcccatattaatctcttccaagatccagtgacttcaaactcgatagagtcaaaatccttaaccacactgccatctgaagttccaactttttgacgaagctcatgcgccttatcccaatagaccagctatggaaaaaataaaaaagaaaagctggtattgccatctccctcctcgacccatttttacccttgataatcatttccaactagtctccatcattgacaagaatctccttgaaatctttgtgcaccaaattcagtcgctctcaattcggagactgttattagaatccaatctatccaaaagactcaactaataagaatatcttgcttgttgattctaatattaccaagacttcctagtatctcaaaagaatatttccaagacttccttattccaaatattcaatttcttttgtatggatttgagcctcgtgaatttgtacccttctcatcatgctttagaaaattctcccttttgatgtttcatctgacttgcaaaatttggtgttagagccacatgttctcaaaccaaaaagagtagggtcctaacttgggcaaccaaattcaagtaggatcggaagatgattggagacttgcaaggcacaatctcatggtccagatcaggaaaattattttccaaaacattggtcactaaaaaccaatcaatgagctaaggcatgattccgtccctagaggcagaccgagtgaatggagcattcagcttactactaagataaaatatacagatataacctaactctgttatgacagtcaatgatcatgaaacaaactgatgagtttaaaccttgattaaggtcttagcttacttcagtaacaggcatatgatgctatattagtggtacaagcatctacaaaggcgtaaagtagaagattttctcagaagattgttatattagtagtataagcttctataatggtgtaaactagaagatgctctcagaagattttgtagtcgcaagaacttttctcttggtgatgtaaatgtgaccagcggtatgtatctgtttaaattctgcatcaatcctgcttaagcagtagtgacttgaggtatgcatctgtgaaaattctgctgcaatatatgttagctgtcggctgttggctgttggctgttggcagagaagagactggaagaaaaagaaaaactcgggctgaatgctcctattttgtacttcatttcgcctttgaatacctaatataagttgctgtccatgagagcttcttcttgtttgtttttgcttactacctagggagcataaaacaaaccaaagaagcttgttcactgacacgagctttgtaccaaacataagccaaagggctaaaagacataatttaggaaaaacactataacatgattgacagcaagaaagtcaaccattcaacaatgtccactagcttctgccacaagttgctctgagtcttttccaattagtttattttggtgattagatcagatgcatgcttactgaactgtacccactgaaacgaatttctagtttcacataacactccctgctcatttgtttggtcatccgttgccttttcttttgtgcccctggtgctgatattttttgtgtgcgtaggtaccgtgccattactagtgcttactaccgaggag

SEQ ID NO: 8801 - DNA, 2927 bp, Carica papaya
  Intron number 2 from transcript evm.model.supercontig_13.1 4 (locus evm.TU.supercontig_13.14) derived from phytozome v7.0 (chr-ID supercontig_13; pos 185994 to 188920)
cacttttccccggagctatccaattgttttgacaggtattctttagttataggaaatgtttgtgacaaatatccgcaaaattttgaatgttgatctaaggaattcttgtttcttccgtaacattgacctaatgatttgagtatgcttaaacttgaacctgttgctaattatggccgcattagagtcttagttttctgctgcagtacaacttgcttgattgtgtaccattagccaaagctacaacaatgcctgacttatcatataagtccttttctattcccttttgataactttgtcatctttccaaatgcttagtttagaatttgtgtcactatgttgttgaaatactggtttcggttgctgatgaaagctgcatcatggacaaactctaggaccagatattattggtgagaactgtttcatataattatagatataatatttaagaaaactcaaagcacaaaaaataataaagagactgatgtaaacagttcaggaaaattttattttttaaaagaagaaatatttttaaaaagaaaaaaagctgttaaagtgttggtgagagtataagatattttccaagcaaaaaactgaaaacaaaagaataaaacaaagaacattaggacagaatagacacctagtctctttgcaaagaagatcgagatattctcgaaaggatttttgacaggaatactaagaaaaaaaatgtaaagatagaacattagatatggcttggagaatttggttccatttgtttgttacttttggtctgtcatgggtttccccttaacatctagagggttttctttcttctgctctccatggcattggtaggaggaaggacgttaagatcttattctgcaaggtagtttttgctggattgtgggtgatttggttggagagaacactaggagtacagaggtggtgccccgaatttttccacctttgggtcaagacacatggattttttaaggattattctttgtctatttagcatagagatcagcttgtcttcatcagttgatctttttctttttctttttctttttttttttcggttttctccttttctttattttgtattctttctttgggagaagatctagtcctttcgggttgtgttttttcttcctctttctaataataggttcttttttccataaaagcaaaaacattcgatcaaaacaaacaaatgacatctaaaacatcatatgtcattagtattccaaaagttcgcctgggcggggcggaattctatcaataatctaagtagaaagtagaaatttttggtgaatggatatatttgtgcctagggcagttgactccattgtggatctccttggcttgaattgggtgctcaatagttctatggctaatgaattttgggcttggcaaggcagcagtgtgaatgatagtaggaaaaaatttagcaatgattaccctttctattctttaggttatctggaaagaaaataatagaagggcttttaatggaacttgcgccccttttggcaatattggagaccgttggctccatatccttcattttttattaaaggtcaccacctttatcttgaggagatcctacggatattattgatattttagattagcttggaattttgtactctgatgcttccttggtgggttgttaacacatagtgcctttgtgctgcttgttcttgtgctatgagtggtaaaaatgttgttgaatagcttttgagtagaagtgtgtttagttcgaaattagctgtagaaagtattatcacattgaaagcagaagctggtctgtttggtaaaaacagttgtagatatggaaatgaccaaaaatggtatcaagagaggaaaaatgtttgaataattttaattctctctcattctttaaattttaagatctactaaaaagaaataactttttcatatgtatctatcttttctgttatatatatatgtatatgaaaagcaagcaactgcatatatatatatatgtacttggttcttatgtatttatatgtgtgtgtgtgtgtgtatgagaggaagaaggaatgaagaagggaaaagaaagaaagaagaagaagcatggctctaggttggggggggggagggggggagggggctggagttcctccagctgtggttgcagtcggcacttatatatatacagttgcatcttatgtatttatatatgtgtgtgagaggaagaaggaaagaagaagaaaaaagaaacaaagaagatgaggcgtggctgtaggttgggggagggggcctggagttccaccggctgcagcggcatttgccacttatggtgggatttgccacaaagaacaagaagaacgaatagatgagtatgattgttttggttttgatttttaaagagataagcttataatttgttaatttaattaaggacactgttggaaataaaatgttaaaagcaaaaacaattttctagaaacatttatttttagcttatgtgtttatgcatatcaaaaactgattttagctttagtttgaccaaaagtgcttttatttttctcgtttggttgcaaagtactttgataccattgaagctgtaaacaaaagttgcagcctaacaggctcatatacttttccttatttttttttttttgggcagcacattttccttgccatgcaattatgggtcaatttgttttgtgctgtttatccctgtattttttacatctttactggtagacctatagcagttattttaagtgaagttataaatagcagtatgtcaagttactgttttgcattagagaaatttagttttattgtgtactgctcctttctgcttccttcttctacttcatgcaaagatgcttttagttctcctgggtctttctacactatacttcattcttgtaatggcaaatcttctgcagagggtgacggatcaaaaatat

SEQ ID NO: 8802 - DNA, 2150 bp, Carica papaya
  Intron number 4 from transcript evm.model.supercontig_82.5 1 (locus evm.TU.supercontig_82.51) derived from phytozome v7.0 (chr-ID supercontig_82; pos 839684 to 841833)
cattttcgtcaagcattgttgtctgtgattctaaggtagtaacatcaactttctttagtcattaattatcttaaaaagcaagatgaaaggattattactgctggtgccaatcaggattacctacctaccctcctgccccctcccctggcccccaaattgaaaatctgtcctcctaaatttttaaattggataatggtatgagtttattcaggatgttatagtcccaaccggatagctaaaatgaggactaaaattcaaggagaagaattagggcaaggattttggacttcaaagcttaaagctcggagtcatctttatcatttttggcaaaatgatttgtggagaagaagtaagattctaagtgatgttggagaagagagcttgagaaatttttttttttttttttttgagataagagcttgagaaaaaattattaagaactggagttggaggtctcatatctgaataatcaaattaactcaatatttgtacaataataatagttatatgaatagttcaccaaatagcaacagcaggtaccatatttataggtaccagattacaaccaaaataactattcctgactttatataggaattctattaaatagaaaaataagctaattaattagaataatttattagctagatagctgaataagatcctaattaaatagaaaatagtaaacccataccactaataagtctataaatgccccttgctaaataaaagtgtaaaaatattacaattacacaaatatatcttaatatggaaatatgttaataatctttctattttgcaacattctattccacttggtaaaaacttgaccttgacttttgatatgtcaaagtagaaagaatatcaaatttgaaactctattttgcaactttcttaggaaccaattttggagttttcatatttcaataataaatcaagtacataatatttgtataataattttatgagtagtttaccagatagctattgagtatcctatttatgagcactagattacaattgaaatatacactcttaaatctataaaaaaaaatgctaaataggaaagtaagttaattaatagtaatcacctacaattgagagtatatgtaagatcctacttgaataggaagtagtaactcatgccatctataagcctacagatactaattcctaaataagtttaatactttagtaatatataaacattacaattgcataagtatttctaatattgaaatactattttaggatcttcctacctgcatcattgaataagaaattgggttagaagtaggattctggagatttagagagaacagataatgaaggatactacggagtataatttacttttgaaattaaaatcagttaggaatcaggagatgaggtaggtgtcaagaccagggtccagtcagtcaactttttttttctcaaaacaattactaaacagtgttttattgttttggaacttataatatattcattttcctcgtttgaaacttgcaagatattaagtgcttcattgaaccttgaaccaacataacatactaagtatatccctgtccaagcctaaaattagcgtttggcttatctcataccctaccctgtaccacgatctggttataccacatttcaggtaactatggtcttttttttttgtttttttctatgtatttactgataatgaaaaatacaatgtagaggaggataaagtcttctcgagaaagaaaaaaagaaaaagtcgataaagaaccaaaaataaggagaacaagttgtgttatttcaaaatcacgtcccaatccctttgtagctttgttaagggagtcccttgaagtaatgagctttagcccgaagagaggcaaaatacaccaaccacgcccacaaacaatagctgaatgggatctgttatttatatctatattcttctgtttatctgtggccagatgtttttgcttgtttgtaatgaagaaatcaatgacatttggaatgttaatgttatgagtgtttcccctttcaacctccacatgagtattgatgcccttgactctaaatgtagctatatccaagattaactaatggttgagaaagatgaatgcctctcttcattaatgaagatcatgatttaggccttttgtgcatgacagttc

SEQ ID NO: 8803 - DNA, 1708 bp, Carica papaya
  Intron number 2 from transcript evm.model.supercontig_151. 52 (locus evm.TU.supercontig_151.52) derived from phytozom e v7.0 (chr-ID supercontig_151; pos 415425 to 417132 rever se strand)
acagctcttctcttcccctgctttgagaaaaagcagtgagttttttctccctaatcttggcatgttagttaagagtagtttctttgcttgatattgattactttcctaatccgtcattaatgtctgataagttattgtcttggatcatggaactgagattctgagaggtcataaaggtttttttttttttttttttccattttaagaggaactataatatagtatatttatttctccatcaaagtacattattgttcattttctcacaagggaacttagcatgtgatgtttggatgacagtttcttgccttccaaacaaaattttactgttcgtagagaagattccctcctttttgtcactttccttcacattaggatgatagtgttgattgttttttcatccgtagatttccaaattcaaatctaaaccattcaattgattttgtgaattgactggactgttcatatttcttaaagtggagataaagtaatcaatgagttaaggtctgtcagtcacatttcatagttgttaaaatacaaatcacaatacgaacaataaattcggtgactttttattagtttaatcatcttgaaatattatttacaatttattattatttaatgtgttatcaaagcttataatttggagcccttccccttctacatatttctcctatcgatctccatagctgggtttctcttatttgggttgtcatttacatgtgcaatttcatttgtgagtgagagagagtatttgggttccctataacttggttctgtttgatccacacattatttctcacacgttaggatgagttttagacacaaaatgaacagtaaagtttagattattttttacaagcttaaattttttgagaaattcacgtacaatttattataggctaaaatattttccccggttttgtattattatttttttccgtttaatttggtcccctgctttgattttgcattaaattagtaacctatacttgcgaaaaatgtttgaattagtcctttattagtagctcataacaccattaacatatgatgttacgtgccactgatcttggtataacattttttggttgattatttttctacattagatgttatatcagctgtcatgtggcagcatcacggagaagaaattttaattttaatgtggcatctaatatggaggagtagctaaccaaaagatgtcatgtgtgagaagtgatggcatgtagcatcatatattaactgtgttactgatggagaagaactaatttgaggcaaacaccaaatcaaaccaaagaaaatagaattaagtctaaaaaaaatattttagaaatttattattaaaaaagtagtcaaagttgtttgtccttcatttctttctatgggttgataaaatttccaaccaaagaatatgaacaaggaagtttattgatattcatttatcaatcctgtttcattcttgctcattaagcagcaaaccaaacactacagttcataatttggggaataatttgtaaacatccaacccacaattctctccttcattttcgtatgctaagtatgagattaatgaaaacttgtttataagagaaaattagtgccttctctgttagttgaagttttcaataaaactttttagagcttcttatttactgcagttcactggaatgatgaaattctgagtgaaaaaattccatgctgactgcag

SEQ ID NO: 8804 - DNA, 5050 bp, Carica papaya
  Intron number 2 from transcript evm.model.supercontig_122. 38 (locus evm.TU.supercontig_122.38) derived from phytozom e v7.0 (chr-ID supercontig_122; pos 817078 to 822127)
tttataggtatgttacttaaacggagaacaacatgcatcattgtgaactctttcttgttccaaagcttctactgttgagatgttgcttgtagaaccggttggtgacataagttctaaagcatctgtttgtttactctccatttgcacttattggtaaaaagtctattaagctaataattcagaggggttatttttcaaccaatcatggatgtaattaagtggaaaatgatttatgttgcttggataaggcagtaattgaaataggtaagatattttatcttgtgaaagagtcaaatttaagattattaatataaaaaagataataataacccctaactatctgtcagcataataaaagaattatggttatttttattccatctgttctctcttggcctttgatgcagatgagtggaaatggttcctcttcatttccattctattccattaaggaatagtatctgaaacaagagtaaatattccgctctcggttttccattccgttccatcctctccccctctgcactcataaatatcctgatatcattttgatttttggtagtgacctatcaacttgaattcttggaatatagttattgtgagagtgaatagggttgagtgcatggtgaatgatattttcaagactgtctttgtttttccttgtgtattggagcaacagccttattctgtcaattgccatcttcagttgtgatagattccctattgatggatctagttatggtcgatttgcatagaaatccatagataaatttgactgtttttggattttgtctttttctaaatttggatctaattttagagatagttaaaagagaaccaaatggtctcttgagtacgtaggtgcttaacattttagtaggtttctttcttaggtattctgagatcagacaaaaggatttattacaatagggaggatagggtcagttgccgttttcccagaacatgggaactgcccgattgtttaaccttaacttcctagacttagtcaactgtaacaactaccaagacattcaaatatttctgaattatgattgactaactttatttcaattcatattgccacaaccaaaacacctacaaaacaatgggacacttggaccctaaaactgggagcgaataattctgaacaacacactctttcttccttttctgatacactttagctatggaatgtaatctaacactcccccttaatgcattttttattactccaagccaagcatatttcttaatatcttgaactttgttcttggtaatgctttggtgaagatatctgcgagctctttctctgtcttgcaatattgcatgggacagtatctaaccaaatgtataggaacacatatttctaggcggttttgccgccatacaagacaaaaccagcagccgactgtgtctgagatggatcttcccgcttgcattaaactcatggcgcttcccgtttttctttctttcgttcgttttaaaaatgggggaaggattgcattcaaggatttaggcatttaggatccttaacatggttgtgtcattttccctaatttatagaagttagatggatgaacattgagtcaagttttaagagtctatgaccatgcttctggtttgtattatgttgtaagaaagtagaaagttgatcaagcacctaaaatgtttgtgctattaacttaaaattagaagttgttttattttttggtaatttaatatgaaagcttggaaatatatgcctgacatgtaaacagtgtctttaatgagtatttttatcaaaaggaggagatgccaagaagagaggatggttatgcataacatgagaatgatgatttagttgattattaacaagcagacacctctcttttgtctatagtgagacacgtcttagcgacacttgaagtggagaaagatgatggcattgtacaattatatcttaaactcttgttatttgtgggacgaaagctaaaaagatggttattaatagtagaagttctgtgggatgtagtatcaactacaacagcctagcgtctctatcttccaacacaaccacatctgtagctctactaagttacatcaacagataatacaactatttggtcactcaaagagtcaaaagactctttttttcttttattgaggtgccccataggattctatcttatgttatgttgttcctatgaaagttatccatgtccatctttcttgccctagctttacaactggcatatacattatagcataagggaacaatacattgctattattattttggaaaagagagattgttctacaacctatgggacatttttattattattttaaggagacatatgaatcaaatggtaggccgaagaatagataaacatcaatttctagcagttatccccaaggtaatttgaaattgtttgtttcaaagtgtggacatactgttatttcaaaaacgaaagtgtgggcatactgacatatgggctgcagtggcaaagaacaatatattgcatgtcaggttatattaaaaggagatgccaacagaggatggccacatgagaatgacagtttagttgataattaagaagcagacacctctctttgtcttctgtgagacacatcttatcagcacttgaagtggagaaagatgattgtatcgtacatttatatcttgaaatcttgttatttctagaacaaaagctaaagaaacttgttattaatagttaagttctgtgaatgtggtatcaactttaacagtcaagcatctcaatcttccgacagacacgtctgtagctctacaaggttaaattaatagataatacaactgtcctggtaaattgaagatggctttttctatgccctttttaatgaggtgcacatagtgattctatcttatgtgatgttgtccttgtgaagattaccacgtatcctccttgttgcccctagctttacaacttagagatgcatcatagcagaaggggaaactacattattattattattattttggaaaagagagattgttctacaacctatgaatgccattatataagaagtatccagaaaaagctgagaactatgatgggaaagagatccataaatctaatgtgttgttttagtaaagaaaaagaacaactctagattatggcaagatagaaactaaaagggataagcagatagatggtactcattttaagaggaagcatggtgtgtgttagttggtagaaagttcccgagctcttgattttagcaagaagtcttatgctctcagcttgaagggatcgagttttttaacatggggagattgatggtgcatagcaacaactatgttgtttaggacttctatttgtagttgactatttaggatctaagttatgttttcttaagttaaatatgatttattttcttattcttagtggcaattatatttctttagtagtattactattagtgttagtatttgtacttctgagaattcttagtctaatttaaatttgggaaagactacataacaagcactctgaataccaatctcgcttttaagaagaggtccaattgttcaatgaagagcttactgagaattttctccatatttctagttgcatgatgcaattagactctcgagtttgatgattcgggattcttaggtgtaatttgtaggaaaccttgggtgatgatttcttgagttaagaattataggcgagtgatgttgcttccctcaaatctaagaattttatctctatcattcctcttcttattctttgggtcacgtggaaagagagaaataggagagtttttgacaatccctcttcacttttcttagattagacatcagtggtttcgaattctctatattttgctttaaggggaacctatttctgatggtattgatattttggatctctttgatcttttcttttgttggagactaaattctgtatgtcttttgtttgggttcttgatgctcatagtggatcttttttctctcaaaaaaatctaggttacatcccaaaatccttaagaagactaattaatcctaatttgtcatatatcatgaactatttgtgttgggtacattttagtatgcaaatgcatcatcttacactagtaggaaatacattttggtatgcaactatcatcttacacgagttaagaagctcagacacaagaatgcatgtgatatgatatttgactttacttaatgtatatctccattctttttttttttttggaattttgatgtttaatttgtaacacatatttgggttaattggccactgtggaagattccttatgccactttttaatgcaatgtccgtacgcggaaagcaaatgtgatatgatattccacagctggctagggtttcgagaggaaacttaagaaaaaggaaagatacatccaactcctaatcacaaaaatttgcaacaactgatagggttgtcacagtgatagagctgttaggcactcaattttatgaaaggaatttactaatttttgtttgttagcagtctgtttaattagatgactcaccaatgtatatacagggtacttacatagcctagtataacttgaatcccttgaaatgggaaatcaataaaaaaacaaaatttctaactgaacaagaaatggatactaaaccaataatatgcctgttcttaatagtttatagataagctaaatatcccaaataacacatcaagattaacttacataaatatcccatgattggatgtgtaagatactctatgtttcatgtaattttatgcctccataagggaataagctgcattatagtattttaaaaactttggcagttgaaatacctctttcttagttctgggctgtggatatttgtggtgacttaaacgtgtcttcttttcctaatattaaccattgctaccacacttttctttaaaaaaatacgttttgtattcttttcctgatattaatcattgctgctatactttcctttaaaaaaatttattttgttactgcccaatgggattttctcattctcactttgaaatttttccagagagtgtcttaagctgattcctc

SEQ ID NO: 8805 - DNA, 4691 bp, Carica papaya
  Intron number 2 from transcript evm.model.supercontig_14.2 07 (locus evm.TU.supercontig_14.207) derived from phytozom e v7.0 (chr-ID supercontig_14; pos 2256266 to 2260956 reve rse strand)
ttgaggagaagatctattcagctgccacaagccaggtaattctaacctgctgcattccgtaattgtcgtgtttggcattaagatgccaaatatgcttattttgttttaactagcactttggaattatcaggtaaaaattctggcatgcccatatgtggacattcataaagatattctatgcatgcatgtatattgtggaacctgtcaatttgctgtagaatttatggaaaatgtttgtagtcttggcacaacctagattatattaatttaatctaatgctgctcaatattcatgatttatttaaaattaagagggatttgggttttctaaaagtgaggtgcttgaagcagcagatgtttgtaagctgtttttaactggaatcgaacattctccaaaccaatggattactcataaggaacttagagcacttagatgttgatttaaaactgaacagtacatgtttggatagaagtgtctattttacaaaaataagcacttactgtgtcttgacaacaaattttgagggtaattgttaatgggtaagtaaacatgttaagagaataagcacttattacgcaaaagtattgtttgtttgatgtggacgtagattttaccacttattgaattttgctatagcgtgcctagtgagttttttttagttatgagaatttgaagtcaccaaaaatggtagtttaaaacaaaaaaattaaatcctaataatttataatatacaagttaaaacaattttctcaatgttgcagaatggaataaagtttagtagaaaaattgaaggaaagactaattcaatctataatcataacaatttgtgacaaccacaatcacaaagaatagaaacaaccaaggttatgcgcttgttgccaccataatcacagggttattaggcaattatttaatgagcttgttgctactgtagtcttttcaggagatgcctctttcatttttaaattaagtagaatatctcaacctgaatgatactattgcttattattaaatggagaggtcatcacttggtgactccaatttgttcaatgggaatcacaccagcgttcacaaatttttcaattatctcatcttctaactttctttattagttaggaggtcaatgataatgacatcatcttgctccataggaagagattggtcttggtagatgatggtcactgaatcactgtaatcatgcaaatactggcaattttattacttgcatcaaagatggttaagcttatgggtgcagtctttaagaactttaactgctgagccatatgcattgaccaaacttttgttatttccttcgacacatccgggagtaaagagagaaactttatgaagatgtaatccactttcttataagagagtgataatgatagccttcatgtatgatagaacatccttcaattgagatgttatagtgtttgaacagttctccaatcaatcacttacaatcaagatccaatatcactagatacagtctaattcttgcaatcctttcaagaattaaggtttctctcacatatgattttggtttgtccactcagctgatatgctaaagatagaaacaatcaactttaaaaaccctcttcatatatccatcatcataaggaatatgtggtgaagttattctagttaacacagatataataatcaactttgatttttcacataaatgtttgagtgataaagaaaagctaattgacaaccagcacatttaataatggccaaagcgtggttaattgctttaagtacttcacaaaaacctacttgttagatctttgtaaatttactaaacaagttagtggggatggggtcctcataagcaacttataaataactctaaacaacctctatttcatttgcatattcatttgatacaagtaacttcaaagtgtatacgattctaggagtcgatatcatctttggtggggttgaggcaaggagagcctttttccccttttctttacagtatccattgatgtctttagttttaggagtccaagagagggttattaagagacttaagtgtgggggaggaaggggtagagatttctcatctccactttgttaatgacccaattccacttttatcttacaacttcaacatgatttgatgtgcttattcttttgggtgtatgagattatctaggttttgcgggggggtatgcattagcctcaacaagagtagtttaatgggcattatcatggatgatcatattgatagaaggtttttggagtctgttggttgttcctctcgtttcttttcgggactcgtctgtagggcttttgggcatcttgagtgttggaaaggtgctttcttttctctgggagttgggggtcacttttttgcaggtgtgtcttttagtattctgttgtaatatctttctctatttaagattcttaggagtgtggccaagaaattgagtggttgacatggaattttcatgatcaggagtggtcaagcatcttggaatctgtcttttcttcaaattctaagtggttgggaaacaattgatatgtttttatttcttgatctattttgagcttttcaatttttaactgtcctgaaatacaatatggacattggactacttgactctttgcacttgcaactacttctttctatctaatgcacaatcttccaattagaatggtgtcttcatcaaagtattcatggaatttaatgccacctctaagtataaagttgttctgcggaattttacccttaacaggctcaacaaacacgatttgcttctaacttgtagagccaattttgctttgcccttagatgtgcgagtaatgtgttatcgaaatgtagagtcctacagtcttctttttgccattttgatgtggcctagaggctttgggctagctagtattgatgctttctttatgttagttgaatttctcttcttacccttgaaactttatctcttcctttctttatgttgaataccatattttattattttattagttaattatttaatattatgtaattaggattttatgagaataataatatcatattattagaattttattagaataagaatttctttattaataggttaggaattttataaatattttaagtgtaacaatctaaaaaatgaaaaatagaattatatattttctccaaaaattaacattgtatcagagcaaaaataagtgtattttaggatttttaatttcaggatttctttcaaaaccctagaatagtctcaccacctaaccaaacggagtcctaaccccactggtggcctgccgtcttgttccggtgagcgtctccggcctacccaatctctctgctccggccgcactcagctgttcgcgctgctttctcgcgcacaacctctggtttgcagtattttcttctctggctcccttgcacagcaactggttcacatacgacctctgcctcttcgcacagcttctgatccgtgatttctactgtttctattttctgacttcagcttccaggtgcatctgcgtctgtgtctgatcagaaaatactggttccagaagcttcctagttgctaattagcttgctttggttctgccttcgaccagatcggggagaacagaaggtctgatccgattgtttttcgattttgcaaatcggatccaaatatgcacaaccactgatcagcaccgcggcggaagaagaatgtcagcgccgtggcaagtcagttctgtccggagaaggagccgagcccgagctgtttttgagccgacttcaagcttttttttttagtcgactttgagtcattttaagctgaattgagttgctgccttgccagacagatttacttctttcgcgcgcgagccactacgaccaaccttctttggtacttttttggcttatttgcgtgcggtcgtctctgatttcgcgaccaggcctttttcgcgcgcgagccgctttgaccagcattttctggtcctttttcccggttcttctacgcgtgcccgcctctaatttcgtgatccgacgcagatctgcttcttttacatgcaagccgctctaaccagcatttctggtcattttttgactttttcacgtgtgtacgtctcgagtttgcaacttgatatgcaagttgggcatgtgtgatgtacctgcaccaatttgagagagggtgttgaatatcatattttattattttattattaattatttaattaattagtattatgtaattagaattctataaaaataataatttcatattattagaattatattagaataagaattttcggattaatagattagtaattctataaatgttttaagtgtaacaatgtaaagaatgagaaataaaattatattttttctccaaaaatcaacactttataaaccatttctcacctccaatgcctctatcagacaagagacctgcatactctctatgggctaaagaggtatcacttcataaggatatttctttgtctgttttcaaaagaaaccagactgtggcttaatattgaaattgtacttcttttctcttttttgtatcctttccctgttttggaggatcccaagtaatccgttaatgcactttttttccttttttgtctaataatatttggttttttcaaagaagatactttcaagatattatttggattatcttgatatcctatttcaggcagattatctacgcaagatatctctgaag

SEQ ID NO: 8806 - DNA, 4785 bp, Carica papaya
  Intron number 3 from transcript evm.model.supercontig_7.11 7 (locus evm.TU.supercontig_7.117) derived from phytozome v7.0 (chr-ID supercontig_7; pos 1074599 to 1079383)
ttttctttcttgggtatgcatttttcttcattcggaatctaactaatagcttgcgacggaagtttgagatttttgaaaatcattgttaagtgttcttgtaaatcaagaaataaagctattccttgctctcagcccttaaattctctgattagaaaatatgtaactccagttaaaaaatgtacttgatgccacctaaatactctgccatccaaacaaagacaacagacgggtgacctggaagcatcttgtttctatttccaccttgttatatatgagaattgattcttctttattgaagatttaaagtggtttgactttgttagaattatatatagctatccatattttcagtttatggtctgaatataaatcttttgtatttctagttttagtattagattatggttagataaagaaatcataatcatctccactcctgaaccctaggaaacagaaagcaaaagatgcctttgctaggattttatcgtggcgagtttgctcctaggatagagtcatcggctcttaccgagctctccaccattggcctcattaccacttcttagactcatgcattgtcgatcatcgacacgagccccaaccaatagttggggttgtttttggcgaatgattcttaccgatccttgctaagttattgcttctatttctaatattttgtttccatttcttatttgggttagctgtttaggtgatctagtgaaaacttcaagaaggttctctttgtggctataatttaaataggagtttttatgggtgatatcttttggtgtgatattatttattttagtaaaggaacatggtttcacatagtaattcgtagtctaagtatcccgtaacgaaactcaaatgactatttgatgtttttgatgtaggagaaattgttgatactttgaccagttagggatttggggataaatatctcgccatcatgtttaaggttgcttaaacatcgtgcacaatgtacctcagacttcacatctaagaaatcttacgtatcatatttaaaagtttgattacaacatgcaactggaaaattgagaaactcaaagaatattttattgaataattgaatagtaatcttaagggggagtacaaagatatttatagagcgttaagtgggtccttctcgaagaggattgagtaggaaatattttttgaagatacaattgtaaaaaatatatcaaagaatcaacgctaccaagagagtaccacccatgtacaagatatttacaattctattaaagtgtcaactatacaaccaaaatccgccaccctataaatgtcatactcaggaaaagagatccaaaataatgaaaccaaccatctttaattttacaaatctccctttccaccttttcaaaaactctactgttcatattttttcagattacccaaaagatagtcaaaagaaagaggttaacaaattttttctttttacatatgtcttcccaagcccaaattccatctcaactaaccctgcaataacccaagtgatccccttttttttttagataaaagtataatgattatattgatgtgttagcgccaagaaggtgccacccctgtacgatagatttacaggtcaagtatatctataatggaaacaaaatctttcaactatcaaaattgtgttgtaatacaacagagcgaaaataatgaaactatttatctttaatagtaacaaaatcaacttctttcctattaaaaactctattgtttctttcgttccatataacccagaaaattatagaccattgggcacaagagtagaatgtgattccatgatttgcctgcattcttacacgtagcatctattcacccaaattcttcccctcttcatcagcttatctatagtcagaatgcgttacttgactagaaaatattaaaactagtaagattagaaatactagtcctaataagatgagaaatactaatacccataagattaggaataatactattaatgcaaataaaaaattaaatactaaaaaaaataaaatcctaatgtaataaaaactataataatagtcttaaatggtataatagttttatatatctaatagaattatggttcctaatatattcaggtaatctataataatctgttatgcaccagttttaagagcagtggtttcatggaatgggttaaatccattaaagatgtatcttgtcgggtaaggtgactgatgacatctttgcttgtagtcgttactgataatgctgaaattgatttcatagcaagaggatacataaattttaagttctacataattccacgaaatcaagtctttttaatgtgtacccacttttatttgtgcaaggaaagatgagaaaatatgtaaaccttcaataagcgaaggcaatatagatgtggcagtgcattggtgcctatgaatttgtcggcaagatggaaacaataatttggtcctatgtgctaaaaacttttagtaagtatggaactacctctttttgttgaagtttatctacttcttttcccaacttccttcaaggatacctgtttccattatattaatactgcatgtgtgtggttttttttttgggagataaaagcaggaactttattaagtagaagaagaaaaaattataaaaatggcaaataagacattccaattatgatggagctccataatgctgttattcgggaagtagccatgtgattttgcccaaagagaagccatgacccctcttagcttgtaggatgacatcgtccggtctcagatgatctggctatttcttgcaagccatataccaaagaatagcaaaaatagcacattgccaaagcagctttgtctctcttttaacaccacccccccaaataaaggatttgaagaagttatccatagttgggacatttcccaaaccaggccaaacttattcaaactgtcagtgcacattttccaagcggtagagtagtgtaggaataagtggaaatgatctcaccatctctacagcacataacacaacatcaggaaacaaggcatagtaagggtgatagatttgaagcaagttattggcgttaagcctttggttaatagcagtctatccaaaacatcttcatcaaaggaaatctagctcttttccaaaaagctttggcaatatgaacgtttatggcactgggtactaatgagataaggttatacacgggaacaggttagaaggttgaagggtccaaacatggttatctggttgcagagacatatgtatgaattctagcatgttgagtaatgcagaaaaatcagaagtctccctatcataaaggttttggttaaagtgaaatttccaaagtattcacagtaaagcaagagatatgggtcctgttttggtagagtagtatagctttgggaattttttagcaagtagatgttcccccagtcataagtcctcctaaaaaggtgtccgagcaccatttcccatttatgttgggtgactgggttgaacaaagggtggatttgagaaatggctttctgaggactctggtgagtaatggatcttcctgcaaggacatcaccctcccctgtcacttccatgaatactgtttatcaccttatgctataaagagtttggttcacgaggaaagcgccgtagccatttctagagaaatattctttgatcttagatttccagtacccagacccccagaacatttggagtgatactcacctcccacctaactaaatgatatatgtgctccttactacctccttcccaagatatctcctcattttagcctcaatcctctctcatgatatcagtattgtcaaatctagcttgttcatttggatgaggtctgaggtagttgtgttggatgatggttgaggtggtcaagatagaaagtgccccatgaatcattgtgtcaaagatggttatacttttgtgatttgattggtagagcacctaggacaacatcgatatcatgttgaataaaatactatgaatttatttcttatctgtttggaaggaatttctctacacgggcatttattgagacaacaagaaaaggaatgctaacaatacgggtaactaactaaaagaaaattagagaagaaagtatcaccatatactcttaacaaacaccactaaatgatacatatatatacatatctttaattaaatgtatttggatccttagaataagaaaaggaaaagttggaatctagataacaaactaagtaggaaaagagtattgaagaaagtatcctcttatattcttaacagacttgcttaaatggtaaaattaaaatgcttaaattcttagaatgtccattcttctaaattaaattagttgaagcttcctttcatctatggaaaatgattgagtttccttgcaggacaaatgaacctaggttcatttgttttttagaaagcttttacggaaaagaacttgttaagatggcttcttgttaagctcatgatgatggatgctttgtaaaacagtggtgacagtggctttatgctagttggatactgaaatgacatgatcttttgctatgtgaccttttgttctcttttcctattaatatggaagcatttaactgcatgttgcacagagctaagctaagcatttattcagggttttactttcatgctttttgaaatagttttaattacttatttgttcattctccataaaaattatttatggttagatgtaaatgcgttgagggtgtgaactgtgagtttaacttatttggttgtgtaattgatcttgcagggcctaccgtgctttctacattctcaactggatct

SEQ ID NO: 8807 - DNA, 5917 bp, Carica papaya
  Intron number 2 from transcript evm.model.supercontig_62.1 08 (locus evm.TU.supercontig_62.108) derived from phytozom e v7.0 (chr-ID supercontig_62; pos 686346 to 692262 revers e strand)
cttcccaactttctcaatataagttgagcaggtatgttatgactcctcttgaaagtgaaccatgaactaaagtattactggccaaccaagtttataagacattctctcatgggaaatttaggaagaatttaactgtaatactaagtagttgctgggactactctgtcgtaggtaagagggttttttatgttaagtttatttgaataagtcaaatcatgtgttatggattgtatgagacacttgctaatctagggggtagtttctattcctaagaaggaagttggtttgatattgacagacctatatgttgggtcctgttatattatttgtatcaagaaaaattttgtgatgcagaataggaaactcataaagtggacatgtttcagtgataggagatataaggcagaaccaataaaagaacataaatattttgggaagttaattaaaaagaattaggaagatttaatttcattttataagttttggagagttttacaagaaaaagaaaataagatggtctattttcatatttcctggattttcatttccctagttgtttaacttattttcttaatttactaggttttctagattttcgatttttgatgcatctggtgcctataaataaggtgcctagtttagttattagataaacgatttatgatttttgttttcaaatattaagatattgctttgattattaagatttgagatctccaagtttggttcttaatgaattttcccaaagttttctcctcaagctctttttgtcctacaccagttggtataaaagagtaaattcgatttgttacgttgcctcagttttgtcatcccaccttcacaaaaccaacctactgctaacaaaaaaaccccaaaactctaaatagctgacaataacaacgagagaggaaaatcaaaacgctgtctctacttgatccctagccattgtaggtggtggtagacactacccccatcaccagctttacaagacctcgattggcaaaaccctgaagccttgcagtggaagctcgcttggatctgcatcacttgctagaaaatcactgggttgccactgcaaacacggaacctccttcttgactgtgacaagtaactcctaacctagatccgagactagcagttcgacttgagcttgttgtcaaaagactgaagctggaggtcaccggacgccagcgcgtggcagcacctggattcgatattctgaagccctctgttcaaaccggtttaaaccatatcctgttcgacttgttcatttttgctacctctagacggatttcaattattttagactgattttctatgtttttttggcgtgatctttcacttatcgaagttagttcggttgaattcatattttatctcacttttcttttggctagttaataattttgacaaatgtagatcagttcacatgtgcaacaaaagttatttgatttaagaataaatgttaagtctatcaatcagattgatggaagagaaaatcaatgcaattatagtagttttatggcatcatgcagaaaaaaagcttgaaagatggcttatggacatttgttacatgcttactaacccgtgtcattcaactagttagctttttcggatctagctaagtattgtctctcaaaagtacatcaagagccatctaactcaatgcgagatgtgcatttttgttcattattaaaaccattggttagtgatcaacttcttaaacgctctaatatcaatgtgaaacttgaagttgcttactgcatatgtgaggtaactaaaataactgtatcagatgttccttatgatgacacaaataggaaagtttctgagttaattgttttgacattttaaattactaagtgattggacaaggcaatcacatgttagtgagatcttaattcttgaaataattgcaagaactaggctatctggtgatgttgggcctttattatgaaaagttcatcagagaacgttcgagcactttcttgagtttatccaaccataatagaaaatattttctcgaacatggaagtgatcatgatcatgattttacaagaaagcgattatatctggatagaattgctatcttcgcttctgcatagcattcgaagagaaaaggaaaaagtttcatcgattggttcacttgattgggcttgagaccacatgggaaagacctttgaaaaaagattggcctaggcagggataatttccaggtgaatataaggtgaaaggttgcaaaagtggataggatcagacttcgggaggacccatggttggatggtggttccctttgagagtagtttccctagatttatgctatagctcagctaagagaggtcaagatttgtgattcggttgcggagattggaggagaagaaaaagaatgacaggttttagttcagaaaaacttgaatgacttggagatcagtgaatagaatttggtaaggattctatcatatgtaactttggatgggagtaatgacaagccgctgtggagccttacaatggattgatcctttacagttaagtaattttataggcagctctttaagcatgctagtaaaagttactctctcctgtttagacaaatttggaaggcaagagctccatctcgggttttttttttagcatgggaggtgagcagagagtgtattttgacaattgataaactaaggagatgaggtaagattttggtgagtacctgttaattttgtaagagggtggaggagatctggaaccatgttctcctctggtgtctaatggtttacaaactctggaccatggtttgtagcctattgggcatcagctgggtgatgacaaatttagtgagagatgaaatttgagcgtggaagagtatgggtggtgggaggaaataagcagagctaattccgccttaccaccttttggattgtgtggaaggagaggaacaaaagggcatttgatgaggttgatgatgtagttggttttgacttactcaaaaatagatggttgcagacctttgatcttttgttgttgggtcatccacactgtacagtggagaatttagagaactttattgacactttgactgaattgtaaacctttgtgcatgggtggacacccctttggtgctaatattaatatatactacgtactttttatttttaaaaagaagttccatcgattgctcatgggttagtaaagagagttcctgaaaattgttctactaagcttaaactgtctttgatgcaggggataaagtctttaggaatttccctaagattatattgatgtagtggccaccatatttcacgacttcatatatggagcaagatgatctcactatcattaatgataatgatgtagtgaccactagatgtcatgacttatatctttctatagagcaatgtgacctcactatcattgatggtctcacttgtgagagcaagttaataaatgaggtaacaaatgagatcactattgatcatccaattaatgaagccagttaatagataagataatcgagttcagaaatgggaaatattgtaccagcccaagctatttggcaactaaataacctcagcttgctgaactccagatggtgtgtcagcaacagattcaaagttcaattttggtctgacatttggctgggtactgacacactcatttccaaattccccctcatgcatgctatttcatgtgacaaaaatatgtatgtcaaagatgctactgacccaaacattccggacaatggaacattactgttcaaaggaatatccaggattgggagattgaggcaatcgagagccttctgcaaactttaacttcagtccatcttactgaccaagaggacaagctatggtggaacatatccaaaaccggtaaattcatggtaaagtcctttaacaatcttcttgccggcaaccccaccccttgcacaagaccatttccctctaacatcatttggaaggtggggactactcccagaatctctttctttgcttgggaagcggcaaaaggccgcatactcactacggataacttaatgaggaggggcatcatcactgtcagcagatgcttcctttgcaaaaacagtcttgattcttgtaatcacctcctccttgaatgctccataacccacaagttgtggtccactgctctcagtctgcttggtttgtcttgggtcaggaatgattctatatcttctaaactttttgcttgggaaggcttcggcaacaataggaaaaaattcagactcatttctctcaccattttttgggtcatttggaaagaaagaaataatttggcttttgaagggaaataagtagattctagcataattttagataattagtttcattattttggttctattgttttgaggcataacattgactgacttgatgacttaggtttcattgttgatatactaactgatttgtaaatcttttgtatacggatggtacccctttggcaccattaatcaatacaaatcttatactcttattttttttataaaaaaagataagataatctaatagattgtgaaagatgttgcaatttctaccgtacaaattgagttacttggtaatgtatctctcaatttcattgcaagcaatgatgttgctaaggttgaaaatgatgatattctcaataaagaggttccatttgaagatactgtaaaaatttctttggctcctaaaagcaatggtgaaaatttggttcttctttctttttataaattttgtcgttcctaatcgatttactatgtcttcagaatccttaaattttggaagcatacatgtcttttcattatgaattcaagttccaagcttcagttgttaagaagacaagtttcatcttcgacattctttctacttcaacattttaggattcaaggtcgggttttcactaagtggggtaatatggtgcggaataagaagctcttaaaattggacatatttcaataataggagaaaatataaggtaaaactgataaaggagcacaaatgttttgggaagtcaattaaaaatataggaagatttaatttctttttctaagttttgaaaagttctacaacaaaaagataataggaagatttattttcttacttctctagttcgttctatttaacttattttcctattagtaggttttctagatttttttgttttaatgtatttgatgcctataaataaattagctagtttagttattaagtagactatttataattatcattcaaatattgaaataccgctttcattattctaaatttggttcttaataaattttccgtaagttttctcttcaaactttttttgtcctacattagtttgtcttaaagtttcataagtacttaacctaaggagatcctaggattctctttagatgagccctatcattcatcctcatctaggtttgaaaggaagaaactaccatagaaaatctgatttacgtctaacagatttcactagccctcaaagaccagtaagtagatacaagtggctggaatacaccaaggtatttctcatttaacatgttcctgcatttgatatgtagtacctcaatggatgaatcataagtaccaaataaatgcttcatgaacttttgataatcttccaattgtcttctctagtgagttcacctctcttttaagatattataattaatatggtaattttgctccctgttatatggttttaagttaacacttttaaatgtttgtcactgcaacatggctatgttttgagatgtcaatctgaattttattgtttatgtcagtttgtatcaatagattgctgttcgtaatcaatctgagacttaactagccatttcacttccaatgctgttttgtgagccttttctgacatatcttatgcattgctctttgcgttaggaaaagagttggtggattgaatttggaggatctcc

SEQ ID NO: 8808 - DNA, 3118 bp, Carica papaya
  Intron number 4 from transcript evm.model.supercontig_27.1 00 (locus evm.TU.supercontig_27.100) derived from phytozom e v7.0 (chr-ID supercontig_27; pos 1143092 to 1146209)
aggcaaaggaggctgaactgagaaggcgggagcaggtattgttggtcggagaattaaaatgttgaatttatgcactatgctatatcatgggctagttactgtattttcttttcagtctgctccttatcaagtttatttgacaagtctaagattttatgtctttgaaaaaaaaatatgtcggtattcaatcgttaacttatctagttataatgagatttttccaaccaattataaattcagttgtgcttaagagtgatgagaagcggatcaagggattttggaggaaggaatttttgtaattatgttctatttggagatattcaacggacatattgtgttatgtgccatactagaaatcatggaagcatggctattcgaatgggtgacgcatggtttgatgctacacatggctgccagagtgggtgatacatggctgttagagtgggataagtgtgaaggtaatttgtaggatatgtgggataagtgttgatagtttataagatgtggacacagttacttaggtgacttttaggatatgggatagttacttccgactaggaaagttattattcttagaaattattttttcttgcgtaaaaaacattataatctaaactggatatgtagaaaaatatttcaaaaaagtttcttgagtacttaaaactctagaagattgttgggttctctcttagtgagcccatattattaataaaatcctgtaactaaatctggcaggtcagaccataacaatttatatcagagccagatgttatagttgatttagatttgatgtttgaactctttctcaacttaccaagaatattgagaccaagattgcatgaagtttgttctgttggcagattgtttgaatggagtttcaagaaaacttttggccagtagaagtacaccaaacaaactgggagaagacaacatccatcatggtctggaagagcgtcatggtgatagtcctcacacagaaaaaaggagtattttcatttataagtatataaaacttggtgttccccataagaaatataatagggctgctagtagggtggtgcaacgttcctggatcggatcgcactgaactagaatggaatatttttggtccagtccggtctggaccaaaaaagggggaaattaaaatgtttgttaataagaaggagattattaagaaaaaaaaagagtattttagcaaaacaaaatacaaaccccataacttttgtccttttaactttttgtgaattcttcaccgaaccccacatatcattagctccccctctccctctctcatatttgatatatatatatataaacatataactagttctactcctcactctctcatatttatctgtgtgtatatatataatatctatctgacagaaccaaaacaatgtatatttaaaatataatatgtatatgtatatgtaatatgtgtgtatatgtgtgcgcgccgtcgcgtgtgtgagagagagagagagagagagagagagagatctgaaagtgggatataaagagactatagataagagaccggagagatgatgatttgtgggggcttgaactcacccacctccgcaatttgccgttcatcgtgaaaaaggaaaaaagtttggattggatgcttgaagaaagttgaaaaagggagagaggaagagggggacctgctgatatcatttatgtaaattacataagttttaaaaaaattttatgtactggtccagaaaattttctaggactgaggagtggactggatctagttgggtcgagtccagtccggatcaaacaaccggtttcagtctggactgaactatgcactcccctagctgctaggaagtttcaagaccaggagatgaccagccaaatcaacaatcgtgctttaagaaacatgatcaggtgatggtggtgtgaatctagtgcagactttaccaaaaatgtccactatagaaagagacgaagaagaagggagagaagacggacaaggaggaaaatcaagggagcaaaacaacacacaacttacatcccttcataggtattatgcgtctctgtgagagctgagaagatctacgttggcaagagccttacaacttgcacaagatagtaaattttaattcttttcaacccaataagtcaactcaccttctgtcatttccttatgggaagcagttaccatgggcataagaaaggatcacaaagtgaagaattgattattggcgaatcaacatggttttctttcagcaatttattggctgccaattttctaggatgaggcaacttggtgaaccgctttccagaagataaatttttggtttccatcaagttgggaagtagccatggcttcctgaccttgacttttacaaaaatacttgatttatgcaaccaattccaattttctttcacaatacgagcaagtgacacatggcttgatgcgcagatggctgctagagtgggtgagacgtggctgttagaaagggataactatgaatgtagttttttggatatgtgggataacgttggtagtttataggatgtagaggtagttacttaacgagcccataatttaacaaaatcccatatctagatctggcaggtcggatcataacacattgcttatatttagtcagctatttcaaaaaaaatattagttatttcatcaaatactatttttgtgtgatcttcactgtctagttgtacttgtttgtctatcaaaatgagtggttctttttgtttttctttttctttcttttgccttcgtgttgtcattggttggtttgtcttctattgctgacagtatgacctcaataatgaatgaattatttcatggcctttccaagagcctgaaattttgtgaaaatatcgatatctcgaaacaatcaatacagtgtttgctgtagttttaattctagatgtttactctcaattatatgcatgttctgaagatgcatgcttcattgttatgtatgaaagttgcagttttctgcttattggttatctatgaaaataatacttttctgtaatttctctaatgagttcctttgcatgatgaattttgcatttctacaattatcgctaattagcttcttctatgaattttaggaggtgaaacggaaagaag

SEQ ID NO: 8809 - DNA, 2344 bp, Carica papaya
  Intron number 3 from transcript evm.model.supercontig_8.16 0 (locus evm.TU.supercontig_8.160) derived from phytozome v7.0 (chr-ID supercontig_8; pos 1122271 to 1124614 reverse strand)
tgtcaattataagaagagagaagacagtattctaggtaaggttgacacctatcccagagacaaacacaaccaatttaacaatttttcatgattctggactcgcatttgaactatttttgttacaggttaacccgtttatctaacaagttagattagcttaattgacttacgatcaatttgatatgaataaacattcataaaataggtaagtatcagattgatcaaactgtattttgcatgttcaatttatttacttactaaaagaattaaagctgtaaaaattatgaaataattacagaaaactataaacatctgttatgttcttgagaccaggatcttgtcactgggcggttcaccgaataatctgattccggatgttgcttctttcctttgttatgattccttaagtgatctattgtgaattatttccaaactcatcaaagggagtttggcaccttggacctcattagagagagttccgatccctatattgtcattataattctgcttatctctttattaattttagagtcttttaaataggattagatgcattacattataggaaacttttattacttaggcttctcaaaacaataagttaaagatattcctaattaagagataagtctccaaaataaaaattaaattcctaaataagagataaatttttttaactaagagatatgtttttagaataggataaaccttaaccatataataaaaattaattcataaataagagataagttttcttaactaatagacaggtttttaaaataagataaatctaaatcatatccagcttcttattttcttttctgcaataagagcgacccacaaaggagtctataacaacatcacatgtaattaaaacaaattacacaagtactatcaaaataaaaaagttgacagaatatcaatgtcattatttatttcatcatcattagcattgtcatcatcaaactaattttttaatgaaaaaatacattattagggagaactaaaatcgaaatcaatacagatttgcaatccaatgtctttgcaaaatagtcaaagagatatctttggaatacccatttgccttagtccaatgcaagttcagaaggttcatcatgttcaaaagaagcgaatggggtaacaaaaagtctctaatatatagcacttctctccgatcaaagcgccaataaaccaataaaaagaactcttctcaaaagcatcctcttcttggtcttcttaaaaccacaaagaaggaaggatatgaaacactcaagaggaggaggagagaccaacttaacaccaaaatattgtaaaatcttgcccataacctttaggccacactcgcaatgcaagaaaagaatgttatggaacctagcccaccaataatgcataacatacgtttggagaaagagctaaatctattaagaacaactctccaaacaaaatcttttacctgaaggaagcattcagctgccaaaaaaaaattgtgacggacgcatgttttgaaggatcctaagtgaggtatgtaaaagagatttgttagtgtaaacacctgaagaatctaaagaacaaattcttcgataaggtttagttgaaaggctcaaaaagattaacgaacatgtatcgatggtacaacaatcattgaggtttctaggaaaaacagattccaagatgactgacctttagaatgacgaagaaggtgtggaggcattgtgacaaaggcaaaagttaaagagaaacgactgattgtcaataaactcatctgtcagtaaactctagctaagtcatttcttattgcatgattaatttagagactatttgggattgttgaaagaaatttacctaaagcattagattgctttaagttacttgtaaatcgattcttattcaaaaaataagctattatgttctggcaagaattgcagtcttttagtaaaaaagataatgtaaaataagtaattatttacaaatacctagtaacctatattattatctacaaattgttatttctgagtggatttcaataggtattttaagtaaatttatgagggaaaagataagaaagtgaaaagttaagaatagtgtgcttatttttgtactacttaagtcacttctaagaacttgttaagtagggttaacaaataagtaaactggagtaagatgtttaaagctgattataggtagcaaataagcaatcttaaacatagcaccccatgtgtagttatatacaaaaaagtatggagaaaagatataggctgggcttacttggtaggtgtctctgttaatttctgattttgtccatgttccagaggaagaaagagcgtgtcacattttctctccacgg

SEQ ID NO: 8810 - DNA, 346 bp, Carica papaya
  Intron number 4 from transcript evm.model.supercontig_19.6 9 (locus evm.TU.supercontig_19.69) derived from phytozome v7.0 (chr-ID supercontig_19; pos 486044 to 486389 reverse strand)
aggtcagtgtgcaagcatgtagttcgtagttcctttcaattttttagtcaatttcttgttatagattttcatattatcttaaagatgtataattaaatcacaacttattatgtttgaatcagtactacctcctatggattctttgatgatagggattcagttcttacatttcaagatgtgagttctcaccatcaaagaatatgaagtggtagttggtacttcaaatgcaacaatgattctgcatattggaactaacgtgtaaatcagaagtgggaatcaaatgagaagtttatcaactactttttctgttgagttgttttgacgggtttaggtttagttgttgtag

SEQ ID NO: 8811 - DNA, 1473 bp, Carica papaya
  Intron number 1 from transcript evm.model.supercontig_8.72 (locus evm.TU.supercontig_8.72) derived from phytozome v7 .0 (chr-ID supercontig_8; pos 476402 to 477874 reverse str and)
aagtcacttctgtcctccaagaaattattgtcctcgtgtgtttccctctccttctctatctctttcctgcttacttgatactaaatatagttaaggtttcctcaatttatgtacgtgtctgtgtgtgtctatatatatagataatattaaggatttttgatgtattgatttttttttttaaaacattttttgagattatgttttagggtatgtaggcaaaacgtataacacttagtttttcattagaatttatctgttgtaaatagcttaaagtatcatactgctttagtgcatttctctcgttcaaaaaatcccaaacaccctcttaaaaaatagttgaccacaaacatagacataatctatgcctaaggatatatatctttatgaacttcgattttatatacagaagtttgtatgcacatgaggaatcttagttttgagaaatcatttccatttaatatatatatcttcgatagttttgtgaaaatagcaactaaacaaaggaactatcttcttttttaaattagcagaatttatttccggattctattagtttcaagttttatttcctcattatattcttgcatattaggtatggtagattgttgacgctgagaactttaaagcacctggtgccctcttaactcttaaccatgtgctcatcttattcaatgcgttgggattctttattcatcctgctagttttggagatgtaagctgttttggctgttatgttgtgggtgttttgacatttactatcagtataaacattcacggcagaaaaatttcctcccaattaggtacaaggggatatatttatctacttgagacaatcggttctttatcttgtgtgtctttgatgcgtagtctggttcagttattatgaaacatgccataaaaactggtgtttggtgattctttggtattcattggaccgctgggtaggatggaggggatagtttggaaggttgacctcgtttatgtatccattgaggattactacatggattattagtgtctgttcaaaggggaaccacagaattattacattcatgatttagcaattaaatgaaattgtattcagttctccatctcatcatttgggttgatttgcatacttgatgcttaggaggagcctagtaataggatggtgggatagaaataaagaaaagctgtttagacataatttatgcttcagaggaggaaataagatttgggcctttgctttttgccaaagaaccaaaagggtgctttcacttgattggatattgtattggcttctcatctaggatgctaatgcatgagtatgatatttttattttctgcattaaattaatgttttcaagcttctaggtttaatattggaaacttctatagttttgttccttacaagcacatcacttgtatgtgaatcctgtcatatttctagttacttactatccaatgttatataaccgagcatagttggaagac

SEQ ID NO: 8812 - DNA, 1701 bp, Carica papaya
  Intron number 3 from transcript evm.model.supercontig_2.57 (locus evm.TU.supercontig_2.57) derived from phytozome v7 .0 (chr-ID supercontig_2; pos 1038193 to 1039893 reverse s trand)
atcccgttagtgtatctattggaggttaatgacatatatcttttttaaattctatttatcttgatcactgacaatagatatgacatttcttattctgaatgattctgaagctttttatcttcttaattttagtattatatgttataaccgctagtgtttgtaaactttttcctgcttcttggcatcaagatctcctgtagtcaaattcaacctaattgttgaggctactgttacggatcctgtcttagtttcgtcaagtcatgaggtttgggatgtggggcttgtgcaacaccttaatgattgagaggaagataaatatgttagatctcacatcttcttttgcatttcaatgtttttccatggggctaattagcctgcttggaggttacattctagtggctcttttccaataatgttatattacatggaccttattgtatgccctattattgttgaggatgctacttgttggaggcctatttggaagctaaatgtgtcttttagaatttctttcttcatttgggaggtgatgggagggaaaaaactaatatcaataatttgatgaaaaggggcaagattatgattaatatgtgctattctgtaaggggaaagcatgatctattaatccttatttttgtggtgctcctttgtgccttcggtttgatttcctgggcttcagttgggtgattgctgtctattttgccgatgatatgtgaacctggcatgatatctggggataatagagggagaaaacttatttctattactctgttagctatcttgtgggttattcggaagaagaggaatcgaagagtttttgttaatgtaacttcttcttgtgacagagctagagatttgtagctatggactctgctcttttttatttttttattttttatagagtagccctctcatttatattgaggacgtagggattttatgaacatattaattgacttgcaaagttcccttcttttgtacttgggcggcattctgttggtgccttgttaaggtactcttgtttctctacggaaaaagagtttaaccaagttaacaaggacattagatttggtcttcagatttcttggatattactcttgtaagtgctatattaattttatgattcgtagttctacctatcagaatgttcattttcactagcctttattcatagccttaaacacttttttttttttttaatttaataatatttctttatctatttttcctgaaaaaacaaaaacagaaaaggtgacaatggattttcatgcctaacttttctttaacctttgaacttgattttggttctccattgataatgaaaaaagaatgtagcaaatgacaagcaatttaattcaggatttccttctagttctaaaatcctttctacccagaaatcttatcaagaattccaagttaattgtcataagccttttacaaagtccaaatgaacgcattcctctcacttattcctttttatttcttcaataaatagttttgatttttgttcttttgtttagtcttaatttctgttctgactagcatttttttgtcaatatgttcttatcagttttttattattgttgtatatgcattacgtacatggctttttgtacttataatggaaaaacttgtttttcaattttttttttgtcttaattggcttttttcttccaggtccagtcatatccaagtttatta

SEQ ID NO: 8813 - DNA, 4964 bp, Carica papaya
  Intron number 16 from transcript evm.model.supercontig_3.2 96 (locus evm.TU.supercontig_3.296) derived from phytozome v7.0 (chr-ID supercontig_3; pos 2079295 to 2084258)
aagatgtacgcacaattcctctatcactatatctcctgttttgtgcatattgtggagttactgtgttacgctatgatcctattctatcatgcatgtagtggaatatagatacattttataaggtggtgatttgttgcaaaaaattttggttttatttgtttgaatttgaacgcagacaagaaaaaaagtttttttttttttttttttttttttttccggtaattttaagcaaatacaaaaatacggaattttatagagttttacatccatatttagattttctaattttaggagtaaataaatatataatcaatagcaataactcttaaaaattacagtaataaatcataaatatataaaacaataactcctagaaatctgtaataataagtcctaaaaatatgcagtaataattttaaagatgtgcaatcaattctttctatatttctacacctcccgtcaagttggtgcgtagatattgatcatgcccaaattgtcaataaatgattcaaactttggtctgaaatgcccattggtgaaaacatttgctgtttgttgctcagaagtcataacgacatacaaataactccattttctagcttttctttaatgaaatgtctatcaatctcaaaatatttcgtacgatcatgttgatttagattgtatgtaatgcttatacctgatttgttatcacaaaatagtttcataggtgcttctgcatctaatttaagttcttgcacctcacaaactccatttgtcatagctctatactcagcttctgtactacttatagcaaccacactttgcttcttacttcgccaagtaaccaaatttccccatacaaacgtacagtagccggagatggattgtctatctgaaactgaacctgcccagtctacatctatgaagacttctatactcctgttaatatttttcttgaacaacaatctttttccaggtgtactctttaaatacttgagaatcttgtattcaacatccgaatgttcttcataaggtgagtgcatatattgactcatgacactaactgcaaagacgatatcaggccttatatgagacgaataaatgagttttccaacaagacgtagatatctacctttatcaactgggattccattaaaaacatttcccaacttttgattaggatccacgagtgtatcacttggtttgcaaccactcatgtccgtctcctctaataagtcaataacagattttctttatgatatagaaatttccatctttgaccttacaatttccatgcccaagaagtaatgtaaagaccccaaatccttaatttcaaattttgaggtaagatgtttcttcaacctacatatctcatcatcatcattcccgataaatattatattatccacgtatacaatcaagatagtcatccttccatcaccagtgtgtttcacaaatattatatgatcagattgtccttgattatacccttattttttaacaaatctggtaaatctctcaaatcaagtttggggagactgttttagtccacataatgattttttcagattacaaacttttcctttaaacttctcttcaaagccaggaggtggatccatatagacttcctcttctagctctccattgatgaatgcatttttaacatccaattgaaatagtggtcactttaaattcacagctacaaagaataacactcgaataatatttaacttggccataggggcaaaagtctcctgatagtcaactccatatgtctgcgtaaatccttttgctactagccttgctttataagattccaatgattcatctgagttgaactttacggtgaaaactcacttgcacccaacaatcagttttcctttaggcaaacgagtcattttccacgtaccatttcttcaagaacaatctttttccatttaggaactgttaatgcttcctgtatagatttaagtatattcatacgtgataactgtgagacaaaagtatggtaagaagatgacaggttcttataagatataaaatttgataaagagtgttgaatacatgatcgagtttcttttctaagagcaatagggaggtctagagggtcagaatgtatttgttcaatgggaaaaaacttaggttctagaaacttagagattatacctgattcttcagatcctgatatcggatcagattcttggctttgagaagatatagttgcatctttcttactttgaattggatttcttttagtgtaagtttttccaaacaatctttcatcatcgaagcttgtataatccatttcgctagtatctttttttgtgttcaggcactaaggttggtcccatgttttcctcatccaaaatatcaaaattaaatattgcaattgcattatttttgtaactattagaaatattttctttttcaaatatcgagtctttattttctttctcctcttgaagatgaggacaaaaaaaactttgtgatttaaggaatgtaacatccatcatgacaaaatatttttttctagtaggagtaaaatatttataccatttttgtgtgggagaatatcctagaaaaatacattttattgcttgtggatctaacttatttatattaagattatgtatattaacgaatgcaacgcatccaaggacccttagtggtaaatctgaagtcaatcgagacattagaaatgattttttgaaaactgttagaggtgtctgaaagttcaaagctcttgatggcatcctgttgattagatatgtagcagtaaaaattgtttctccccataagtatttaaatatattattggtaaacattaaagatctagctacttctagaatatgcttattttttctttctgctaccccattttgttgaagagtgttattgcaagagttgtgatgaacaatttctttttctaagaaaaacgatcctaagattcgattgaaatattcctttctattatcactccgaaatacttcaatttttgtttgaaattgagtttcaaccatggtataaaaatttttgaaaacatattctgcttcagatttttctttaagtaaataaaactaacttaaacgtgtatgatcatcaataaatgttataaccaattttgtttcagagttggttaatgttctagagggtccccacacatcactatgaatgaataagagaaaaaggcatagatggtttatatggttgagtagggaatgatgcacgatggtgtttagctaagtgacaaatttcatattgcaataatattaaatcttttattacgaaacaagtttggaaataaatattttaaatattgaaagataggatgacctaacctacagtgcaataccattatttcatcactagtagaattaaagcatactccaagatttgagggttttggttgctgatacaaagaatttccatcatcaaagtaataaagactttcatgctccctaacattgccaatcatcatcccctatcctgatcctgaaattcacagtagtttgaaaaaatttagtacaacaatttaagtcctgagttattttactaatagacaaaagattataagaaagatttagattgtgaagaacaagagtgttaaagataataattgacccttttcccagcaattatagagagagtgtatcttaattttttgatttcctgcacaaggactataagaagaaaataatttagaacaatctgtcatgtgatccgtgacacctaaatctattatctataggcaaaaaaaaatagttgacacattaaagatggtagattgaaagtaacctttctgcgctaagaaacaagaggaaggtacaggattagagaattctgtggattgaaaaagtctatacagttgttctaactgttccttactgaatgaaggtgttgcaacaacagattctatgttcccattttttcgagatttgaatacgtttctcagacaacatcccacacatatttcgcagtgggaaaaaacaagtatgttttcccaattgaagcctccatggaattgatcaaccaggccattataagggagttttcttgacttccaaatccgccatgtcggatcattattttttggctcctttgtcttgccagtgagataaccatgtttgcctttgccatcgatcaccaacttaatagattgtgctcattccaggtaatttttccgttcagtctgtgaacggttaattgtattggagaattttcaatttcgttgaggattacagatcccgacgttatttccaggagatgtggtaggggaactaatgtcatttatccttaatgttccagacatggtatcgcaaaaaaaattgataagaagagaaggatttaaaaatgaaaaatttattaaggccaaattaaccgacctagctctgataccatgaacgcaaacaagaaaaagaaatttttttctttttttttctgttattttcaacagatacaaaatactgaatttgtagagttttacattttcatttagtcttcctaattttaggagtaaataactatataattaataacaataacttctaaaaattacagcaataaatcatgaaaatatgcgataataacttctataaatctgtaataataaattctaaaaatatgcagtaataattttaaaaatgtgcaatcaattctttccatatttctacagaattcattttgatagacttggtagaactatttcgatatctttcaatgcaaaatattttattttgatatcctcccaaaccatctagatagacttctttttttgctaataccatctagataggcattggtattattttcatatgctaaataatgtggggatcatttggaacaatgtgtcgtaggtaacacggtttacattgggcatattacatagtgagtgaaactaaaatcctatggtcacatctaagatgatccacatttatatttgtttttctttttcaaatggttgtttgttactgtggaacaggggg

SEQ ID NO: 8814 - DNA, 1536 bp, Carica papaya
  Intron number 1 from transcript evm.model.supercontig_572. 3 (locus evm.TU.supercontig_572.3) derived from phytozome v7.0 (chr-ID supercontig_572; pos 22734 to 24269)
caacccgagaactcgctcttcataaccttgccaaggtacattaatatgtctttatcactatggctgtctatctctatcgagttcgatctacatatatatctgctgttttttttttccttttttttttagattttaactctttttcctttcccgtttggctgctaagaaatcaacccactggaaatgtttgggggtggggagaaaaacagctatctgggtgatcatgaaccttatatgtatatcagatatacggataagttatcgttatcgatataagttaacattgtcatcgaaaacagttgatttccatttgatatgctttgcatgtcgactttaccatccgtggttttgaatcagccgtctgtttttggtactttcgtccttttggaaagatctggttctgtaaacctgataattcaagtaccataatttttttaaaaaagagagaaacaaaacgatgtttttatttttgttttctgggatacttggcttgcaaaattcttttgcagatcagtactaacaagatcaattttacatattttatgtcaatgttttgatatttatgaagtcattatatatatatatatatatgtccaagtaataactcgaataacattctctacaaaaaatcctttttttttttttcttatcaaagattttttacttcttcttgttccccatagttagaaagttttaaatcgtttcttcaagactattatatgtatatcaaacgtttttttgctttctgtcatggcataaaatatcatgtttgcaaaactggtgcttttaggataatctgagtgtaattgcctttccatgttaagttttacatggaaagaattctaatgccagattacaagatagtgagagtatagaaaatgtttgctccaaagatgttttcataatatttttaaaataatttagctcatctctagtgatataaaaatttgagattcctcgatttattgtgtattattatgatagacgattgattttcttgtcggttatcactagatataaaaaacgtacatgttgagaatcacgaatttctaatgtctcaggaatgatccgatctttcatattaacgaacaattttaacgtaacgatacgtgcgtgatcttacactattttttgtcgttttattatgatagaattatcatattattattctcagattgtttattagcgtatacgacaaatgtatacaagtacacttgggccgcttttatggttttaagggcaacaaagaaaataattgctttagatgaaattttttatttctcaaaaaaataaatttattaactactaattctaaatattaggccttttatgcaacttatacatcataacgcttgaatttattttttaaattttgaaataattagtgtggcttataaatcatattccttgagttcaatctttataattttgaagtaattacttaaccttttctttcacttaataaattttcatcatttgaatttaatgtaactatttccccatctccttttcagaatagagaagcttgtgaagagt

SEQ ID NO: 8815 - DNA, 8005 bp, Carica papaya
  Intron number 4 from transcript evm.model.supercontig_32.4 6 (locus evm.TU.supercontig_32.46) derived from phytozome v7.0 (chr-ID supercontig_32; pos 578970 to 586974)
atctagagaagataactaaggttattttgttttctcgtatattcagcacattttatgcttttgatggaaatttgtaaactgcatatctctctctctctctctctctctctctcatatgcctacaaggatgcatgcataggtcatacatcaactatcaactgactaatacaaacacatggaaatattgtatagattttgaactttggcgtaattttcttaaatggtgaaggaagcaattttcttgtttagatgatttagatgaaatcagaaagagaaagagaaagatgttctcttagaagataaagattgaaaaattgagagaaacaaaagtatttatggaaaactgaattataaccaacctttccagctatagatccttccttatatggttcctatgaatttctaaaactgaaagcccatacaaggctgtccttttgactggctactaaagatttatgctttgaggagatcttgaagcaacaaccataagaaatatatttgttgattagaatattttattatttaattagacttctatgacaatagcaattttcttatctgtaaattaagaattttataaatactttaggtgcaataacataaagagtgtggaaaataaaatttatattttttctccaaaattaacatagtattagagacaaattaaaggtattttagggtttccttcaaacgctaaaataacaccataacctgagttgattcttgtgtatcaaagagttacatcccaccaacagcggtttgcctcactgttggcctattgcgcctactttggtggttttttccgagcgtgtaagccacacatgccgttagaaatcttctccttcagctagaatcggtcttctggtgtgtgcacggggaccagctttatagattcggtacatattcccctctgtcgtgcaaactcgaccgcatcgggatagatttcacaattcggcgcagatctacttcccccgcactcgagccgctccgaccggctttatttggtcatttttctagctcttccgcgcgcgtccacctttggtttcgcgacaccggcactgatatgatttttccgcacgtgaactgctctgattagttttctttgctcctttttccggctctttcatgcatgtttgcctctacttttgagataccggtgctgattcggttccttcgcgcgcgagtcgctcgaattgaccttatttggtctttttcctgagcatcaccgccattgctgccgcctctttgtcggactggtctttttccggtcactatcttcacgcttgcaacatatttttttggaatttggtctgcaagttgagcatgcatgatatttttgtaccaacttgggggagtgttgactaaaatattttgttatttaattcgtcaatatgatataattagaattatactagaataataatctcatgtaattaaaattctattaaaatagtaatttttttatctgtaggttaagaattttataaatatatcaagtttaacaatataaagggtatgaaaaaataatatttatattttttttctaaaatcaacaatattatatactatttaagatctacagtcaaacatttttccatcagaaggaccttgacatttagtatttgcagctttaaattgatattaagattactgttcgtaaaaaaaatttaacttggttctatcttttcttctcttgttcaccctgtaagaatttttaagtactatttcaaaaattcattttcattccaaaatgcataagcataaggattaccacccaaaggaaccgtatttaagttaggtgaatgattgagtttcaatcgcgacttctttgtatgcaactatcattcatcctactagagatgattcgctatattctgaggctttctaaggatggtattttctctgagacccttttatgaacatttgaatgttttcctcattcctatcgttactttttgggttatatagaacacgaggaattgtagagccttttgaaaactccaattttcctttttcttctattactaataaattatttcataaactttgcatttcatttagagattatctactatttgatagatgatctaggagatgctactcctatcttggcctttctttctttgtaaaattttgtatatgggtgacactttctttttgtcttctcaatgttatatccctttctctctctctctctctctatatatatatgtctcaagtatatatattggcatctccacttctctctctctctatatatatgtatatatgtctcaagtatatatgttggcatctccacttctctctctctctatatatatgtatatatgtctcaagtatatatgttggcatctccacttaatgtagtttctagagatcagagaatgctattgttcattttattttgaaaattaaatatatggtatgtagcaggtacttgatcggtaatttcaccactttatgccccaagacttttgccaatctagtagtgttactcgcatagtccagtctcacaagttttgaatttgtaaagttgatattaagagcaaaacgacttgaaagcacaagagaacaagtcgaaggttgaatggtgcacattcgtccggtttacaaaatattaatgtatcatctaaaaaagacaagtagattgcctcctgtcgcgaagtctttaaggtgtataacaggagaagggtgaaaagaggaattcatgtataagggttaaatagaaaaagcacacactagggtaaatgtcatttcaccgttaaaagaatatggaagagcggtttgggttttttggtaggtggttttgccgatcgttgtaacaccgacaattgtaacaaatttattgcattggttacaattgatgcaagcaatcagtaacaaatcgacgcatctaaaaattagtgtgcccaataatatttgagttagttcgagtcactataaaatttaattatggagatttactcatagtacttaacgaaacgacttctttgaaaagtcaaccacttaaacaaaagaaggtagagtaaggaagtgggccaaacaaaagcaagcaattgagggtggcatcgaattcttggtaatgaaaattccaaaagagatatagactctagagatctccaacaaatcattggaagaactatttaaccaatataaggatgtctacttggagccctaagagttgcattcaatcagagccttcgactatgccatcacattatcttaggagaatgttacagtgaatatacgttcttacagatatttgttccataagaagaacaaaaaggagaagccaataaacagaatgttagatgacttgctaattcgactcagtcgtagccatttctcttcaccaatattattggtcaaaaagaaggatgagaccttgaggatttgtgttgattatagaaaattcaattctctgattgtaaaacataagtttccaacacctattattgatgatcttcttgatgaattacatgatgtatctatattctctaaaattaatctttgagtagagtctcattagattcaggtaaaggaagaaacaaccttcagaatgcatcaaggttactatgtattcaaacttatgcccttcatcatcactaatgctagatctacattccagatcctcgtgaatcacattttcgaagtctttttacgaaattttgttcttgctttctttaatgatatattgatttatagtacgaccgaacaaaagtaccttgactagttggaagaagtcctaaagttactcaaaagcagcaagttgtttgatgaacaatctaaatgctgtttttttccagatgaaggtagaatatgcggatcatataatctcctaacaagacatagaactgggcccccaaaaaatcatagctacagtcaagtagccgactacaaaaatattaaaagccgtaagaaagtttctaggcctaatatggtactattacacattcatataaaattatggagtcgtagtgaaactattactaacttattgaagaaatgtgccttttagtggaatagagagactgaccaagtctttgaattttaaaaaaatcaaccatgatttctagtcccgtactgagactactaaaatttgggaacttgttcactatagagaatgataacaacaacaaaggaatttgtgtagttctaatgtaagacaattgacccatagctttcattaataaagctctcagcccaaggaatcaagcaaaatcagtgtacgaaaaaaactcatggcggttttgtatgtcgtaggtcaatgatgacagtatttggaaagaacccctttcgtcgtcaaaaccgaccaatgcagctttaagtatctgttcgatcaaaaaatgacctagatgatataatagaagggaatcgtgaagctattaggttaaattatactacctagtacaaaagaggatcgtccaacaccgtcgccaccgatgctctctcaagaaaggaatcggatgatcctgaggcagaagtattgtacattgtatccacctccacccttgcttggacaataagtaagcaacaactacgccaatgatctcttcactcgacagttatagaattgatggtttttccaaatagcagatctccttttaacctgcaataaggcatcattaggtacaaatgaaggttggtaatagatgataaagaattgtggaatcaactaatatactaatgtcaacaacttagcaatggttggggggggcacttaggaactagaaccactttaagtggaccaaacaacacttctgttgacgtaatatgaagaatcatattctactatgggtccaataatattatacaaatctacgttgcaaaacagagaagattcctacattgggtctactctggtcataccctcagatgcttgaactcatatattcatagatttcatcaagatgctaccaaaatctgatggaaaagacaccatattagtagttgtgaatcgttttaccaaatacggatacttcatattattacaccacccgttcattgtagcttgagtcgtcagctgttatatggatactatgcatagagtacatggaattccacaagttatagtgtttgacagagacaaaattttcagcaatttgttcgggaaagagtcgatgaaagcggtaggagcaaacttgcatttcagttttgcatatcatctgtagatggacggtcaaactaaataggtaccaatttatcaggatgtatctatattatatggctaatcaacaaccaaagatttgaggtaaatagatggtcgctgctgaatgatggtacaatacctcctatcacacgagtctaaaactaacccctttttaagcactttatggatatcctcctccagatttcttaaactatgtagaactttattcagtttcacctttaatcgaaatgctcttatctgaaagagaagaaactaacaaaacaatccatcagtagctattgagagcacagttaaggatgaaatagtacatagacaactactaaagtgaaagaagctctaaagtctaagactgagtactgctcaacttataatccttcaaacaagggtcagtaaaacagggaagagagtctaaattatctcctcaataccacaacccattttaagtctcacaaaaaattggtgatgtagcttacaaacccaagttgccaacaacctcacaaatccaccctgtctttcatgtgtctcaactcaagagatacgtcccgagcacagagatgatccaacaagacttacctcccaatatttatgaggtttcgtcagtgtgcaacctcaacgagtcgtgcaacaacaaactgtactgcgtggcaactagcctgtggatcaagctcttgtccaatggaaagcagcttcagctgaagaatttacatgggaagactgtgagtatatttggcattagtttcttaatctcaaccttggggatatggttgttgttaaagggaattgtattgtcacgaagccttcgaaggtgtatggtaggagaagggtaaaaagggaattaatttacaagggtaatatgggaaaaacacataaaatgataaaaatgttagttgatccttagaagaatctagaagatgtggttaaggtttttcattaggtggtttcactggccgttgtaacaaatccattgcatcaattgcaacctttgcaatcaatctataatggattgatgtgcctaaaaattggcgcgtccaaccctcgattatgcctataagtaggctaattttatgttatttaaaaaaaggctaattttagtggagaatgcatcgaaaaatttatttagaaatatctttcatattctctttcgatctttgcttctctgctttctctctgttctttctctcactatctttttctcaaaaaactcagtcagaatcatgatcgagggttttgacacctcctcagttaactctccttctccttccttgagtcctctgaacagatccatctccctagctctcaatatcaatttgttcaaaacttctataacaacattaaatagtagtagagatagctgagtctcattttctaagacttctagatgcgttaatgaaaggagatggacccccattcgctaagactgcaaaagatgttgtagtgatgcaggagttgattcatttacatcatctatctttgaagcttattcgcactagcatatagtcaataaatctctaattaaaatgatcatggtttttctttatatcaagttcgcataggactccatctctattcagaaatagtaaatcatccacaacctcattagccacctgaactgcatccataatttttcatccttccacaaaagtatgttgacattcccctaccactttatccatcatgtataccatatgtctagctaacaccttcactatgagcttgtatgtgctcccacctaaactgataggtcggaagtccttaatgttaactgcccctccaccttaggaattaataacaacaaagattagtttaaagatttcacaaaagttcctgcatcatgcagttctttaaaaaactctaagatatcctctttcattaaatgtaagaatttctagaaaaaacccatgctaaaaccatcaggtttaggaactttatccttactgcaacgtagaagtcgctcatagattcctcttcagtgaattcttttccgaatgaaacacaacttatctcatcttcttcagagaatgctattgttcacacaaggtcaattttttaaattgatttttttggaagcatacaattcaaaattagacactgctactgtgtgctcattcataacattttagaaatttctttattattgttattagaattctcctaaacaagctttttccattttaatctagtgtgctcccttttaatattaatcttttctttattttcattcattcttttatccatatgttttgcctaagttatgactattctttgatcactggtattatcttgactgctatctagtggcaccctgctttagttggttttgaaatttctttagactcgagataaatacaggttagctaggttcttttctgatgaaaattgggcttttctcttaggaacatgaaaatacttaactgtttattttcttaaaattttcattaaatctggtagtaaagaaatttcgtacacagtatattctgtggtactctgaagtttgcagcttcatttgtagtcaatgatcttgctcaaatgtccaattgctgcaaacagtttcttcaataaatccagtttaattacttctgtactttgaagagcacatttgcaagactcagtatgctataaactctaactataaactttttttcacaaaaacaaatcttcttactgcaattactagcaattagagggcttttatttaaatccgtggtctctggatttagtaatttagtgttcgccctgtcctagatattcatatttatgttcagttttctttaaatttgcagggctcttgttctaatgtatatttcacttcaattttctcttcagattgctagggaa

SEQ ID NO: 8816 - DNA, 1882 bp, Carica papaya
  Intron number 1 from transcript evm.model.supercontig_106. 32 (locus evm.TU.supercontig_106.32) derived from phytozom e v7.0 (chr-ID supercontig_106; pos 377768 to 379649)
catacgcatctcatattatcaatcactcgaagaaggtaaccataattcttgtccacatctcatgtcttatgcttttgtcaacatcaacattttaagttttgtagtgtcactgccaaagattttatttactattatttcttcttttttatgatttttagtttttaatcatgttggtttccttttgcttgtcttgtttttttatgctcttgttgcttggtgtgtgttcgcattgataatttgctcctaagcttattgtggaaattcaccataattgaatgcattgttctgttcaacttcacaggtaggtttaagtcattttctgactaatttttcttgtagaatttggtttttttatacataatttttgtttttgatgctctttttgctcggtgtatttaagttgataattttgctcctaggcttagtggcaatgtatcatagtatagcacattgttcagttcaacttcacagacaggttaagtcattttccgactattgttgttatagcatttagctttcgtagacaggcaaatattatctttcttaaagactttttttgtttctgatcgaaagaagacaagtaaatcccattaccattacctttccagtctaaattgacgttccccagaaaaaaaatggactcgctgttccaagcatattaactgctaatttaattgttctttgatgttaaatgaacttcttcagagctgtttttggctatatgagaattcaatatttttgaattcaagaatccggatatgttatagctcaagtgtaactaggaccagtcttgatgtgatttgaagcttctatcctgatgctgtgaatttccaataatttcatgattggaattgcaaatttgatgtgaagttggacttctataggggtagcaaccaaaaatatccaggaataaatgttttaataccataacctatgtcaattcttgtaccaacaggagggagtatccatattctttctaacccaatctcacggcccaaatcctacaattatcattttctctcgttcaagaaccaacaaaggtgctaaattccaaacctggcattgttatctctccttcacaagctccccaattcatcagaatcatccacaaaaattgatattatagtgctttaatgaagtaataaaggacatgctttgttgaagtagtaagagacattacaccttacccacttctcccaactgattttttttccctacattacaaagtgttgcttaagctcttccgtcatatcaccaccgcagaaccttcgatgaattctcccagtcccttagttactctaattcaaaaggacagaggacagaaataccctgggttacttcttatcaaagtgaacatccactcttagaagataaggtctctcccatctagatatttcttcccagacatctcaataatctggttgtagacctccaaatccattaacttagcttctattaggcaacgtgaggtaggacgtgggaacgttgcactccaaatcatctgcatgtatattctcttggacaccaccatcggctgggagaatctcgcttcacttttacttcagttgactcttgacctggatgacaaccaggatataagaagaatgaatgcaaggtagccgagttgttcttctgctgctccaagaaaacaatgaaaatgtcataagcatcttaagattgcataatatttggtactcctgcttaggcttatgttacctctaatctgttgctatctcggtttgttctttaatacgatgaatatatgttcgtcataggttttaaatattttagtcttcaaattaaaaaagacatgcacattattctgagtgttaatgtattttttgcagctacaaactgtttcccacttgcttcgccgtgaaca

SEQ ID NO: 8817 - DNA, 6924 bp, Carica papaya
  Intron number 4 from transcript evm.model.supercontig_369. 3 (locus evm.TU.supercontig_369.3) derived from phytozome v7.0 (chr-ID supercontig_369; pos 17421 to 24344 reverse s trand)
gttatataaattggctggaataaacccattagctggtaactattttgttcatagcttcaattctttttttaatattgttggttgctatcagtcaatgaaggcttttttttggtgtctttccaagagatcgtagaaacctgattggaaagctaagtaggaaagagtaagcaatgagactatctattgcattctctcaggaacagttgtgttatattctcattgaataattcatacattatatatacaagttctcggataacaaaagaaaagttacagttacaccctatttggataaattttagtgatggttaattaatgtatgataataatagtgattgaatgacaatgatacaaaatgagaatgacaaattttttttatatttggatgaatgtatattaatgtatgttaacgacatatttttgtttggataatagaatgttatggttgtattttcagttaaattactaatttactcatacctataatatgtaatagtaaatggtatataagaagtatgtaataaaaaaataaataaattgtttaccaacataattatatttgtatttaaatgaataattattacacataatcaaattaaattttaatatttaataaaataaataataatttgtgaggataaaaatggaattaagtatattatagggggtataagggaaaaaaaagtaacttgctggtcacataccaccgatttagtagttttaaaatttatctcaaatttacctgtcagatactgtttgttaccattgaaagttgaataatatgattttctcacacccgtaaagtaccatacattaaaattctttcattcaccacgatccaaataaagtattaattacaaaatggtatattttactttaatacattttaatctagtttaaccttatttatacacattctttaatattcctcctcaagctggggaatagatgacatccatccccagcttggaaatgatggtatgaaatgctgaattattcaagattttgatcaacacatctacaagctgtgacttaataggcacatagggtatacatatcaaaccattgtataaattctctttaataaaatgcctataagcttcaatacgttttgtattgttatgttgtagataattgtgagtaatgcttattgccgatttattatcacactaaaagagcttatcccatttgactcttaaatctttctggagtcttttcaaccataatcattcacacaacccatgtgccattactcggaattttgactctgaacttaattttgcaactatattcttctttttattgcttcaagtgaccaatttatccccaataaagatatagtaatttgtaatagatcttccatccatcattgatcctatatagtctatattgagataagcttctttcccaagtgtcccctttaggtagtgtaacactttattgactgcttataaatgtacctttttagggttgtgcatgaactgatttatcatacttactgcataagtaatatcagatcttgtgtgcaataggtaaattaacctcccaactagtctcggatatatctccttatctattcttgtatcttcgttagttggtcacaacttataattgtggtcaataggtgtattagctagtttacatggtagtttacctgtatgttttagcaaatcatttatgtatttttgttgtgagatgaagatttataattttgaatgagctatttcgattcctaggaagtacttcagctttctagtttcttgatttcaaactccttgcaagacaacgcttgagcatcagtttttctttttcatcgttctgttacaataatatcatcaacatatattaggagagctataactctccctaaatctgagtacttgatagataaggtgtgatctttctatctctgtttatataccatgcgtaacacaactttggcaaattttccaaaccacgctctaggtgatggattaaacccataattttttttttttaagtttatacattttatttatacccatttctttggcaaatcctaatggatttccatgtagatctcttcttgtaacttaccatgcaagaattcatttttaatagcaaattggtgtaactgctagttgaagtagatagctagagatagcaaaactcacgctgttcatttttgcaactggcgcgaatatctcttgatagttctatctcataagtctgagtataatcttttgcactagctttactttgtacctttcaattgtttcgtatgctctgtatttttacagtaaacatccacttgtatctcacgaacttctttcctttagtaagtccactacattacatgtctggttcttttcttgtgtctacatttcaacgatcatgattttttttttctcactggacaattcttcatatttaatgttaggaatagagtcagcattaagattcatgagaaagttcttgtaagattgtgaacatttgtataaggagtaaaatgtaaaattggacacaaaggatgtttgacacattctctagtttctttacggattgcaatgaacatatcaatatcagactgtatagggtctttggaatctttatggattgtaatatagatatatcaatattagattatatagggccttttgaacctttatggattgcaatggatatatcaatatcatattgtatagggtctatggaacttatctcagttctaggacttgtttatgatgctttaacctgcctcaactcagaacgcaaattctgcccgtctgagtacacctgagtaaatctcgggtcatgtaaggtttcttgggtaggctgaatgtgaggattttctctagtatcaaagatggtacttgggaaaagttgagttctgctgaaagatttgtaactttatcttccaaatacaggctcctcctgaaaataagattgggtaaatttagattttcaatgagataacatctgtagatacgtaaaatttttgcatagatagatgacaacacttgtatctctctcaagcgggaatggtcatgaacaaatgcaatacacccaaatatcagtggaactagatggtttgtgatattggtttctggataaaatttggattgagttttcaaagggtttttaaaatcaaggacacgagggagtaatagattgacaatataggtagtagtaagaactgcttctccttaatactatttagggacatggttctagaatgagaaggctcggttagtagcaaggatgtaactattctttcattttgccacccttgttgtagagtgtggatatatgattactcatgactaatcccttcttggttgaaaaaagaagagaacgtgtgattttaaaaaaaattgcattgttggtgcaggatctttttatgtgagtttcaaatagggttttgaccattttgcgaaattgaagtattatgtgattcactttagattttgacttaagtaaaaaatagccatgtgattctggtgtaatcatttgatgaataacacaaactagcgagtcccaaatttgttaggagtgtgggcaggtccccatagatcatgatggattaatgaaaatggaaacttatttgctttgttgctattaagaaatactacacgtttatgtttagtaaatttgtatgtatcaaaatgtaaatatccatcaacaaagtctctttaaataaaaaaagaaacatgaccttcaaattgaaaaaaaaaggatggtcaagtcgtttgtggtagagccagagtttggtggtaaggtttaaagttgtggtagagagagatagtccagcccatccaagtattatagttcattcgtgacttcaacatatccaatcatctttcccgagttttggtcctgaaaattgcaatgcaaaaaaaaaaatgttattttgtagttcagaccattggtcaatttgataagtgatacaagattggtacaaaatttaaggacatatggcacatctattacttggatatggggaatttgtgttaaaatgtttttagaaattggtcatatgattagtgcccatggagtctataatccatgatttcgcaaataatgtatctgagacatttaaatcatgtgaatgggaaaacatagttgaatgtgctaacagacttttacctgtgggtttctccaagttctcaagccattcttaaccgttcaatttcagtcttgaattcactcagttcataggacttctcttcttcctgctgggtaactgcatggacttgtctgtaaaggcttctgtggggtgttcttgtattcctattatttgcttgagagagtgggttttttgtggagtttccaatatttatcttccacatgtggaggtttcttacagaaagtacaccataaattgtcataacttttactcgactctttaacctatttacttggtttagagcctttagtgccattgttgagttttcagtagtgtgaggcctagcataactcctctcctgctttcctcagtactaactagtgatattacctcatctaaaaatggtaattcttctttttcgagaatttgaattcttaccttatcgtattcttcattaagtcctgttatgaactaatatgctctgtctttttccaccatcctcctcagcgtagtgacatctttgttgctttccatggtgaaaaaacattttgattcatttctaaccacaagcttttcaataggttgacatactctatgactgacttattttcctgtttcggtgaccaagtttttacaggcagatcatagattagaacttcctcttctaccttggagtaggtttttccaattgaatctcacacttcttttacgatggttaagaacataatggtattgtttatctctactgttattgcattctagagctaaaccattatcattgaatcctcttcaagaatgatctgaatcagttgtgaccaattcaaatagttcttgcaattaaaactataggtaacctggattggctggaatgctctattagtttgttcagaatttcccatgtagaaattgtactggtgatttgagacgtaacttcgaacataattcatagtcttttaggacaattaaggctaaattatcagcacacatggcatgagtctttggaagggtattttgcaaaccagcaaatcagtctttgaatgctgaaaatgggaagtgggtaaaggcaataaggtgcgcttctggacagatacttggtgtggctctgttaattttcagactcatttccccttggtctttgctatttccaaggacaagaatatgctcattaaaaggctttttgatgatgacgacgacagtgtttagaatgttgtggttcacaggaacttgcaagacttggaggttgatgaatatgaggacctatgattgcttttggccaccattcgactcagcaacaagaatgataaattactatggtctttgaaaaaaaatggcatttttctgttaaatatttctaccttcatggtaatagaagattggaaagtatggaattccctacaaagatgatttgggagactaatgcacctcctagaatatctttctttgtttgggaagctgtgaaagaacatatcctgactattgataatctcatgaagagagggttgattttgactaatagatgcttcctttgcaaaagtgacgcagaatccctcaaccatttattgctgtggtgccctgtcacgtacaatctttgggctctagtctatgggctattgggtatctgttgggctatgactggttctcttagtggtgaatttaaggcccgggaagaactgtgtaagaaaaacaaatatttcagagttatcccacttaccatcttctgggtcatctggaaagaaagaaacaatagagcttttgaagggaaagaagataattttgtcaatatcaaggatagatgaatttggttttattgttctaggacttaaccttgagaacttggatgattttggttccattttagatatacttattgatttgtaaatattttgtacatgggtcatgcccttttggcgccaacacatcaatacacttaacatctttttatttcaaaaaaaaaaaaaaaattaaggccaaattatataaagaaaagttatagcatactggctggacagacttgtggctagtgagaagctggctgtggtgaaggcacggctgtgcagggacagatgcagagggacagaacagagacaaaacttgcttgaggaaaggatagatgtggcgatgctgtgcaggtggacagagtgcgacaggaaaaatctggagtgggcagctcccctgtgaggcgctattggggcagaagctgtaggatggctggtgcacggctgatgagagcagcggttgaagggctggccggctagaaggctggatgaggctggacttgctggagcccatgtttggggctggcgcaatagggacaactatcgaagttggttcccttgatggtaatgagtcgcgcgtctggcttgcagtgggctgactgtttttccagctatgaaggccggtggtggtggctgttgtggtggccaactagaaggtggctctcctttagggttttttttcctatttcaacaatcaaaactgagtagggtttataaaagagttcaaaattttttacttagggctctgatgccttgtcaggaacaattatgttgtgttctcagtgaacaatacatctctatatatacagtctcaggataagaaaaggaaagttacaattaattacaaagggatgtattttactttaatactctttaatctaatttaaccctatttatacatattgtacattcttttacaaattcagttgatagtttatgtctgtttaccttccagaattttgtccttgaacaaagctatgaagctacaagttttccctctatattctccagtttggtttaaataatttgctggaattttgtagg

SEQ ID NO: 8818 - DNA, 628 bp, Carica papaya
  Intron number 1 from transcript evm.model.supercontig_127. 10 (locus evm.TU.supercontig_127.10) derived from phytozom e v7.0 (chr-ID supercontig_127; pos 152645 to 153272)
ccagtatcgtctggtttttctttttctttttcttttttttttgttgttgcttgattctctccggattcgtttgatgggttttggatatatttcaaggttgtttagatttttttcttgggtttatgtctaaactgttaaaaaatgaaatcttgatttccttcatttctagcttgtttaattttatctttcttagatatgtatctcctctgtaagattttgctcttattcaccagaaaaaaagtttgttctttttcaattaaatctctatagttttccgagattaaagaaaaaattcattgaatttattgggattgattgcacatgaactactaatttttcatttttatggagtttagaactttccttgtctgaaaacctatttggtagatttgttctgctttttaagtctccagaatctcatgacttatttttgggtgtgatataccttggatatgattgaagtttttaacaatagtaagattttctatggttccattggttcatctagatcgtacttgtggattcttaatctgttgaaattctttacaagatggtatttttggtgatctaatttgatttgtgggtttttgcagttaccaagaccactcaagcaatcaaagcattgaaa

SEQ ID NO: 8819 - DNA, 6522 bp, Carica papaya
  Intron number 4 from transcript evm.model.supercontig_4.57 (locus evm.TU.supercontig_4.57) derived from phytozome v7 .0 (chr-ID supercontig_4; pos 1424229 to 1430750 reverse s trand)
aaccaggttaaatttgtttatttgttttgattgttagtatcccatgagaggtttttcatgtgtttgataagtactttctggctctgagggagaaagtttcttttgcaactgctgctagggaggaaaaaattgcttttcttttcctccccaattgcttgtgcaatacattccctttgcagaaagtatgcaaggaagggtaagagataagagtcctaagttatatctaattctaagattatatgttttgcttttagggctttagtttattgaatgtgcggatgttgaagcatgaacgacttataattatggtgtcatctcatttgttgcaaattgcttcctatccaactaccttatttgtaccctacaccccaagtcttttatgattaggtatttgaattttttagaaaaattggaactcattttgcaaattaattctcagaatttgttatgaagggctagattgtggtgtgatggaatttattgcaaagtggtggaagcaattaacaaaaagaagactttgtagttaatgtttatcttttttaggaagaaaaagtatgcattagaaagcatcaagaaggtataactcatgcacaaaaggaagctagaaatcaatcaacatagcaagaaggtctctaaaagcctcggtgccataaaacagttgacccatcaaaaactcaagacctggaaccaagtttctttaaatctatcaagttttgaatcattatcctcaaaaactctcctgtttctctcattccaaataacgaaatagtggctgatggaatcaaccttatagactacttgtcagtttgaataacttcccatccaaagctcctccctcgccgggccagtggtaacccaactcaatccaacaaattgtagaccaaagaccaaaggcaatacacgtataggcaccagaggagggtatggctacatgattctgcatctttgtgtcaggatccatgtgacacataagggctgaggtgcgaacaaagaagctgctgggttgttaatctttattgttttctatttttgtttctttcctgtcaattccttcctactttcttaggctggataatttaaaaagggggagattacaattgtatgggcatgatcatactcttttggaacatactagaataccatcgagttatcctcaacttctcttcttctctttctaatgctcatattctcatttgattaatgagcttgggttagaaggaagaaagtggaacacgataaggaatctattggacgtgtaatcatggagttttacaagtagttatatatcgaggatgaagtgtctagccattttattaaaggtgttgattggtgggccattagtattggcctggccgaacatctcgacgttagtttgtggaggaggagatctggaaagctatttgggctagggttttgagaaatcccttggacttgatggttttattagagcttttttccactcttgttggagtatgattgaggaagatctgttaaaggttttttaggagttctatttgaatgacaatgtttatagaagtatgaattctatctttataaccctcattcctaaggaagataggtctaaaaggagtttagattactgtccgattagtttgttaaccaacatctataaaattactacaaatgtgttgtctatacgccttagtgagtttttggatgacgctatatcactgaaccaaagtgtctttatgggagggagataaatactggatgcatcacttgtagctaacgaatttgtagagtttatgagaagagccactaaagagggattagtcttgaagtcagattttaaaaaggcttatcactgggtcaactagggttttttggatctcaccatgacacatgttaagaatgagttttttttcctttttttatgtatattatattagatttacatgtatatatatacaagcttttctatatggaaaaaaataaataattaattacaattaattgtaaagggtataatttactttattgcactctcctcaagttaagaagtaaatgttgttcatcctcagtttgtaaataaaagtttaaaatgttggattacttatgcttttagttagtacatctaccaattgagaactcttgggcatgtgtgagctacatattgggccgttgtcaagtttttctttaataaaatatatgttgatcttgatgtatttggtctggttgtgttgcagcagattgtgagtgatgtttgtatccaatttgttgtcacagtataggcacatatagttttcccattttattctaaaattttcaattttttttatcagtaagagttcgcatatccttgatgccattgatctgattctgcgcttgatctcacaactatattttactttttacttttgtaggtgactaatttgccctttaggaagaaataatattatgtggtagactttttgtgtacacatacttatgaatattctgcatcaatataggtttttaggagtagtttatcattcttaacgaacataattcccttgctaggtaaccctttaagataatgtagtgttccataggttgcttgtagatgcacttcttttgcattgtatatgaattagtttataacactcgttgcataggtgatgtttggtctctcgtgggataggtatattaatctccttagcaatatttgatatattttcttatttgctgacgtatcttcttatgcaaaaattagaattaatcggagtgcgagctaatgtacatcttaacttgctaatgtcccttaacaggtcatgaatgtgtttctattaagaaatatatattttggattttgagcgagcgacttcaataccaaaaaaagctttgacttactaatttccttgatttcaaatttctttgccagatactagtttagtagctcgtagtagatcttatgtccacaactgatattgtataatctgtatcggtatagacttttaggagtagtttgttactctttctaaccataattttttcaatggttaccctttttaggactataatgtttatagtctgtttgtaggtgtatttcttttaaattttttatgaataggcttataacacttattgcatattcgatgtctagtttcatgtgggatagatagatcaatttctcaactaatgtttgatatatatctttatttactggtgaatcttcttttgctatctctaatttgtgagtaggatggacaaaagtactagttggcttgcatgctaacttgccggtgtattttaatagatcatgaatatgtttctgatgagaaataaaaataatatatttagagttaacgattttaatttttggagaatatttcaacttgcttagttgaattcaaattattttgccagacattgttttcattttagttgttcattctcataatttcctgttatgataatattatcaacatatatgataatgttatcaaagacagggaaaaagctataactcttgttttttagtgttttaatgaacgaagtctgatcttcttgagtttccttgaatcttagatctatcattatcttgtgaacctgacaaaccatgcttttttatgactgtttgaatccatatagtgccttctttagtttacttaccttatttgttccgtcttctccatcaaaatttggtgagatattcatgtggcagacttttaaatctccatgtaagagaatattttttgcatcaaactgttgtaactactaattagaatgggttgctaatgataacaagatttccatagtgtttgtcttggctgctgtgcgaatgtttcctaatagtctatctcatatgtttgtgtataaccttctgtcatcagttttactttatacatctcgattgtcttgtatatttcatatttgattgagaaaacccattttattcccactggattcttgcctttgactagattcaccactccctaggtttggttctttttaagagtttgcatttccatactcaacatttttttttattttttattgaataatatctcagatgcggtattagagatatatttattgtttgaatttgtgaggaattttttatgaattaatgatgatttgtcaaatgacacaagttgcaagatatgatgcggaggttgtttggtgcattctcttgtatcttcacgaaatctaataggtatatcattatcagaggattgtataaattttttgggacttatatcaagtttaggatcatggtcggattcttggattgactttggctcagtactcagcatcttactctttgtatacaccagagaaaacctagtgtttagtataatctcttaagaggatagatttcgaagtttttttttgtggttgtgagctttttggtgggttacgaacgttttattatggtgatgactttgatgtgcgtgacataggtagtagattaaaatttatcatgaattatgtatttttatcttccaatataaactccatctgaagataagattgagtgacttaagattcttgtttaataaatgtgacgtctacagacacaagatttttgagtgattgatagtaatatatgtaccccaaataataaagctgtaatatataacatataagtctctctcaggtgcatccaaatagtagagtctgtgcctggtttcagcaagtccaatcatattttctaaattctagtcctgaaagtcacaatgaattatcaagagacattcgcaccagttattaagatgacgacaatgtggatcttgttgtgtctagctactcattttgattagcaattgtattaatttgatataaagaatgctttcatgaatggagatttataaaaagaaatttatatggaaggaccaccgtaatttgtcagagggacaggatctacaaattgaagaagaagatgaaaaagagttcgagatcaaacagataggaaagttgaagtagttccttggaattgaagtcgcatgctcaaaattaggaatcttcatcttccaacagatatgtagtcatgacctattaagggacattgacaaggtagcttgtaaaccagttaggacttaaatgggtcgcaatgataaattgagcctaacaaaagaggatatactagtagaaaagaaaatatataaaagattggttggaagattaatgtacctattacactcaagatcggacattgcttatacactgagtgtaagttagttattgcaaatttataaggaagtgcattatgggcaacctacattgtgctacattaccgaaattgatgtagattatgcaccttccttggatataacttagtcgcttgcacaagtcagaagcaaaatatagttgcaaagtctaatattgagtaagaatttcagacaatgactcaaggaatatgtgagttattatgggtaaagagaagtttagaagatctaaaaatcaagttgaatggtcccataagcttacagtgtgacaacaaatcgactatatgctttattgacaatctgatacaatacaatagcaccagacacattgaggttgacaaacactttattaaggagaagctaaacaatggtctagatatgctctatatatgcctactagcttgtagcttgcagccatttgaccaaaagcttgagcagtccagcattatagattgtcattggtaagctgatgattgaaaatatctaattccccaatctgatgattaaaaatatctaattccccaatttgagggggagtactgaagagtgtattttatatgtaattaatctagaagagttacgttaaaagggtattatagtaaaatagtcttatgtaatcaattgtttgtttccttcttacattagaaaacttgtatatgtaggaccctgttattcaataaaaaaacaagctcaattattctcaacaatttcgaaaaattaactcaatggatatgtgagttattatgactgaagggaagtctagaaaatctaaaaatcaagtaggatggtcctttatacttatactataacaacaaatcgattataaacatcactcacaatccactacaacgcgatataatcaaacatattgaggttaataaatacttcatcaaagggaagctaagcaatggtctaatatgtgttctatacatgccttactagctcatgcttgtagacgtgttaaccaaagacttggcaatccaacattgcagactgtcaatggcaagctgaggatggaaaatatttattcccaacttgaacaagaatgttgaagaatgtattttatgtgtaattaatctagaggagttacgtcaaagggcattatagtaaaataaccctatgtaatcaattgttggttttatttcttacattagaatacttgtatgtatagggtcttgatattcaataacaaaagttcaattattttcaacaattttatgtaatgacttagtgataatatcccaataatagcatcatcaagtttaaatatatgttcgtataatagtgtaaggtgcatgggtataatctgcttttgtcttttggtgctttttaggacaactacttggaggaggca

SEQ ID NO: 8820 - DNA, 1109 bp, Carica papaya
  Intron number 2 from transcript evm.model.supercontig_5.27 (locus evm.TU.supercontig_5.27) derived from phytozome v7 .0 (chr-ID supercontig_5; pos 149428 to 150536)
acaagctcaggtacatatctattctttttatttattttgcataccatagaactcggattatttattttctggctatatttacttctctatgcagttttcaaattaaacaatacaaatctgattatcaaagatacctaccatcaactgcagccatccacgtatccaatttttaacttaacaactagtagatgtagattaattcaatcactttcaccttttagcagtcactttttatcatcttggtttcactacgataagtcctgtcactggcaggattggcagccaagagttttgccaccttatgagataatctggccattatgctggttatctaagccttgttctcgttttctctctgcatccattctgtcacatcacttgctccttaaatgatgtaaatggaaccaaaaggtttgtcatgcttgtgattgtgaatggttccatctttgctgatccacagctgagacaatggtgtttggcatatattttttacatgtaagaatgtgtacctttttaaggaaaccttttcagatgcatgttttgttatgtggcaatgctatggtgcctcaggggtaaactacctccatcattctccaccagtgaattcataaagaagaaccacagcctttaagaataagataacatatataaattgttaaccttttctcctttgcagccttgggggcaatttgccccctaggcatttagaacctcccattatcttctggggataaggaaggattcgctctatccctcctaaaccactagcctgaccctctccaaacacagagagaaactaggcaagtcaagtgacaaattactgagttggctgaagataaatatgttgtatccatctgaggatgcacatgcatttgatcttagttgccaaatttatttccttgggtgttagttcttattggaaattgcacacacattattatgtggatactgcctattctgctcacttctatattggccctgtatgtttgcttcccataatattttgagccttatatatctagccaattttctcaatctattaccattatcatatatggctctcttcttttgcagttctgaattcatatttatcaatccaaactctaaag

SEQ ID NO: 8821 - DNA, 787 bp, Carica papaya
  Intron number 4 from transcript evm.model.supercontig_170. 4 (locus evm.TU.supercontig_170.4) derived from phytozome v7.0 (chr-ID supercontig_170; pos 23811 to 24597)
gtaataaagagacaaatacaacaccctgtaaaaatgtaagtttaaggggatgcttgaaaacagaaactattttatggaatttattttaaaagctttacttagtatgactatgagaagatcaaagattaaaattcaaatatattccaagtagaattgcatgcgataatatatttcaaattcttttaggttgcatttagttcaattcttattcaatttctagtcaattcttcattttcaattatcataatagtcttaacatgattaattggatcatagtttttttgtatttgagctactattaattaatcttgatttatttaatggtgggagtttaatttcttctatttgaggcagaacttcaattccagtcatccaatgatttaaagaagagtgatgataactcaaacacaataaattttgttccagttatatcttatgactaatatcagaaataacgtcgggaactaagaaattaaacaagaattgaaccaaatgcagtattaatgtttttgatcgaatttaaaatgtatttgtaattctacttagaattcttcggagtagaagttcttcatctatgtgtatattttacacataaactctgcaacaatggttcatttattctaaacatactgtaactgtagatttctcattcttctttcttatatgcacaacttatttttcagtcgaaagatatctaagaaaatgctcaaggaaaacagatactgatagaattccatttcaagcatgtgcagggttttgtctgccaaagatactactctcttacgag

SEQ ID NO: 8822 - DNA, 3697 bp, Carica papaya
  Intron number 3 from transcript evm.model.supercontig_19.1 46 (locus evm.TU.supercontig_19.146) derived from phytozom e v7.0 (chr-ID supercontig_19; pos 939363 to 943059)
gaggtagttctgttctgtttgtttttcctctcgtttctggatagtttcttttatttctttttataaatgattatgtttccttttactgggtcattctatggttaggaaggaatattcatgttggctgactggctgcttcttcaaaataattaagtttttgatattatattttgatttgatgcaattgttaggagctagccttgacatgtaactcaccggaacagagagacaataacaaataaataaattaagctaaagtgagaaagaggtcgggagagaaaaatagaaatagaggaagattgagagagagagagaaagagttatagagagagaaaaacaaacagagagagaatagtaacagaaagagaaagaccgagaatttagagagagatagagactgccgagagaggaggaagaagatggagaaagatgagagcaggagtgtgagattgggagaaagagagttgagagagagagagagagagcgagcgagcttgggattggaagtatgagattaatcttgaacaagttacttgatttattcgagtttatgatagaacactttaaatacatgaatgatgcatggacatcccctgcaaaatgccaatcaccgccatggaagttggagagctgaggttcagaggcttcaggtgcactgaatggaggaaggaaggagaagggtcggttcatcaaattgagacggtttggttcaacggttcaccgagaaatggtggttccacaaactagggttttgggattttaaataccccctccagaatcatgacatgtcccttaattactttcgggtggcagcattgcatggccgacgcttaaaactcttatgggttttgcttccctgcaaacgattgtatctttcatattttgctgcttgatttttgcttttctgcagtcggtttcatctttagtattctgcttccttgctgattctacacttccctgcttatttttattctgatgcaacaggttctcaacaatactctccctttaaacattaaccttgtctccaatgttgaaattcagcttccaaatatatggtgccaaagaattattattattattatttattcgtttttaattttttttttcatttttaatttttatttttaccgtgctacttgaagaaccccctgctatgtcttgcaaagataaggtcaaggattttctgcattatcttgttgctcttcctccaaagattgattctcttcaccttgtccttcttcttcttcacagttctccatggtcataaatattttttctttacactgatgtcctgggaagcatttttacctgcatctagcaaatattgcttctcctcatttctggatgatttggatccctcaagggtggtgcttcctgaaaattttgaatgctgggaagattttctttaaaaaagttgtaaaggtatttgagtgctttggtttattatgatggttgatgacatctactgattgttcttgtcatagagtcaattcaaatgtttgaatcaaggtgcgcagtttgtacattctcattgtcgatctaagtttctcctttagaccacttataaagctggaaataaaatatctttaagaatgtctggagttttcagtcaataacaacgacctcgtttcttcaaaactttcttgatatttgagaatggtattctcttgtatcaatttgttaaattccttcacaatgtctactccaactagtcctccaaaccttctacacaattccttctcaaatattttctcattcaaacatctgagggtcatttgctagcccatgaaaccaaatttccactctgtcccctagatacatcgaagctgtttttactttattttcttctagaatgttgaaaacatgaaaacatttgtttacttcttctaattcaagttttagggtttttttcttcaaagtcaagtattttaattttcagggtagggtttcttgcttggttactcctctatttcgacccattgctaaccccgtctaaggcttggtaaaattcctctatcaacattcaaaacagaagcaaaggggcttacctttgcggctgtttcacctagctgtgcattgtcttgcaagagattggtgagcctctctaattgttggttgagcatagccaatcttggtctataatggcttgggcttgctgctgagatccatacatttttggacctaacattcgaaagcttttggtccacctcacgcatattttctcccaaagcttgcatcttttgaggttcagccattatggtttttcccttgttcttagccataacaataaagttttcaagagtctttttggattccattggctctgataccaagttgttaggagctgaccttgacatgtcggaaccacgagacagtaaaaaaagaaataaattaagcaaaagtgagacaaagatcaggagagaaaaatggaagtaggggaagatcgggagagagaaagagttataaagagaaaaaaagtagagagagaatagtaacaaaaagagaaagatcgagattgagattgctgagggaggaggaagaagactggggaagatgagagcagaaggagaatgagatttggagaaacatagagtttagagagagaagcgagagagagagagagagagagagagagagagagagagagagagagagagagagagagagagagagagagagaaagagagagagagaggttgggattgaaagtatgagattaatcttgaataattacttgatttattcgagtttacaatagaacactttaaatacatggagtgatgcatgaacatccccttcaaaacaccaatcaccaccacggaatcagagagtaaaggtttagaggcgtcgggtgcaccaaatggagaaaggaaggggaagggttggttccccgaatggagacggttcagttcaatggttcactgagaaaaggcagtccagcaaacttgggttttggagttttaaatacttcttccatgatcgtgacacacgtccctccagatctccgtgggtgctgccatgtgtcccttaatttactttcgggcgggagaattgtgcggccgatgcttaaaaccttatgggttttcttccaaatgctgttagcattagatctcgaactgataactggatatttaagtgtttacaaactgttagtattagttattcaaaaacctcaattctatctttctatatcttaactgataactggatcccaaactacgaactgtacaaaaaatgactatctctatctttaaaaagaactaaaaaatagcaagtgaaatagctatgatacctactcatttgtaactttttgaagttggtgtcagtaaacatgggcaaacggttatatgacggagaaataatcatagagtggatatgatgagagataatataacaaattcacaagaaaatgaatgatagttttaagttattttatttaactaaagactatcttttcttttagtactaaaaaagaatgaatacttgaagactgaataggattcaaaccgaagaatcattagtggtccttgcatgggcacgaagatgcaggaaatcttaggaacaacaacctccttcaccttattccccttgttctaatatttgtttggttattcatttccattctatattgttttactgatgtggttaaattttgatttcaggttaattactgctacatacttaaaaaattcgatca

SEQ ID NO: 8823 - DNA, 5666 bp, Carica papaya
  Intron number 11 from transcript evm.model.supercontig_22. 52 (locus evm.TU.supercontig_22.52) derived from phytozome v7.0 (chr-ID supercontig_22; pos 1304836 to 1310501)
cgtaggtgagattagcttatgtggttattgatttgatttgtgattgagcaggtgattttaatgagaaaactaaagatttgagtggggaaagattgtgatatttttgttttacatttgtagaaatggatttgattactgctttataagggaccaaggctttcaataccaattacttaaacttgagtttttgagtacaaattattttagcccaaaaattactaagcttttgatgcttggtccccaggcagtacaagattcatgtcttattttcataaaacaaattgctctagtggcaatgtaacattagtggattcctataagaagttgacacagtcaaagtagggatcatttttttacttggaataaatccaacgcaagtggcaattagaacttatagaaccactttgcatgcaacacgtttttctactttctttcaaatggttaagaggatgttatatttattctgcataaatgattcccttgctcccttgctctttctccaaacgtaaaagttgtcccaaataaaggaaagataacataaaacattaatagtgatgagaaggtgataacaaggacagcaatgattatgataaataagtaaatcaattaaaagtttttttttcctttcatgtagtagttgataagttgcaagaaatggctctaagaatgaggaaatagaaattgaagcttgattttctttcattgaattctgaattggtttattatctaacaattctaaattgaagggaatcatatctacatcagcattaacttattgttagtggtgacaaagaactacaatttttgttccttttatctttcatttcaggttcttgacatccactggtgggttcggaatttggtaccaaaaagtatttactccaaattgttgcttattgttaaagaaagtgtattgtgtaaattaggttaaagggtataaggtaaaatacatcatatgtaattagatgtctattttcttttctattttagaaaacctatatatataaaattatgatatttaataaaatatatattcaaaccatcttaatatttttttttgaggtaaaagagagaaacagtataaaaatggacgccaaggggggcataacccatatacaataaatcaaaccattctaaacatactatcaaaggcataagttaaaaaattattcacccttttatagattctactcagtgtttattgttgaaatagaaaaccataggaagacggccatcattgcggcctccctccatcacccaaatagctggccacagatcgacaagtagccataaaaaaggctcgttgttgcttatggcagcccagccggacgtctgtgttcctcaatccatgtctctaggttctatccacatagcatagtcactaatcccttgcacatctatctagccgccaaaatcacatgtttgcacttgccgcggccaccatctaatagctgttggcgaccaatccacccaaattggccttcatcgccaatagtaatagcaacaaggcgcaagccgaggttcccttcttgcaactagttgtgcatagccacccttaaccccagttgcaagccgcaagtagcagctccctcttgcgcatagcctgccccagccacttggtcaacttgccagaagccagttgctctatatgccctaactaccagtctcctctgttgtgcccaacaactagtttgccaaccaggtgctttcctagcacctcttttagctagacaaacacaaacgcgtgacatgttggtaaaattctttctgtgacttttactgggctttagttgtcatacaactcttagaggatgtcgaaggtagcattccaaaatactagaagaaacttctacgtgagaattccacacacaagaccagcgaatttaagccaattcagactgcttatcgtttcatgaacaaagattatcagaactggtttcaatcaatctggaccatcctcaagggaaaaagcaagctcaaccatcttctgtgtattagatcaaaacccagagacccaaccttcgatgcttgggataaagaaaattcaacaatcatggtgtgactctggaattccaggccccataaatcaacaagaccatgatgtttctgcccataacaaaaaagtatgggatgcaatcaacgaaccacactataaaattaaggatgccgcagtagatttatgacatgactataaagatgtggtccatcaagaaagggaataggtcagtcaatgaatattataatatattacaaaattggttgtagatactggactagtaccacagtcttatagtgaattctagtagggatgcaacccgcctaaaaaaatttgtggaaaaaagattgtgtctattagtttttagcaggattaaatcctgaatatgattgagtaatgattcaaatcttgggaaaggaggaactgtcatcacttaatgagataattttcattgtaactgcggaggagagcgagaggagagtcatgctagaatcccactcaactgatagttcaacttggtgtcacaaggctttaaacatagctaactgcaagggaactgagtcactctgggaacttatcttgtagagtggataacaggaataatctttgatgtatcttttgtaagaagtctagacatacaaaaaaaagttggaaattgcatggtaaacccaatatatccagtaaggaataaggataaagaactactctttagaagattctagaacaaattcatgtggccacctagcggaaggaagaataatctgctgattttattactttcaaagctgaaattgagtgactgtgaagttgattgtagaatcttgagaatcttacaggtacgtggttaataaagcactcaggtacactctcattttcacacgttttggatgacatagataaatcatttgaaattcatggactatagagtcaaaagtcattgatcatatgattaatacttctaaacatatgttccctaatcaagtaataaaaaaattattgcagatgattctttcaatgttattgcaaggaaggaaaacgttaggctttgccctaaattagttctaaaaagtgttacatgttcgtaaattgtatattaataatgtgtcggtcaataagttatcacaaaatttgaactgcaaagtaattttaatattttctcgttttgacttttaggatcagaatttggagaagatgattggatgtgctgaagtcagaatcagttttcactatttggatacatgtgggaaattaggcacctatatttttctatcttaaaggttttttcttttgttatttaagaattcagaatatgagagtttatattgtgatatatatgagtttgccaaacataaacgtgtaacattttctattagttacaaaaaagtttagttccattttcattaatctatattgatatttagagacatacatacctaatatttctgagattcgattatttgtgtcatttattgatgattgcactagagtcatctggttttttttttcttaacaccaaatatgatgttagccatataatccctagttgcccactttgattgacaactataacaattcgaggtggaaaatacatttctgcatgagacctagaataagaaatctatatgaagatcccacaaggtttggttggagaagcgagaaaaaataaggtgtataaattgaaggaggtacgctgtggactcaactgatttccaagagtatgatttggcaagttcgtaaatgtgatgataaacttgggatataagcaggctcaaggtggctacactctatttatcgagcacttagatgtagagggagttataacttttttagtatatgttgatgatattattgtagtagaaaatgatgagaaagaaaaattgatcctaaagcagtgcctgacaagataattcgaaatcaagaagttgggttagttgaaatatttcattggaatttatgtcaccggctcaaaatctacgatcttcatttcttagcagaagtacatttgacttgctaagagatattagcaaggtagatgtaaaccatctaatacttctattgatcccaatcatagattaggagtgacagaagaagatacaccagtagataaggagatgtatagaaattagttgaaaaattgtctcataagagatcagatatcgtctatgtagtgagtgttataagttagtttatgcataaccataaagaagtatatttatagacaaagtataggatattgcatcacctaaagggatcacatggtaaaggaatcttattaagaaatggtgataaattatttttagaaatctatataaatgcagattacgcagggttagttgtgaataaaagatcaaccacaagttactgtaccttccttggggatagcctaattacctggaggagtaagaagcaaaatatagttgctggatcaagtgtataatcaaaattacggataatgacccaaagggtatgtatactattgagataagaaaaattttataagatctaagaattaaatgagatagtcctatgcgtctatactgtggcaacaagtcaggcataagcttcgcatacaatccggtgcaacatgactagaacaaacatttcgaggtcaataaaccctttatcagagagaaatttgtgtgttataatatgtactccatacgtgcctaacagttcacagctaataggtatgttgactaaaggcctaggcagttcaacattctagatagactatttcccaacttgaggaagagtgttaaaggaaatgtatcatgtaaattacatcaaatggtataagggtaaaatgcaccctatataattaattgtacattttcttttctattttaaaaaagttgtatatatagggctgtgatatttaataaaatatacattaaaaccattcttaacatttataaacataaatctaacatccttgttaagtaaactaaaaggttgctcaaagaatatacttattaggtgcttactagtatttcttaagagaaagatttctagccttacattttggtccttcttttaacatattatttatctatttatcttcatactaatctcctctctctctctctctctctctctctctatcttaccaaagacaagaatgacatttttacaattagtactttttgttcgaatatttacctgcttgtttcctaatttggcatttaggtttaagtcgcaatgagcacataccatctttctttcagtgaattaaactggtcttcaagtgtggttgctttttttgtttttttttatattttgagatcaataaatatgcattgttatttctgtagtagcaataatatggagtttagtcctaggttgactttgagccaaaagtttaaggtctactttcattttcattctgttggatcctcttaatgctttatcaggcaagataattgatcaatgaattaatcaagttaacttatgttctcttgttgcaaatttataaaaaaaaattgtaacattgttttatttagaataaattcactttgatatattggaataccgatgtacataatgtggccaatgggttcattatgccaaacaagttttaggtctatgcttacttaaaatatatagttcgacgtttttcattaacatttgtttctctgctcatcttttcttgacttaccagtttagctcggca

SEQ ID NO: 8824 - DNA, 3420 bp, Carica papaya
  Intron number 2 from transcript evm.model.supercontig_306. 7 (locus evm.TU.supercontig_306.7) derived from phytozome v7.0 (chr-ID supercontig_306; pos 31117 to 34536 reverse s trand)
ctactaaactaccccctggtacctttcctgtcaaggtaatttcagatattctgtgtgtttttatattcaatatggttcacttagcaagttttctgctgtcatgctaatattaaacacttcttttagtagttttggctttgttgttgattcaacttcttattgattttcgcctttggcttcttgcctttaatttttttttttaaaaaatatattgagggtctgccattgaagaactcttctgaaatgtgcatgtgttgccaacaataagacttacaaattgtttggtttgctgaataggtttataataggagtatttttttctttttttgagataagtctacagtaggagtattatataatgactattacgttatatacctctataaccacgtttgttcgtggaatcacatttccaatagaattatgatcatagcaaatgctacaatcttgatttatttctagggatcatgaatcaaaattataggttttttgtaatactttgttttaaaaaaattttcgagttaattatactctcaatttgcattactttgtatatcataccatcaccttaacatattaattaacacaaaaacctagaaatatataagtatgcacagtacaacttttaaatatgtatgatggttttgatatactttttcataaattttattaatcaaacatgcaaaaatctaaattaaatgttaaatttatattttggaaatttaaaatatctttttttaaatccaaattttagaaatgtattaactattatataacattgaagaaatttaattatcaataggagttttgtgttattttaattctttgttaatcattttaattattaattaccatgcacatgtattatttaataattattttacactactatgtcgcaaaatgcattaaaatataatttacgttaaatgcaataaatgagtcttttactcatttacagttaattatcaggtttactccaacttcatttataactgaaccaaacatagcgaattggattgtaatgagttattctagttgtgaaccaaaaaacataaggtaattgcaaatccattatgggcttattaaattcccaccggatagctattgaatttgtaaccttgttccacttaggggaccaaacaacccattaagattttttattgagtggtgctgaacttttctttttcttgtttatctatgaatagaaaagatctgtccgaggttaggagttgcaaacttgaaaagtttgttgcccatattactctgctgaacagacatcttttcaaacggatactgtaggcttgctatttatggtttgagtctacaaactgaaccgtaatttcatgctaaaagatgttataatgtaaatatagtcttatcctaggaaattaagaaaaaacacatacacagtaatgttctgctattttgcacaatgcattgtgctatatcatccttgcttttcagaatattcgttaatggcatctttgcatattttcttgtgatctatcatatttattttgatcctcatcttgagcacagctttggttgtaatagtttttatcaagttggttgaagcatgacttttgaggcatctatgtggatagttaaaaagtgagtctgtgtagaaattgttcttcactggagattctccaggtgttagttacctgttactcagaagacttaggatgagattattgaaaacctatatcatactttcatcggtaaaggtcattttcagagtagatgtgcgaacgaatcttgatttttgttaaacctgaaatgtccaaagctgtcctaggtcatctcgcattagcattgatgtttatcatcctgacttcttcctttatgtaaagactatgcattgaaggctctgccttagtgataaggtgcttagacagtgattcatatggttggcacctaatgtttctttccagttgctaaaaagaagctgagttttctatatgcttctcaaatcacaaaattcgtaagagaaatggttgcccttttcattaactgatggatagggatggtgtaccgcaggaatcaccaaatcatgaaatatctaatccagaccaagtagctaggattctgggttcaaatgacatgttgtaatttttctattctagagggtcaagcttagccttataaaaatgtatggcatgcatttaacatttatggtggtttgactgatgttgatctcatatcaaatctaccacatactggcttaaagaccatgaggatgtttagggttgttgatagaagtgcgccaaagtactaggtgcgtacaactatcacacaacacctttgcattgattttaaaaataaggacttacaacattttgtgtccagatgagatggcttatttcaaaaataaatattttccatattttgttaaaagaaaatattcaagcaaataggtaattacatatgttgagaatatatgcattttaactcactgcaccaaaagttagagaagggaggtgctaagcttttctttcttgttttgatttgcttatagcatctaataagcaacctacttagataacaaaataggtaaattgagtggggtgcaagtcaaacgccctctatacttgttatcatgcaagtctagatagtgtttgcaaacaaatttcttccttaagacttatcagttaagggttaggtccgaaatttactatgtgcttaacttttctttcttggtttgacttacttatagcatctaataagcgacctacttggataacaaaataggtaaattgagtggggtgcttgtactctccttttaagctgagtcaaacacgtctatacttgttatgatgtaagtccagatagcatttgcaaacaaatttattttctaagaactttccagttacagttagatctaaatttactatttagcatctaatatattctttttggggatctatggtcatgattgtttgtaaagaggcctctagtaagagacagtcagcttttcttgcgcacttttatggtctctggtgcagaatgatgaagtgccagtgcttgtttcggatcaaagtttctaaagcatggtatcaagttgctgaactaatggacttatctaatggttgataaatggtcttgcttgtgtatgtaactatttggtacacattttgttaataactatattcctgtgaactaagacaaggatcttcctacaaccaaaaggattaaagggtggtttgccctactgacttgttaatgatccacttcatctttttattttttttaaatgacatattatcctaaacactacaatttcttggaaagaaaatgttgtttgtgaactgatatttgtgttctcaattgagcattaatttttgaacattataacaaaagtatatgtcattttctctacttgcaggttgccatcccaattgtcccaactattcgagttct

SEQ ID NO: 8825 - DNA, 4047 bp, Carica papaya
  Intron number 2 from transcript evm.model.supercontig_87.1 06 (locus evm.TU.supercontig_87.106) derived from phytozom e v7.0 (chr-ID supercontig_87; pos 832804 to 836850 revers e strand)
cagcttttgctattgcagtggtcttggcttgtgttgtatgtgctttctgacttctctctaatgcaatcctgttatgcgacttttcttcatcccctatacagtctctgtttttaaatttttgtgctcaatatagatacttctgtttgcatattttgccttttgcttttattccgagcttgatacggtcaaaatctagtatgattctatgtagtgatgaatctaaatacattcttgtttgttgctgttttgtggttcttgtggttggagctaagctagaatcctaaaggattgttaccttttcaccttgagccaattccaattcaatttgccatctacttgtttcataactttaatttgagatgcagatcttgttctagaaaaccaaaatacctacatttatagtgggtctgtttcagcagaataaatccatgaataagaatatttgtcatctgtaattgaaattacactggtaggaataagctgaaatgtatctcaattgggtcttgactatagtcatgtttctttcagctgagtaagagcttgattcagttctccttctaaaagacgtgattgcaaataaaaaaacatctcctggataatctttacgaccagatagtcttcataacagaagagacatttgtagggcataaatataaaagacaagacagactaaataggaaggtgaagttcaattaaatatgaaattttaattagtattgaatttttaaatagttgaaatcctaattaatattaagttcttaaataatatgtaattttccattagtattggattcttaaatagtatagaatttctaataaattaatatagtatttttaattagatttagatttctaattaaattaaaatttataaataagaattatgactctatataaaaaggtatgcttgctattaataaaaacaagtcagaatattagtttaaactataaggtttgagctctctttaacgagatcaaaagtagcagctccctttgatgaactataatatattttcacaaaataggtctctctcgcaataaaaacaagggtgttaactctttgttagatgacgactttgttgttaaccgcccaatgacaagatcttggtcccaaaatcataatactggttgtccggaatgatcatcataaatgattacaatgtgttgtggcaccatgcagttcgtccaacaagtcatatatgactagtattggaaaggggttgtggcttggttggattatggagctatctaacatttgggcaacttgcctctctatctctgttttttaaaatatgggtacctgtatggtttgatatttgcaggtgtggctcctggaatgagaggggattgagtgatcatgttctcttgcgggaggcagtaagttgggctccttgaacacttcctagtatttctagatctgtgacctcaaggcttcttgttctagttcttttgggtggtcatcatctttctctactctctggtccagtatgtctactgagcgaatcacctgactggctcctctccccactgtttgcgcaccacctgcgccaattttttttttgtcatttcttttaaccttacctcaccctgtactccttgtattgttatctgttcccttatttgttgagagccacttgtaacttgtcaaagtctagcaacaccaagttgtacttttccatccaatccgcccccgatataacatcatagtggccaaggttaataatgtgaaaggagtacctgaacttttgtttctgtagcacccagtctatttaggtggttctatgtttgcataactttccttgtccattgactaccatcacatgcaaaggatgagagtctagcagttttgctccacaatcttcagcggttttagcatccatagaggaatatgtgcttccactatagaccaatatcgttgttagtttagagttgactgttcctcagaacttgacagtgccgccattgttgtgcccttgcatggcatggagagaaatttccccagtattctcctcagcttcttggttcaaatctaccactttgtcctcatcttttccttcagatgtccccaccacatatggctgttggttttacagatatgacctgggtaatatttctcattgcacttgtagcaagaattgtttgggtgtttattttccatccctcccgtcctgacaaggctgtggttagaaggtggtagtttgttggcctcataaaaggactcagtatgtccatggatgatctggtcccaggcttcttcatcaatgcttcaattagctaagcttgcttataagctaagttcagtatttggggcttgaagatcttgatggtcggcttcagctcctcttttaacccgctaataagagaggaaataaaatatgcttcactcaaggtagggtttaccattaatatgagagactgcagctccttaaatttctcttggtattcagtaatagcaccttcttgcttaagcttgttgaactcctccaccacgtcagtgatgggatccccatacctcctgtatatttcttctttgaagcttgtccgccccaggtgatccccttgttgggcttgtcacacttggaaccatgtgtttggtttatctcccaaaaataagagtagcaaactctactttttgatcctctggaactccatatatctggaatatttgttacaatgacaaaaccatgcccacggggtacttcaagcatgagaatctccatacaaagggtgttataccccagagtcacgcccaatggggaagctgtgtggctggagcttcttgtttccttcccctctggagtgagaagtaaacttttagagggtgctaggcatgtggatgttggcttttgacgtgaatttggaagcgggtttgaggacatgacaatgggctgtagattcatgctgaggaagtgcatagtttccattagtagattctgtagctgataattgttttcagccaattgcgagtcaaatgtgctgtatatgtctgacatgaaatcctgcattcattgctccaggttctttacagacttttccacctgtgccattttttgtgtctttcatcactgcttttcctctgtcctttgccaggttcacagctgatgaaggtaccactaggttcagtcggttctgataccaaattatcaggtttgtggttgatgatctggggaatatggcttgtcggagaaatagaaatagaagggagaaggttaggagaggaaatctgtgggagaagagtaagagaaacagagagaaaaaggtgaatacagaagaatgatgggagaatagaaatgcttaaatatttttcttatgcctctctgttagaggtacaggtatgtaaggaatacctgatgatacattctgttaggatagctggcattccagctaataattgtaccaagtactaccctgcggtacaaaattcaaaaacaaaaaacaatctttaaaaggacagaatactcctactgccattttattcttcctcctaactactcaacggttatttctttttctttcctgcgcccttttcagtcttgacaagtgctttgaagatgtctatttttctttgctacaaagaaattggagtgcaatctcacgtcgattattttccttttcttttaggagacttttcaagggatatcttgttctttttacttgtatttgttgtccttctctttcctaatgatacttcttttctattaaaaagaataatgttctaaaccatccagtctatatacttcaaatcctcagtacatcaattctgaagaaatgcataatgtagttgcactttcattccaaactgcatggctgcctggtagaacccagttcaatctgcatctggctgtagatcaatttttttaaatattaagtctgactgtagatcatattaatttctatttttcttcaaaatcattgaattatgaattattggtgttcttttttatgctatatcttttagtaagttgaagctgtttcagccagctgaaaatttatgattagtcatttgagaaggtgggaacgcttaaatatcttgaatatttacaggtg

SEQ ID NO: 8826 - DNA, 737 bp, Carica papaya
  Intron number 1 from transcript evm.model.supercontig_112. 58 (locus evm.TU.supercontig_112.58) derived from phytozom e v7.0 (chr-ID supercontig_112; pos 487634 to 488370 rever se strand)
gactgaggaggagcacaagtaagtttctcagttcatactatacttttcttcttcagtattaatggtgggtgtttgtcttatatatgttgtgtaaatatgttgtactcaaaagtatgttaaaaattactgcatcttacttgtgtagttatggagtgttagttatagattttgttagatttttaagctattaacttcagttattctttgcttatatatataatgtattttttatatttttttaaaacattaataaacattctttttaatgttttatttacatattatttacatattactgctctataaatttcttctatttgttttaaaataatactgatatttgacctgtttgaaatatgaatgaactacatattctttttaattattagaattgattagctaaatgaaataatttttcagttttattgatatttagtattcttggtagaaaaattttgaatacaccaacttgatgtgagaaaatttgttcttaagattaacttagagggaaaaaggaaattctgaatgcattatctcgtccaatgtgaatgaacaggttttattaacgagaaaaatacttaatcacaggtcttacataacactattcattgaaagaagatttcttttattgattttttattttgggtagttgatttattgatttttttttatttatttatttgggttgtggtgattttgatcataaattgttcatgattgtttgcaggctatttctg

SEQ ID NO: 8827 - DNA, 6865 bp, Carica papaya
  Intron number 1 from transcript evm.model.supercontig_32.1 37 (locus evm.TU.supercontig_32.137) derived from phytozom e v7.0 (chr-ID supercontig_32; pos 1727601 to 1734465)
cccaactccgccagactaccagaccagaatcccttgtacgttgttcctactctcgtctctatttctctttctactgcgtctgtttgttcttttctgtttgatttgcgcaagtgcaggaaactaagtgtttactcccctgtttgattctctagaatatgttttaaaaagtaaagtagaacggaaggtaatatggaaataccttcttttcattcttaaaggtacttgctgatcaatttaccgagggtttcatctttttttcctatgaaataaaaattgaattatatttatggtgttgcatacatcttgttttaaagtttcttgttttgtgtttgtctcatattttccagcaattagcgtttgttcctgagcaaatccaaattattgtcagtttgtaagaagacagaagattgtgcggaatttatcacttaataggagttgaatatgtggttagtgttaatctcaagtctatcaaaactgtgtgttggtttatcagtgaaaaagaattcattacttggtacaggcagagttcaaacaagagtaatacctattctcaatcctgttttaactatacctattctctaccctgttcttggatctggctagattgaataaagtagggaattgaaacctgggaatggagtcccaccaccaaaagcatcctaaaaccaaatcttgttgcctgtgccaactttgaagaagacacggtaatgtagaaccaagaaagcagaagtttaatgggtaagtttattaatctatgacaaatagaaagatttaatcaactcaatttccttttattactataggttcttccgtatcagtatgttttcctgtttggttgatttgttaaggctatctacaaactcaccaaccccacaaaacaaaggaatctaatacctccaacgatatagtagtgggcttgagttggcataataacatttgttaaattacagcaggtaagcattttttttttctttttttttgagtttaagtaggtttagatttaatggttggataaaacttgttagtaatcggatcaaaggctttcaagatagcctctgaggaaggaggtaggtgttattgcttgagtattgctcaaagaggaagacaatgtgacttagaacaaattagggtcatttgcctgcataagagttttgggtcatgaaaatctaggcattgcccctaagtttcttaatatcacacctaagaatttattttctctttaaataaaaagatatcttattaaaaacgaagaaaaaagaatggtagatagaaaggaggattagatatcctcacttagagaaaaagaatagaaaatagagaaaaagaaaaaaaaaggccaactagtgttgggaaagaatagctaacaaatctctatgtaaaagaagacaaagataaatgtttcaagtgcccatgtgccttagtctaaatggaggcaaagaaagactatccccaaagatcataaattgtgaagagtaagccctaaaaattattgtgcttctctgaatccaaatcatcaataacccaacaaagaatgaaaaaaaacaaagagcttttgcatctttcttcaaattcgaacacaaaagaaaaccctcaattgttttttttttcaactaacaagaataaaaagtataaatagcaccttatttaaaaaaaaagttataaacagcaccaaggagatgtaatcgatatacaaaattatttatttttctgttaatttatctataatatacccaaaatcctccttgtgttgcccaagataaacggaaccaaaatagtgaaaccatttatctctaatctttaaccagtcactaaccaccccatcaaaaccccttttatttattttattccaaataacccaaaaaacagtcaaaggaatcatattagtaagtcttttgttttacaaatactctctcatgcctcaatctcatctttaaccgatcccgacatcacccaactaactcccaaaaggccataaaccatagtccagatagaatatgctgcagggcacggtaatagaagatgtttgtaaggctccacctcctgcatgcacatataacacccattcaccatcactctgcctcttttcataaggttgttaatcgtcagaatgcgttctctgcatgcctcccaagcaaaaaagacaacttttggcggagcctgggccttccaaatccgtctggcagggaaacaaccgaatctactatcaccttctcccatcaaaagctcataataggaattgaccgagaacatcctgttcttcctatgtttccaaacaagctgatccctctctataatcatattcacctcagaaagcaagtggagaagctcagcatacttggcagcctcccagtcgttgagattcctaatcacctcaatacaccaaccccgaacagcacttccatcttcatacgccttctctgcagaaatacctttctccacagaaattgtaaaaaccctcagttgtgctaggaagcccaagaaaaacaatgtattaaacaaccaacattgaattctccaggttatcacaatgtagaaatagatggttatgaatctttcaactctaaaaatgtcacacaaatcccagaggctaaagcatgattaggttgtcgagcttggagcaaattataactattcagcctatcgaaaccatatttcagacaaaaaccttaactttactgggagaagaacactttaaaacatatattaaaaatgtcactatgagaaattggattatgagtcaagaatttacagtaagatttttaggaataaaggcctgagggttgcagagagcagatttcacgataggattattggaatggaacaacgttatcaagtagctgagttagagaagttttattatcagcttcccaatcatttagatttctcaaaagaagacatatttcaagagagagaactgttaaaatattattgaaacaagaaatgttggcatggtgagtttgggacaaatctaaagttgagggaaatgggctgctaaaggaatattttcaaaccaaggattgtcctagataggaaccaagagccatcatccaccttcattttgagcaagggtaagatttaagaaagaatcactgttttaagacaacttaaggagccataatggctggaaatagccatcatccaccttcactttcctcgttgctgttaaatgccaaaaaatgtgaaatactatcttcaagcagagtctcttacttcttaaaatcaacaagaacaatgtcattttcaatctcaatatcatcattgcttataactaaattaagagattcatcgctagaaaactcaacttgatcagtaagaataataacctcgttcccattctcttctactatctcaaataccttatttctgtacgtaccttcagtaccattagttaattcttgatcattaagttgtagtacttccataagattttgcttatttaccaattcattcacttttgcatcctttacttgttcttcatgttctatggacgtttcagatatgagaggttcttgtgcaattgaagattcaagattctctacatttttcatttttattttttacatattaatcttatcatttaaatctgggataactatttttatatctttaaaactttataagaataaaatgtgtcaaattgctcttattacttattatctcttataggggggacacttgctttcactattttagatatcgaaaaatgatattgaagttctattctataatatctatcatatgaaaaatattcttgaaaagaatctcgagtccaactagcatcttcacaaaattcatgagttagaaaaacttgcaaccttgaatttcgaactaattttaattttctccgcatatccatattaatcaaaaagttcataaagatcatcttgagtcgtcctttataactgaactacatacgcgatagaacgtaattacaaatatatgatcaaatatattcatgttttaaatccatcttgaatttctctctaactccaagcaaatttttgtctaaagaacttgcggaaagtgaatataggacaggaattcaaccaaactaagctcaaaaattagaagagcacacctaagatcctttagagctggtataagaatatcgagaactaggttggaggtgactagacaaggacagactgggcagaagtggggttgtattttgtgaagttagaatgagtaaactaggggcagcctgatgagtcgagtttaggctctgatgcaaactgatataggaaaaaaagaggttaaagatcaaatttagagaaaatttctaaagaatcaaacttggagatctcgaatctcaataattaaataaatatctcaatattttttttttaaaaagaaatatctcaatatttgaatagttgtcatgaatagcataaataggaaaaaatttgtcgagaagtataggcaccaaatataagaaatatctcaatatttaagtactgagctaaataccttattataagcaccaaatacataaaaataagaaatctaggaatcctagtaaataggaatataaattaaatataaagaattagagaaataggaaatctaggaaactttagcataatggattgagtttgggctttgagacaaattgatgttaggacaaaagagcttgaagagaaaacttggaaaaaatttattaagaatcaaatttgggaatttcaaatctcaatagttaaatcaatatctcaatttgaataactggcatgaatagtctattttataactaagctatgaatcttatttataggaactaaatacatcaaaataaggaaatttagaaaacctagtaaataaaaaaataaggtaaatagaaagaattaggcaaatatgaaatctagaaagtaggaaaatgaatctttctattttcttttattatagaattctccaaaaattgaaaaatgactttaaatcttcatattccttttagttaacttcgaaaaatatttatgttcctttattgattctatctcatatctcctgttattaaactatgtccactttaagagcttcatattttgcatcaatgagctaaacccaaaacgactctaaaagagtaattttctgttattaaaaagagtttctttttagaaatttacatatctcggatctctatattcttttctaaaatgtcaaaatttccattcctccccccccccccccccccaaaaaaaatcctataccatcattatcttctacatctgaaagtgctgcaaaaccaagcagaaaatggctagcaattcaagcagcaagatgctagttaaagcaagtcaggaacaattatgcataaaaagaatcctaatcatagagaaatgaagatcctacagtctttgtttaatgtccatgccagtcttgatatgtactttactggagccgaattgggaaaaatattgaattttaaataattatgtggtaatatagaatagggaattaattttgagaataataaagatatgggggaggaatctggaaataagagaatagcaaggatgaaaatagaatctagagaaagtttgagagagaggggaaagagaaacagaaaaattcttatggatcgaagagcatgaaaaattcttggacctagctatttctgtcctccattaagattgggagattattacttttggcccataatttcttagatgtaccatatctgttttaatttttttgctccctatagattgtaacatgtggagggtatctttcttttgattgtactcctctcctcttatcttactaaatcatcttttattccaaaaaaaaaaaggaaaggcagattttcagaattttcagaagaaacagaaatttggagatttgagaattttttataataatatttaaaaaatgaatgtttaatttgtgaacagttctttttgcaacatgtgtgaactatattatagacattgtcttaaaagtacaagatggtatttggtacaattgctaaatagtgcggttattgtaactttattattgttattattattattattattattactgatacagtgtaaaaatgtttggaatttaagttagagtttcatatttaagaacataaaaggatagtttgtttttctttttgtttttgctttttttctttcttttaagaacattgctggcttgaagaatactctttatgtctgcatggtaattaagaatcgttttagtcacaacataagatatcttttcaagttttcctgaataatcttttgttatttctcacactaatattttatgctttcttttccatggcaggactaatttacatctcaagaacttaagaaatacttgcatttagttcaactataattcgatttctagtcaattcttcgttctaattctcttattagtcttagtatgtatgattagaataatttgttgagttttttacaactgccttatgtttaattccttatgatggacactcagttcctatattttcgggtgggtgttgaattcccgtaactaaggaatttagggtgggatgacagtacctcaaatttagcattgttaaaaccaatattagaatcataagtagaattgccttatattacagcatgattctgtcaaattagccatgatgaaagaacccaagcatcattatcctaagcaacatcatttatattcgtgttttgcattgagtagccctcatgcactgttagcacagacacggatacacattttttttttcatgattttgccattagtcttggcttccatgtttttaatatcttgtctgggatttctgtgccaagtgcttttttcctaatttagtggcttcacgtattgctttagcaattttttttccctccaattttaagacatcttagtagatggttttatgaatcag

SEQ ID NO: 8828 - DNA, 1697 bp, Carica papaya
  Intron number 1 from transcript evm.model.supercontig_8.13 8 (locus evm.TU.supercontig_8.138) derived from phytozome v7.0 (chr-ID supercontig_8; pos 973535 to 975231 reverse s trand)
cgctggtacgctcgattttcttttctctttgtgttcggttgtatagactattgggggtacttgattgtgttcctgttctttgattattgaaaaaaggaagatatggacattttgttaatagtaaagcttaggttataatggaaaatggtaattgtagttgtgataagtttgcagtgcaatgatgaaattgcagatctagtcctatttcggttagaaatggagtgcttactttgtgttgatggtactaggcacatagactaggaatgtggagctgtaatttgattttccgagaacatgattttgtgaacagggagcgagcttgtttaagataatctaaccagtcaggaatctgagttttttatagggtttatttaaaatattcaataaagaaactgaagatccctgagtctaaaacatgtcaagcattttggaaatgatacgttagaatgtaactttatggaagcagctaaaagaaagcaaggttgcccagacacttcacagctattgtaacttcatgagtagaaatggaggctataatgttgtaaaattcagtctgcatccctaattccttgttatggatagatataacaagtattattattattattttgagagagaagagaaggagaaataccattaaaaggcaatgcccacaaacaaaaattacaaagataagagaccagaaatttacaaggtttcccaacccatctcaccaagcataggatatctataagcaaaatattcagggtatggagccagtgatctctaatcctttgaaaaagagagcaagtgccctcaaaaactcttgtattcttctccttccaaataacccaaagagaagacttaggaatgagattgaggaattttttcttacatttagaagtgtatatgcccaaccaagcttaattttcttcagcaacggaacccgacacaattcagatttaaaggtttaattgcataacacctagggtttcttagtcattaaaggtttaattgcatcgcacaaccagaaaaatgagaaattctcagaatattattgaataattgaataatcaataagtgaagttacaaagttattttaataagctcttagtaactagaattgaagtaagaaatagtaaactagtacaattagggatattaatcctaataagaataaaaaactaatactaatgataataatactattaattctagtacaaataagagaatactaatataaatactaagtcagtgaaactatagtaattgtcctaaataatataaaatagactcctaaatagtataataattttacatgtaatataattgcagttcctaatttatttaggaacctagtgctaacccactttgtatcatattattactggaggcacatttggcaattgtaatgaagtatttgattggtactaggtactaaaacaaatactattcatgttgtcctgacttaaaatctacttttaatgcttgtatttttgcatttggattgagttccacaggttgtttttcgatcaatgaaattcatctttacccagaagaaaataatttcattttgttgatatcgtgattagactgatttttgtctttttaacgtgttgtagcttatgatttatttttcttaaaaaaatgtgttgtagcttatgatatttaacattagggtatacatgcaggcatttctttgaagactcaagaactct

SEQ ID NO: 8829 - DNA, 2241 bp, Carica papaya
  Intron number 7 from transcript evm.model.supercontig_1.19 5 (locus evm.TU.supercontig_1.195) derived from phytozome v7.0 (chr-ID supercontig_1; pos 2903128 to 2905368)
tcaacatcattagcaagcttgatcaagtaaatcaggtttgtgacaaatccatactttctgcttgagtggctcatctatcacccccttgatagatatgtgaataaaaatctttcttgcataagaaaaagttaaatgcccttgtggtgattaaataccatgatttgctgttttattgttttacaactgtttgctttctgacctgattttttttttgagttgcctaacttgatttattacttggattaaatggctattttatggaacctgatatttgtgcagtatttcttagtccctagaaggaatgatagttgttgagttggatctgaactatcattagaaaatccaattttttgaacgacaaatcgtagtggctcgtaagattcaaaacatagtttattaaccaaaatctactgttatttatatgtaattttttaaaaagaaaaaacattgaaaactaaattattataagaaatttatactaatattgttttcaaagtaaattgtgtagatgttgtattttatgcttcaacaaagttatgtaatgtttaattaaatttaattttaattagattcaagggaatcataaagcttcttgcctagcccaccatattaacatacacaatcctagctaagctttagatcaaatcctatttatatatatgatatatcatatcaatcacattaacatatggacaaccccggcacctcattttgtgtgtgtgtgtgcattccagttcttatggggaaagtcccttagagcttaatgttttccattattacacataaaaggaaattgagaacagacaaaaaagaaagttcaacattttaacagcaaaattttctattttacttttaattatctgatttgctattttattgacattcaatttttcgacatgtgacccaaacaaagaagaaaatatcttgattttcttttcttctatcttttccccattcgttttgtaattttatctacacatagagtaaagtaactgctgccatttggaaaaaaagaagcggagaaattcaatggtacctactataaaaaaattatttaatatttttaccttgtccattgcatattaataaagcatacaatagaaaccggattgacttagtcatgatggttacttctctgctctccaagatggaggggggcggggcttcgagactcttgcttgatgcctcttcatcaagtagggactcattgtttgaatcagcgttcagttgctaagattgtgcatttgtaaatatttaataaaatttaaaacctttttttattgccattaaaagattgtagaactttttgttttgtctttcctattaagatgaaaaaaagttaaacgtatatgtttataaacataaaaactaacttctgacaataatatcaaattttcttaccgagaaataatttcaaagatataatgttgagttgattgagcttggttgcaagtttgtaaacaaagggagaagcttctcaatttcattcgtgtgtctattttgtgggtgaaagaaagaaagaggcctatttttaacgcacttgctctccttctaatataattagagactttggctctagtctctgagtatttgtaaagttctttgaggctgtcaggagctgagctttaactgtgcatggacaataaaagctttacgaatcagatggtggtatatggttaagtgtttattgacaactgtaagacgggagaggatacggtgggtttgctgaaatatagttagttgagaagatgactccagaacggattaattccaacaaagaaatctatttctgatctgcttaaaagaatatctaatgtataatccttgcagtcctttttctcctctaaaagatcattaagagggtatttgagattgttaaaagaaataggcttgaagcagtaggatgcttttaagttccttaaagcattagataaacagttacgtgttcagataaaatgttgattgccaaataaaaaataaataaattactttgttttacaaaatttttaagaaaaatgtatatatttattacagtattttagtacttatcaggtactatcacctaattgtaagaggatatcaaggctgttattcatccataaaagattgatgtttatttgcatatgcttgattcttcttttgtaaatcttatacacgtgctttattcctcttcaagtaagtgatgctataatattcttaatggcaggttatcggaattgatttgctgtcacaatctttatt

SEQ ID NO: 8830 - DNA, 1589 bp, Carica papaya
  Intron number 6 from transcript evm.model.supercontig_327. 5 (locus evm.TU.supercontig_327.5) derived from phytozome v7.0 (chr-ID supercontig_327; pos 29828 to 31416 reverse s trand)
tgtctgtttttctcaagtgtttcgtgatcgtggtggtaagtgggaacaatttggtgtagctgttgtttgcctatgctctttggtttgtgttattagaaactgttaccaggactattcagtcaagcagaatacttgtcttatgattgcttcaaccatggcatagtgaagcttatattgggagattgtctggagcatacttcgtatcatttactataaaaaactaactaataccatatacatgtgtcctcaatttttgtcaacatgacataggatatatatattttcaatctattaaacttgtaaattaatcatattttaaacactagatgaaacaattatttgctttactggatgttttttgataaatttatttctggatcaacttgaagagaggataatgctaaatgggctaagtttaggttgccttaatagattagaaattttaattctttttaatataaactgttttaaatttagaagtctattattataattttagtaactttgaaattttattctttatattatttagtttcttattgatatgactaatattatttccaaatcctactagtatttatattttgtagtttaatcctatcaaggaaatgttacttaaaaagctttatatctttgtaatttattttttgagacaaacttcagttaatcaatagaatatcttgatagtttctcaaatttctggtgtttttctggttatatgatgcaatcaaactttaaccatgatgctcaagacttcttagatataatgtttgagaaacctaagtttgatgtgtagttttttgttctcaaatccctaggtagatagatcaaccttaagttgtcctactttggagggctgagaagttcttcacaaatataatatattaggttacagcatatcatgcaatctctttgatgtagggtaataagggtttgatctaagttttcaaggtagtgaaaaaatagaagaaagttaattaaaaaaaaaagaatacttctctaaggatacaacagaaactcaggactaaagggaagaaatataaggaacagatcaagcattaggtcagagagaagaaaatgcagagaatgaatccctagtgcaataattccctattcagagctgttccctgttctctagcagcctttcaataggcactaattgtaatcactgaggaaattatctgaggtcaaatccttaaaaaaagagtgttatcatttcaatgttgcctaatataaaatcattttcatataacttcttttcattctccatcatgttaattatggatttttatgatcagttttacttgttcaacaaagttgattggtcataggagttaatttcaatttatgataaattgaagatgcaatagctgcttgagtggctgcaattgtatgcttaagctattgagttgatcaactttgatatcaaaagttttggttatagatatccagataaattcgaatcacgtaaaatatgttactaattacttgtcttcatttgaagcagaagttgaatatactgttttgcataacaaaggtgttatttgacaacttactctctatttccatctggaaatatctttgcaggc

SEQ ID NO: 8831 - DNA, 3278 bp, Carica papaya
  Intron number 6 from transcript evm.model.supercontig_85.3 2 (locus evm.TU.supercontig_85.32) derived from phytozome v7.0 (chr-ID supercontig_85; pos 204035 to 207312)
gtgatagaacacaacaggtgagttgcttggagatttgaataagattcattaacaaaaggagtaataggattttatgttttctattctttcaaattcattttgttcttgtgcttttgttccttgttaatgagcttaaagtcatgtttggctgtgctggtatgctttatgttagcctgactcattttagcttgagtatgatttttgcatttgcttagtattgagtgcgttaaaagattatgaagtttgaataaaagcataatatgagttcaaatcttccatttttttacaagagcagaaaatgtatttggtaccaagtggttcctgatagtacacataagctaattacaagcacaaaaagatccacgggttctccttcacttgtcagagtgtgggttgtaatccaaagataaaaggatatacatccaaaaatctctaaccctatgaaaagaggttcaccctattggaaattcttttttcatgcttcttccaaatagatcgaaggatagaaaatgtaacatactagaccgaggacaccatgacaacaaatgccccaggtttaaatgttttagactgtgctctttagtcaaattttacaatattttggtgcttttcacattagtttcgaaacattgtgaaagattaaaaaaaaaatcaaacattttttttcttacttgttcaggtaatctgttttctgatttcccacttgacacttgataatgactttaattcttatctcttgtaagtgaaaccaacttagttgcttggtcacatttgagtgactactagttttaggcagttcgattcaattattttgctgcttcagaaattgatgttgtgatggaatggctgcaatatttaacaggagatttagttatttatagtctaattacactagcaacctctattttaggttatgctgtgattacctccttgactttaaaacatacacgtcaaagaaattataaaattagttaactatcttgctatatgtacaatatcaaaatggttgaagttaaattaaagttgtaatatgttttttgactaaaataatctattttgtcatttgaaaacatttaatagatttatgtgaatagaagatttaatgaaataaaattttgcatttttcatcaaatatgtattgattaatatgaaacaaattaagtaatatgtatatctttaaaatacaggggataagtgtaggatatgctaaactaggaggcagttaatgtactttacatttatttgtatagtgccaatttatttttgagagagaaaaggaatatttttttagaataaaaattaatgtagtttatataggcaccaaaagagtgcaaccagcagacaaagcttaacaaattgtcaagatatcagttaggttctcaaaatcctcatcagtgtaaagaggatgatccttaaataagaaaacctgggttttggagctaaacatcatggattatattgaaagaaaattctctgtcatgaaaaacctttttagttcttcattccgaatgacacataaggtagccagagagatagggcctaaattctcatcgtagtgcttatccccatcgaataccttcatacccagatctcctatttgaccaagccaacaattgcacaaatttaaccctgaaagtctataggccatagaccaaacctgctaagagaaaggacaccagaggagaaggtgattacccgactccacatctttcttacataaatagcacccatgaacaatgactttctccttttaatcaggctcaactatttctaaaatacattcccttgttgcttcccaagcgaagaaagcaactctaggtgaagcattgttttttcaaatcagtttccatgaaaatttcacattgattattccactctttgctgattggagatagtaggatttcaccgaaaatgtcccttccgatctgagcctccaaactggcttagccaagatatcttttagccgtgcacattgggacaaacactggaacaaattgacaatattcacttactttccggtcatggagattcctggccagttccacccccaaacactttacccaaggagttggcaattcaccaccctcatttcgctgccgtttcctctttgttatgagctaaggaataagttgtggaaaaacgtttggcaagtgcaccaccctcattctgttcatccaaccaaaaactcacccttttggccaattcaattttccaccagatacacccatgaaaaccctcccttcccatgtctattttctttcataatcaaatcatcatactgacatttagtgcttctagaatatcagtccttactttctgttaaaacttggctttgatcactctccttcaaagatttttgtgcgctctcatgaattcctatagccacttacgctacagtgctttgttgaattcaaccattaatctgattccaagatatctctgaagcaggccttttttgacatcccaagtcaccaaatagaactgaagtcacccaatagagactgttgctatatagccttctgatttttttgctatgctcaccagagtagttaatcatgacaagtgatagctttaattccttatttaaaaaataagtagttgcacgtttggataaaatactaattacaaaatatttttataagaaaattaataaaaaatatatatttattataaatattttataatttacaacgatatatagtggatagtgagtgtaaaagtaaattcgttagataaaaaaataagtatataaaatgttaaaatttaggtctttattttttacattcttaaaatcacttttaagaacctagtgagcacactttatcaaacatgaagattggaataaagtgcttaaagctgcttataagcatataataaacaaatcccaaacacctttaagtttgtattgctttgtggtttgtagtttatttcagcgacatgtgccgttaatttatgtttaatcacgtttttaactgatagttttgattcagattttctgagaataattttagctcaattaatgctttggttgattccaactcattgatgggtaattggcacatacttcaaacgagctgagttgggtgacccacttcaatttttgcatctcatggaccttgatttggaaaacatccatctcagcagtaaattcaaacctgaagaaaaacaggagtcctcttattagatattttatcctacggtttgtgtttattatattgtcaggcagcaacgtctttgacatattaatcatatgattttatctgatccaggaaagagaa

SEQ ID NO: 8832 - DNA, 3813 bp, Carica papaya
  Intron number 2 from transcript evm.model.supercontig_29.1 34 (locus evm.TU.supercontig_29.134) derived from phytozom e v7.0 (chr-ID supercontig_29; pos 1291205 to 1295017)
gagatacaaagacaaaaacatttcagtggttgcaggtgagaaaacgaaaagaaagactttttttttttttcaccttttcacattttcggtttctgaggtattaaaaagttttgatcttaatctctttatgaactttttaattttatcttattttgattagcaccagaggtgcgtggggtccatcccgggtataaacagggtaagaaaaggagagaaatagatcaaattgcataagtttctgggtgtctttttgaatgcttttaagggacattatggaatggaagtgactgtgtgtttttctttggagtgatttcttgtttgactctaggcctttgttagtggggtgtgccattgattgctctctctttatttcactatgaagttttttttcccttctctctttgagcggctcacatttgctttctctctcatttgtgttgtgggcatgtgcttggatccgatttgggtggatggtggttggtgatggatgcccaccttgttaagggtggacccggagatgatgtgagctctgatccggctgatttgttttggctgcattatgatgtgggttacgcatttcacactgttttaagttttttttttataattattttatacatgaatatatatccaggatttctgattgaatttgattgcattgtggatggagaaagtaagttgcatttttgttgtctttttctaatattcccaggttggttttcttgggactaaacggtaaaacacaaagttactgtatactaacttaattctgttttcctctctgggaatgcactgtttgaggtgcttggatttgatttttttgataagaacgcctccgttagaaaccaaggtttctgttattggtaaaataaatggtagaatggttccatcctggtaaaggaaccataccatgacttaatctatttataccatatgccgaactccaatattctgtcgctcattactcctccctcttctccccgtggtgactcaacaaatttcttaaaagttgaaaaaagttttatttcctcatcatttggtaggaccttggtccttattttattgtattctttcaattaaaaacattttagccaggattcatcatccatgcgttttgtctgtcgtgtggtctttagaatctgtccctttgtgagctcatgaggacacatattgtcttcttatgctttggaaaacctttacagatgtttggtactctcacatggaaaaatgcaggttttttttttcttctttccttgagagataatagcatcttctttagcatcttctcatcagtagtcaatccatttgatattatcctgtggattacgtctagtgcatgtgcttttaagataagattgttagaagactcagtcctttttattgggcacaccccaggaatatgttgcgctctagaatttgttccctgaagctttagacattatcatttgaaacaggagactatgattatgtttccttctttggcaaaactgtaactatcttctttcttttacaagtcacagttcatttgaaaaaattagttaaccaatttatagattttatttgctttccagacttgacttaaagcggctattggaaatcttcatttttaaattctattaacatgagagattgaaaaattttcaagtgataaatatctgtagaatttcttttttgctctctcatcctctgctttcatcctgggaaggaattcttttttgttttctcatgtccatgacttagctatgctttaaagttacttctaatctgacagaaattctgtctgattctggttgacttttttgatttcattttacagctctttaagaagcacaagtgtcagtattaaatcacttttcccaataagaaaattatctgtgcaaacatgcctccatatagttgtcatggctagggatcagtcaatcagtaccatcactgtgctctaacaaggagatcaagttcaatccttctgctctattacatcataactaacaagagaaaagatttccatcattttttttttctgagaatcacaaacatgaaggagtataataggtttgaaatcacataatacttgcaaatgtaaggacatatatattcttttggtaaaagaagaaatatatgattagataatgaatggagaagaaaaagaattacattatcagaggataagagatcctctaaatgaaaagaaaagaatgacaaaaaaaaaatacaaaaaggtaagtcgatatctttgtaaaataagtaaaaagaggttcctaaaatgacagtggtgcttagcccaaaagatgccaaaagaagttaatcctatccccaaaatcaatgaggttgtttagcaagagcctccaagaaacctagcatttctctccaatcaagtcgtatagaatcaaacaaaaatagccactcttccaagtattttacactccttattcttaccaaaaccatggagggaggttgagatgaaacattcaagagatgggggaaaatgtaaagatatattaatttatcaatgtgcagagaattattatcgaatggttaaaaaggttttgataaacagcagtacatggagaaaaacatgaaggctaaaacttaacatgtttgtgacatgtttgataatgtacaactatgatgtcccctagtagtccaagaatgatctagcatcctttttattctcacattttacttcactggagtgttgtccttgcacaaatttgtttactagctataagttgtttcttttttttttttttggtttgagaaaaataaataagtaatatggattttgattttgagactctggtgaaaattcaaccataggaaaataacaatttcgtgagcatttccatttttctccttcatcatgtgaatactctctgaagcgtgtaaaaagaggaagaaaactaaataaaaagagtaaattaggtaaaagagaaaatataaccttatgcagatagcttctgtgtaaatttataattatagaagaaaagttacaagcagctggaccaaaacctattgttactgtggagaggaatttgtgtaatatatcaaatcaagtttttctaaataagttggctattgaaatttatatactcctataatacttagactaaactctttatattaatatcaaaatgcccctgtaagaagaaggtttctgaagataagttttggtgaggttgcattcctgtgttactcccaatcaaatctatgtggatttgaatcggctgctggttcataacttggatttgatcacattaataggacaacctgacccttgattatgctgttgtatttacagccagttgcgtgtaattcatcttgctgtatgtagattctgtgttcttaacttggttatatttgattctcatctttgggtgggaggacagggattagtgtggctagaagtttaattgagatctatgcactgtggaattcttctttctaccagttgaagttttataccctctactatttctaatgagattgtattttttttttaatttcaatgtaatttttatattaataaggcaatgcaattatttttcgttgtggaaggaggcatcattttattcgttttgtatgatgtttattgttggccacttggagtaaatgcaacttactggtaaatattttttgacgatatcatatgaagattgctagtacatggtacttgctttatgtaatcaaacgaaactgggattaacaccttttgctcttttgctgtttctctttctcaaggcccttcattttgttctgaaaaaagaattttgtgcttcaggaatagaggctcgaggtttcatatttggtcctccc

SEQ ID NO: 8833 - DNA, 3944 bp, Carica papaya
  Intron number 1 from transcript evm.model.supercontig_271. 3 (locus evm.TU.supercontig_271.3) derived from phytozome v7.0 (chr-ID supercontig_271; pos 26819 to 30762)
cgcatttgatcaggcagtccaggtatcaggaccttctcttcctttctcctgcttcagtcttttcttttcctacatcaacctactcttcctattgcatgaagctgtcagataaaatggaaaattctttaggtagctttctgggaatgtactctttaaaatatcattgcagaagcatgtataacctctttattgatgtgctgtactgaatatacttttctcatgtgatttctttggggtggtgttaactgctatgatgacatttaggttgtgtttgtcaccattatttgtttcctataatagcctgtatcaaaagtttgttatgccgaaactctggtagcaaatcgattcagatatctcagttgatatttttcttatttatgagtttagtatgttcactgtattccttttgccgagtcataaagtaataaatattctctccttttctgctaagtgaaaatggcctttgcttgttttatatctttcttgtagggtccttcctcttctatttttctctctattacttgagattttgctgaaggatgcttttacaaaactaaacatgccgtctggtgcttggcatagagaggaataagtttcctttgcagagaattcccaagccttcaattcttcttttatagagctgcaataacccatttaataccaaggagctcatagaccatggtccataaattttgagtgaaagtttagagaaggagatgaatacaagattctgcattttctttgcaaaggaagcatctattggttaaagttaaacttcttttcataagattgtcgatggtaaggatccattctcttgctgactcccaagcaaaaaaggaaatgggggggcgggcattggtcttccaaataatttttgctggaaaatcagaattccttaccccattttggccagccagataatagtagaatgttttgaccaaaagtttgccattgttaccaagatatcagtgaagcttatcgatattctttattggtgggttgaaacttggctaggattgataacggattttgatattcttcaacctcccagtgttgcaaattcctattaactgcaatgttccatccacttccatgttcaacatcaaaagctttttctaccagcatattcttgtctctggagatcgcataaattagtgggaatcggttctggagattggaggagccacaccatcagtcagtccaaaaataaattttactgcccctgcctacagaccatacctaacagttaaaaatgctttcactgatgtttgtaatgcctctccaatcttcgattcttttgacgaagaagaagcattttctaaagccttgtgcttgttttgatattctttttttttttaaataaaaagtagtgctcgttttgatattcttgtatgaagtctcatattcaacttgtgattctggttcttatctttaagaaggattggttctttaaacttgtggaagaatgagtgctgtatgtattattgaattagagggccctatatatacacattcttagggtaataaaaggaaacataaattagttacataacctacagatagagaaattcctattctagtagcattttaattatatgagattattattctcataaagttataattacataatatcaaataataaattaataaaataattaaataataaaatatggtaatcaacaccatcttttggtagtatggaatgagaggaataaaaagacttttgatgagataagcgatgtaaatggatttgacttaatagtaaatggttctagactcggtttttttttttattgggtcatcctcttcattcaatgaagaatttaatggactttattgatactttgattgacttgtaattttttgtacatgtgctagcacccccttgttgccaatatcaatatatacttgatactttatatttcaaaataactactctctcctcttgtaataaaacactattgccgtcttttggatagatttatgatggaagaaaactttatcaagtatattaagtactttcttactcaagagactttgggtcctctcttaatgcccatacttagaccaagataggtaacactgaaatctcttactgatttcaatttttatctcccataacaagatgtatatgtagggcccgtaacaaaattacaccttagacaacttctatcaagactctctttgctttcaccctcaatttaatacccgaaaataaacaaagaaaaagaaaagaaaacccagaaaatctctcttaagtaatcatccaatccctagctttttcaattcaagtctttgcccaagttacttccaaaaccacctctatctcctttcaatttcttctccttcactccctgtgccgcacaccatacccgaagaagaagaaaggaatcccgatttaaaaatcttaaccactctccgtattcctttgattctttccttatttccctcaaaatcgagtaggctctctcctttctcttgacctagaagaagaatgaagaaacctgaagctccctttatgtgaaaccttagaccaccacttgaaaccctttcagttcccaatttttaacctttagtgtttggttcatcacacaattttgctgtcgccatccacaggtctcttctctccccttattctttctgcgccctcggaaacacctagacatgccagctccattctcctgattaaagatcgtttctgttgtgaccacctccatcttgttatttggcttcattctcctgcttcacgacttatgtgtcttaacgttctcttcacttagtcatcatcatcaatggttgctctttcctgttgatcaaagtcctagaaccagcctactaattgagggttagtggagatgatgaagaatcaaggaagaggggatggaaaaaattggtgttttggataccatgagcgattgagattgagagcaaaatgagaaattggttttggacagtgtctgtgcttttgaacaagcttaaaggtttggtgattaaaatgtaatgaaaagtacttctagggctaaattgttacattggtcaaagttggaagactaaattggttgtttactcctaaatattataagattttagaattttgttatatttttttttaataatttttttaatgagttgaggcattataatagtttaggtttcctctcgatatattttatattataggaattattataattttatatctttcctcttttataattttcctttttacttgaaactaatgcttacataaagactagtagctaccaacaaagagaatagataatatgatgggttaagaatttctttgttagaattttattctctattatctctcattgtatctgttcttctagatgttactctacgtatctatcatgctcattatatttttctctatatttttttcaccttgatccctaatttcttttggccgactatgttcacccatatttctctatttctaaattatctgtgcagtaggtaggttttaactgctacttgtccaacgttaataaaagaacaatctaaaagtaccagttgataaactaatttaatctttatgttgataccaatacatagtactagcaatcaaattagaaaactaaaataataaaaataaaataaaaacatttttcgtcctgcaaaaaaaaaagaatttagtttctcaatattctacgccgtactcaatttaaatctagctaatatgttctgaagtttgaaataatttaaaaatactaacaaaatcatgataaattagaaggatgtttagtactaccaaagacattccattttatttatcatccatttccattggttttatttatatattctgttggtcagatcaacaaaggaaattgtttatgcaattttcaaatgtctacttcctctttgaacattcagttttatggtttatgtttcagcgcctgtcaacatcggtggcg

SEQ ID NO: 8834 - DNA, 1222 bp, Carica papaya
  Intron number 14 from transcript evm.model.supercontig_309 .2 (locus evm.TU.supercontig_309.2) derived from phytozome v7.0 (chr-ID supercontig_309; pos 10634 to 11855 reverse strand)
gacattgaaatccataacaaagatatacttcccaggtaccttttcagttcatgatggcatttgatgtctaagaactttgttaaaattgaatttctttccaattgtaatgtgatttgagattatgacgagaaagttgtcaacttaagcacctatcttttagctttgatgccactttcatgcaaagcagttcattcatatgtaaagctggagactgatgatttaactaccaatacatgtcatgaaatcaggtatcagttttaggatgcatatgtagattttaggagagtgatgatagaaatcactgattatgttattgaaatcaaatgtgacctgaagaaaggcatatgatgtaggccttgaatgaaaaatcttaatacaggatttaccatggaattttaggagattgacaatgcagactaccgttagtgtcacaaagaggatacatgaatttagaatgtataggtgtgggtctttcttggctgtaaatttccaacttgttctccttaataatattggactcggcagccctcttttcttttcaatttatagcgttccaaaatatgaatcatttggttggtttaagtttcaacggacagacaatatatgcatttccgcttaagctaaatatctgaagaatagtttaataccctagcttcaaaggccaaggatactggaagtaccaaggattcaagataatttcagctctacttatgcgtagtagaagcactgttttgttaagttctgatttggttggagataatgcaaagagattaagaaaggtcttggtcctttgatgacattcaggatggtgtttttggcttctgtttgggctaaaccccatggtttctcaaagggaatttctttgttcactttacaaaggaatctgattgctgccacgtatcagttgtgctttcactttgtttctttctttttttggaggatagcttatcctcctttaatttgtatctttttcctccctcctaacaaaaatctgtgtttttgttttcccgtagtttcaatctctaaagaacgtcattgatattttccactaagctcattggcaaatgttggatatgacatgatgatttcatgatatcagattctactgcactagccatttctttcatgttggattgattatctgatccatgatgtacaagcatttattgagtttatttttcatgcagttttttagacctcccaaatttgtctgcttccatat

SEQ ID NO: 8835 - DNA, 1311 bp, Carica papaya
  Intron number 1 from transcript evm.model.supercontig_59.5 7 (locus evm.TU.supercontig_59.57) derived from phytozome v7.0 (chr-ID supercontig_59; pos 600955 to 602265 reverse strand)
gaaaacaagagcatttggcagccgggaaacgtcgggtacttcttacatttcacatatcttttttgaattcacgttgccgttggtatgtgattattgattctatcatagccactgatgttttgttaaacctcttgttcaacgtgttataaattgtgtatgtgagattatcccgttggctttatttcgagtttcggatggtggttcttgtctggttacggaacttcatgcgcgcgttgtatatgatttttcattaaatattggaaagagatatgtgtttgtcttctggattcattaactgacggctaatggaatatgtggacgtgatctgcaattggttggttattgtcatgtcttgcattttttaatcaatcctgtaaatctattgttttgttaatcttttgatggatttttaattggaagcttctggatttcctgtttaactcaagtttccaacaagtttccatgtgcggaaccaagtgttcttcacctgtatgtttgtgcgtgtctgagcttggagagcggggagcgggattaggggagaatatgggatttccttgtaagagacctgaagcattgctgttgtctgcttttatagttcttctcaaaggggcactgcagttgggcttttaattctaaggaacgcaaactcatgagtgattttgtaaaatagctgtatgaggtgatttcagtgatacctggatcaacgaagcaaatgctaggttacatactcaagttgtaaagatcaagaatttttgtttgatgctgtgaatagagatcttagaagagcagtaacgtactagagagtttagagataatggatgaataggaaaaattactatgacctgcgatatagctaatatactgattggggcttgcattacagtgtttatgtattgtgggacttattatttttcttggtttgaaaatttgggctagtctgttctgtagtggtgtttgttcaattgtttgtagataacattaagtatttttctaaatcataaatgaagcacggatgcataatggatccaaaaaaaaaaaacagactaaaaaagtatcctagatatcttcttttgttttgcatagactttggacacagattctggatatttgtatgtttttgtttggaacagctaatttgtaattgttattattacagtcaaggcattatcgatgtattgtctcttgtaatcagctattatacaactaaaatatcccccgacaaaagaaaaataacttttgaaattttgttcgaaatgtgttttggtttctcttgcagctggaggagttccgcaagaaaaaagcagctgagcg

SEQ ID NO: 8836 - DNA, 664 bp, Carica papaya
  Intron number 1 from transcript evm.model.supercontig_8.30 2 (locus evm.TU.supercontig_8.302) derived from phytozome v7.0 (chr-ID supercontig_8; pos 2293228 to 2293891)
caaagatttctgcaacttcactgagagttcttcaggtcagctccttcagctctctgtttctttaaaattcgaatttatgttatgtttctttcatttcagttgtggagttgtttcttgatcgtattttgtaccttctttgggtgctgagaaatgcaagttttaagaaaattctgtctatctacatctgtttggtagttggttctaactcattgagttttctctttttaaatctattctgcaatcaaaagctgtggataacatgagattggatctttattttgttatccttcctttgtttattcttcgtgaacgaattcatgagcgactaaaacgttagggcttatgtgattttaattggggttgcatcttaatggttcgttgtcattagtcatttcctagtagcctttggagcctttacttgttcttattggaaatcttggatttgattcaaatgattaattttgattcgtagtagttgctagtatgtaagtgtttggcgtgatttttatcttctgttcagcatgcgttgtagtttcgagttaggtgttaatttttctggatcacctcctaaaattgtataattgaccattcaaactaccttctgcctgtgtctcatgatgattttgtcgattgatggatcatattgcaggcaatactctttttg

SEQ ID NO: 8837 - DNA, 2398 bp, Carica papaya
  Intron number 1 from transcript evm.model.supercontig_135. 17 (locus evm.TU.supercontig_135.17) derived from phytozom e v7.0 (chr-ID supercontig_135; pos 409997 to 412394)
aagttgttgagactgctgctaaaactggcgctgaggttctcgctctctctcctctctatctctcattgtattctttatcttatgctaagcccagataaaaattttttggtcttgttttttctttaagccaggatattgaaattcaaactcttaattgaaaactcagtttattgagttggaaatcatcagtcaaatttaattgtaatattcaaaacttaattcgctaatcaaagaaaaatatccaacattaagtattttagaagatttatatagcagggggatagctaggcctcatggggtgggactttggaagggtattagtatggggagggcgcagtttacggagggtattcagtggaagcttgggaggggtaatatcattaatttttgggaggatgactcgttagggaggggtagtcttaagaaccaatttacaagagtttataatttggcgatgaggaagaatttggtggtagaggaggtgtttaggggagtggatgagaggagtggttgggacatcgatctggttaggattttgaatgattgggagattgatgagtttacaagactccttcaagttcttgctgatgtgcatttggatacttttagggataaagttacttggaagttcaagaaagatgacatttatactgtaaaatcttatatgactacttgataactagggaggatgatggtttgaaattcctggatcatcagatttggaaagtgaatgcgccattgagaattgcttttttttttttttttttctgggaagcgggtcgggagtgcattcttactattgacaagttgacaagaaggggtcatattatggtcaatggttgctatctttgcatggaagctgctgaatcttgcaactatcttctcctttggtgtccaatgacatatagtttatggcatatggtgcatactttattaggtatcaattgggtaattggaaactcggtaaaaaatgaactttgggtttggggagggattgggaaaagatcaaagattgttaaactgatttctttaactattttttggatggtgcggaaagagagaaacaatagagcattcaatggttgtgttagggatattggtagaattagagataggtggttacatacttttgagactctaattctgggtcataatgtatacaggtggaatgattttgggatggtatttgatgtagtaacggacatgtaaatattttgtatagaggcggcacccctttagagtcatatacgtaatatacatatttttatttaaaaaaaaaatattttagaagatttatatgataattaaaacatttgtttctagagcaaattttataaatattggatcttttaattaaaataattgaaataagttatttaccactttttaagtttcggttatattcatgatagattgtgattcaccaataggtttcaaattatttgttattgaatcaagttaaagtataagattcaaattgggaattgtaaaattctaataaaaatgatcttttcaatattatgtgtgaggaaaagttgaagaaaggaattgagaggatgaaagaaaagaaaaagactttttttgaggaataaagataaatactaagtaaacagagcttttaaagaaaaggaaaatgtttttattgtttggataacttctgaaaaagtaaagaagaggaaaaattagagttttaagagagagataaagataatcaacatacccaattttagttactgttttttattcaaacaagtgaaataagggtaggcattccctcatttcattttctttaacttcacttctcttgagtcaattatactgtaaattatatagattgagctctttgtagtttcttttatggtttcctgtaattgatcatattccttcttacttctgtatttctggtaatttctgcttgcatttaagtatgcggttcttgagttgatgtcctgatgtttgtacttgaaaatttgtgtctcttggttacatattccatttcttgatgcatatatgtggcttcatgaattattttcttgtgaagtctaatgttttctcagtactgtcaggagttcatgttcgagatgttatgacagtttgtttttcttcttccttgtgttttcttgtatctttctattctatgaaggttaagttgggtctgaatggctgttgaaaaactatcgcagtataaggaaattgttacatggataatagaattggtaatttctatactgcataaatgctccaacaatatggttacttttacctggatctcaatttttttgtcgtgatgcctgcttttctgcaactatcaatcaagtgaacccttatacagacatgcaccactttaattgtcatttgtctggttggttaatctttccattttttgtgacaggtcgtg

SEQ ID NO: 8838 - DNA, 5454 bp, Carica papaya
  Intron number 13 from transcript evm.model.supercontig_224 .8 (locus evm.TU.supercontig_224.8) derived from phytozome v7.0 (chr-ID supercontig_224; pos 70764 to 76217)
acaaaaagccagcacttgcagcgtcatgtatgctttccatttttatcctaatgagttatctcactgttacttaaccggccttgatagaagctcagttcgaactataatcctatctagattgaactttttggtcttgtattgatcgtcatggttgagaccctcataatgtagtataggataacatagtagaaattttaaaaagaacaacacatctgcaggaaagcaatacagcattatgtatcacatcatgactatcgcttattttttccttcaattggagccaaaaaaggagataacagcacactttctagaaacaacattatctcagtatcatttgtgaggaaatatgagaaaaaaagaaatatctttatttctgaattgataatatatagtattatatagcaggttacaagagaaaaaataggaaactaactcattcttaaataggacactaattcattaggaaacctaacctcctaatccctcaatttacgggatttccaattaattctcctcctaatatcttgccagcatatctatatcttgacactccccctcaagttgaggaatagatgtctttcattcctaacttgaatacaagattatggaagttcgaactatttagcccatttcttagaacattagctacttgacgttctaatagaacataaggcatatacgctaactttttctccaatttttctttaatgaaatgtctatcaatttcaatatgttttgtcctatcgtgttatataggattatgagaaatattgatagctgacttgttacaatagaacttcataggtccttctcatttgactctcaaagcatgtagaataatcttcaatcagagtaccttacataatccctgagcaatagccctgaactttgattctgcggatgatcttgccactgcagtctgtttcttgctcctccaccttaccagattaccttcaagaaaagtacaatatcctgtagttgatcttttgtccactagaaaacctgcatagtcagcatcggtgtaagcttatagagcaaaaatgttgttcttcttgaacaaaattccttttcttagattgcctttcaagtaatgcagtactttgtaagcagcttgaagatgaggttctctttggatcgtgcatgaattgacttatcacgctcactgagtatgctatgttatgccaagtgtgggtaaagtatatgagttttccaatcaacatttggtacattcttttatcaatagttggttcttctttagtttctcccaacttattgtttggatctattgatataatgactggtttacaccaaatcatccctgtttctgtcaatagatcaattacgtaattttgctgagatatgaagatcccctgcgggggatataccacctcaatactgagggaatatttcagttttcccagttcctttatttcaaattcttttgctagtttttgtttcagttcttacttctctctctcatcatttccaatcactatgatgttgtccacatagactagaagtgcagttactccccctacagccgaatgtttaatgaagagagtgtggtcgccttggctttgtttatatcccgactccttcatgacttttgcaaatctcctaaaccatgctctaggagattgttttaacccataaatggccttttttaacttacataccttgttatttgtgtccctaaatctcggtgagatattcatgtatatcttttcatctaaatcaccatggagaactgcattcttaacatcatattgtaggagttgccgcctaaagtgggcagccaatgacaatagaattctcactgtattcatttttgcaagtggaacaaaagtttcctgataatctatcccataagtctgagtatattcatttcttcatcaatcttgttttatatctttcaagggatccatcagccttgtattttagtgtaaaaatctatttacaatcaataatgtttttctcttttggtttatcaacaatctcccatgttttatattttttctaatgcactcatctcttctctcatagcatccttccattctctttttgacaataccttgaaaacagtgttagggatagtaatggcgtttaaacttacaatgaaatttttgtgaaatagtgataggtgcttaagagagacatagtgagatagtgggtaaagcggttgtttggtgcattctctggtaccttttctcatagcaatgggaaggtctaggtcatcttttggattatcaggtgttttaacagattgtgtatgtaaaggtgagtcaaatcttactgtgatctcatttccagagtctgggttagatacttggactagtatcaattctagaatggcctttctctttgaatacacttgagtgaaccttggtaacttttgatttgcactggtagggacaagtggtgacacgggtttagtagcagaattgggtgactcagatgtgattaggtcaaaggtctcggattcaacagtaagggctggaacttgagaaaggtcaagggtttcgattggtttaaaagacttacaaatactatctttcattattgaaatcttcctctgaagacaggattgtgagaaaaacgatttattttctataaaggtgacatctgtagagatgtaaaattttctggatgaagagttgtaatacttgtattccttttgagtggatgagtaaccaagaaaaacagattttatggttcgaggatataacttgcctctttgttgattgtggacgtgaacaaaggcagtgcacccaaatactctgggtgttaggccgtttgaggttctgaaatgaggttaaaaactattaaggatctctatgggacttttattgtctaatgcacatgaggaaagcctgtttatcaagtgtgtagcagtaagaacaacctctccccaataggacttaggaacattctcttgaaagagtaaggttcgggtggtgttaagtaagtgcccatttttcttttcagctaccccgttttgctgagatgtgttaacacatgatgattcatggataatgccctgtgattgaaaatagggtgacaaaatatggttgaagtattctctagcattgtctgttctaaagctttttattttagccccaaattggttttgaaccattgagtgaaagttgggtataacaatgctaacatcaaatttttgtttaaaaaaagagagtcaagtaattcgagtgcaatcatcaattaaggatacaaaccaacaagccccagaaacatttgatattgtagaaagatctcatatgtcactatgaattaaatgaaaatgatgagaggttcttttattgttgataggaaaagatacatgagcatgttttactaattcacaagtgtcacaatgaaactcagacatatctaatccatggaacaaatgagaaaacatgacttttaaaaccctgaaaaatggatgacctaaacgtaggtgatacaacaaaatgacatctttatttgtggaactgaagaaaaccaatgaccaattgcttctaccgttttttgataattcaaggtgttaaagaccccttctttccttagcaaatccaatcctcctccttgagtgctaatcccgaaaaacacaataagaaggaaaaagagttacataacatttaagatcatgggttagttttgaatggaaaccatgttggttgatagtttaagtacatggaggacatttttaagggtaagggtaggtgtgatttgtatatctttgaaccttgcgatagtagctaaagagccattgaccattaaaattttcctgttattcggttatggagtataagtgtgaaagagttgaggtatgaaggtcatatgatttgtggcactagaatctattatccaagaattagcatataatgtttctgaggcattcatgcaaaaagagaacgaaggtttacctggaagagccagagaacaagttccagaaggattcccaagagatcccaacaggtttatcagcttctcaatttcttcattgttgaatccccctgttgctgaattttcctcagttttgggtttctctaccatatgtgcctgaggcctttgttgccccctacgactcccccattctcggcttggtgacttaccattcattttccaacacttttcttttgtgtgcctcggtttcttgcaataggtgcaccagacattgtccttgttctccttccattggttttctctaccaggttgttgagttagattaccctttcctttcttctgatgatatatttttgttattaaggctgactcgttcacgatttgttgtgtttgaagcataacactcctttggctttcttctgctcgattcaatgatattgtttcttctagaggagaggtgtcctccttgccaaggatttggattttaacttgatcaaattcataattcaatccagccaaaaaatcatagatttggtctttttcaatgaagttcttcaagatgacagcatcctcggggtgtctcatcttaaaaactcggtaatgatcaagttcttgtcataggttttgcagcatgtttgcatattttgtgacagatttgtctccttgcttagtggctgcaattcttaccttgatctcgtacacttaagcagcatcatgggccttcgaatatgtgtgacgaatgaaatcccaaatttcctttgttgtagccaaaaacatacacgtatcattgatcatgagatccatagaatcccatggccaagatattatcatggaatcctccttgtcccatacttcaaacgacgagtcatcctttgtcggtcccgttccaagaaggcgattaagtctccctttgcccttgaggtatgtgtagacaaattgagaccatttgagatagtttttcccatcgagtctattggagacccgaatattctgcaattctccaattttttgaacagagttggactcttcgagggaatttgaattgttggaagtagtggtgtcggtggtttgggagattgacgtgatgaaagaaggaaatcaacagcaattaagactgcccaaacgggaattaaagaagaaggagaaataaaaaacaagatcagcaatgaaggctgaaaggaagatcgttcaacaattaaggctaaagagaaaagaggcagaattccaagaaaagagcttagagctcgaataccatgtgaggatatgaagaaaagaaaaatctctatttctgaattgataatacatggtattatgtaataagttacaagagaaaaaaataggaaactaactcattcctaaataggacactaatttattaggaaacttaacctcctaattcctcaatttacaggatttccaattaattctcctaatttcttgccagcatgtgtatatcttgacatcattatgcagttatcagttgtaacatttatttcttttagtctttcaacaaaaactcagagaataatccttgaatttcataggatctgg

SEQ ID NO: 8839 - DNA, 508 bp, Carica papaya
  Intron number 4 from transcript evm.model.supercontig_95.9 (locus evm.TU.supercontig_95.9) derived from phytozome v7 .0 (chr-ID supercontig_95; pos 168760 to 169267)
gtgctggaactgccggtgctcccattgttacacaggttggtttccttctacaagttccaaagtttcttgttgacttaaaatgtttgttctaatcatattatggtctgaaattaagttgtaagaggattagacaattatgctatgatataactgcgtgaatagcaaatgggtgtttaaaagtttattcttgctgtctcaatgtttgaaatgcattctgcagacacaattttgctttatagacatgtcaaatgctattaatcatgctggttcaagttgataattagtagcaaaatgcgataagctgtaatcagtttcactgtttgtttagttgtaaacatctctccaattttgatgctattctctattgttataactgtttttacaaatttaaaatggggcatgcaggaggagctgggttttagttgagcttcatttggatttgtagtttttctataccatcagtctcgtcatatcttatgttgtcttatataattagattgctcaaaca

SEQ ID NO: 8840 - DNA, 3494 bp, Carica papaya
  Intron number 1 from transcript evm.model.supercontig_1914 .1 (locus evm.TU.supercontig_1914.1) derived from phytozom e v7.0 (chr-ID supercontig_1914; pos 7437 to 10930 reverse strand)
aaggtaacttagttcttaggcatataaatggtgtagtggattaatttattcgattatatgttggttttacccatgttcctcatgtgaatgatttgtttcgtgattagctacaattctggttttttttttttttctccccttcttactcttaagttggctagtttgatgcgtatttttttgaaggaattcatgtaaactaagcacaaggtcttgatagtgagtgtgcaattatctgatatttcaaaaaaaaaaaagtgagttagccattatctaaatatatatatttccatagacattgggttattgtttcattttgaggtgactttatgaatctttgtaaatcacaaaacagtccagtgtctgattgagatgatgatagaaattttcagttagagtaggatggtctgatataggatttcaatatgtgatggccatgcaaaatgcaactgttttaacaggttcctgtgttgatgccactgctatatagtgcaatgggttcttgattttattccaatacatggtttagctcggcaccttcatttaaaggttttaagctgtgataagttggcctcaggtgcacaggtatatgtagcatagcaggataggtctagaagagtacaaaaagggatagaaaaccaatccacaatcatggggattggcagcaacaacaatcacaagaatgttagctaaaactggagggttattaagcaataaatctagtgactgaatattagtattttttatttttaagcagtatgttcaataatgattaatcactcatttatttttaatgtgtccggataacctagaatgattagaatacataaatttatctaaaaaagatgattggaatacataaataagaaaacagaataaaataaaacttctaactatagaagcaaaatccttaataagtaataagcttattctgatagctcataaataggctaaataccccccacctccccatctttggccctggttatattgtgggaagattcagattacactctattaaccatttctattagagttaacaacagccctattttccttttggtgtctttcttaatttcatccacccactttccagctagaactgcttttccccttcttaatcttcttccacataatcagtattgtttgatactcttctgatctatcccttttaccctcgttgcataaacttgatgacctcatacaagctatcaatattctgcttcaataccttagatatatttagatgttttctgcttctttcattctcatggaaagtagcagcaaagacataacatgtttgaccttctcaaggtaccaaatcttgttaggcccccgcatcatcttcaccatcatcataaatgccatcatcaaggtctacatttactgctaactgactttaggagttgcttgctcttagggattggctaatagctatctttttgttttgttaggatattctcatcagctatcctgttcctctaggaatctatttttacatcattgaagccacttctactaaaatccttcaaaggaacatcttgcatgctactacccagattcctaaccttgagcttaacctttttagctttgttttcatttcccagattctccaagttgcttgagtctttccaatttgtttgagcaagttgttgaaccttttggaatcaataccaccatgcctttattcattactggctcagaaagaacagttgttggaagcctcgtcggattctagaaataaccccatcttcagaacagatcatattctgggaagatttagcttcagaaatgttactaagtaaagccgaactgcatacttctaaagtagctttcctttttcggacagagagtagatagcaatgaggaaaccatatggaactttgaatgtggctgtgagtcattccaaggctgatgtgatgtattactctgcttctttctcatggaaatcatcgtattaccaaatcccaagtctcgtcaaccctcgatggagaccaacaaggtcaaacaaagtttaatttgattccttctggtttgggtacaggtcagatagttgcctggcaatgtgctttgaaactgaaaaatggctggggaaagatgtaactaaagagagggtttttcgaggatgaaaaggggaccatctaattcaatccaagtgataacagcctgtggttttgttgggttgctgcctcaaactgtaactcactgttatgttttctgttgctggccaaattacctagaatcattcatctctctttcttctctcccatggccttgacgcattttgattttaacacacaaaaaaaagggaaaagagaatagggctgcgcttaatttaagagaaatggttttaaaagggtgtaatttgtatatttggacaatttgagatttatacaattagaagtgttagactgcaatttcatataaatgcaaagtataaacgcatttttagatagtacctaaaaaattactgatattctcattgaattgagtgcctaataatgacctgtaatttggttgttgtcaagctgtgattgtggattggattttcttctcttttatcctatccttctaaacctatttcactatgtatgtcataggatttatcatcattttctcttgttttcatagttggtggttttataagttccaggcaggtggccgaggagggagggtgatgcagggtaagttccgagaaatatttgaaagagaaaataggcattaggcaactagaataatcaaggtagggcttgattcatatattattgcaaccaggtgtaaaaaagagaataaataaatctggaaaagcaaataaacaaggctaatgctttccttttttatagattatagtcgtaaatagagcaattctagtgctagaaaggtaaccccaaccaaaaatgaaacagaatcctaaaagcaataaaagatctaaatataactagtctcctaatcaataatatctcttaaaactgtaaaaacttaaaaaagttaaaagactcttgtactaataatactgtaggaaagcatttgcattgatatgagaatacaacttaccagatggcttagatggtccaacaaaaatgatattacaaaggcaataaagcagttaaaataaaacataactctcttcaagtgctaagttctgatgggggaggagatgaaatgtttaaaacttttttatggtatcaaatgaatcaatatgctactcttcacatttgagaaattattctctttatgagaaaatggatgatacaggtaagactatccttaagatggtgaatgttaggatctcctatgaataaaattgcaatgtcaggtattctctcaataattgtgactaccattgtgctaggatattttacatgttgaaaaatgcctgttctgatacctgtagtagatgatgttacactcaatgtagttcaatataaagaaatacagaaggagctttttgttagtattacttaatttggtcactctttctatattgacagagtggg

SEQ ID NO: 8841 - DNA, 2393 bp, Carica papaya
  Intron number 6 from transcript evm.model.supercontig_16.1 73 (locus evm.TU.supercontig_16.173) derived from phytozom e v7.0 (chr-ID supercontig_16; pos 2626939 to 2629331 reve rse strand)
ctggtaaatcttctttgagatgtatttgcaatttcaactactaaagggagatttaaactgagtgattaatcatagcctgtgttctatagaataagattctaatatctgtatcttgcatcatatactctaatttggatcttgaagggtaattatctaggtataaaactaagttgtttaattgtttttagaactatgccagctacctaccaagttttgacttttttttttaatcttagaatcttagccattgtactaagttgcatagaaatgcttcttgaaaaaatatggattatcccagcataaaattttcagaatattaaatttctacttcctagagtttgaaaactccagttatcgtttgtgggcttataagtttgtcatatattttttataggagatggttgtggagaatagaatgttatatttgttattaatgaaagggctctatatatacacaactcttatcatagaaaaggatatgtaaaattaattacatataggtgtttcacttttgtacttttagtattaaattatgcacacatatatttacatatatatatatatatatataaatggacttttcaacactctccttcaatgattgtccattcccaatcctgcaatggttgttaaaattgctggattgcttaggcatttggtgagcacatctgcatgttgcaagttgttatgcatgtagggtgtgcaaatcaagccattgtctagctccttaatgaaatgtctgtcaaattcaatgtactttcttcggtcatactgtgctggattgtgaataatgctgattttttacttatttttacaatagaatcttactgggtcatcccacttaattcttagatcttctaaaacattttcaaccataaaagccaacaaactcatggagccattgcttagaaatatgattctgtacttgattgtaccaccacattctatttcatgcttctccatgtgactagattcatcataaggaatatgcaataacctgtagtatatcttctattcactattgatccagtgtagtgtgcatcaatacagactttcagtagcgatatggtattctatctgaatataatatcctttcttggttcaacattactcacatataatatcaatataggctttcagtagttacatgatttgcacattgtacatgcttaccaacttgcagcttgcagatatgctcactataaaggcctaagtaatccaatatttcacataatcattcccaaacagggaatagacaatgtgtattctcagcttgaggaggtgtgttggaaagtgtgtgtgtgtgtatatatatatgtaatttgagggtataagagtaaagtacctgtatataattaactttagagcttccctgtccatagtaagagttgtgtatatataggaaaatatcataccttttcacaaatcctaattgactttcattttcgaaacaaaacacaaaaatcctaaataggtctggcctccatggcctgccacaattaccacccacagccaatctgcatagccagaatacctcccagtcgctctgccacatgctgctcagttgcctcagccacgcaccccagcagccactatgcatctgctgtagctgagcacagcaccagctgccaccactccagctgtgtgcccctgctccatctgtgcactggacctaccccagatgtatatgccggtgctgtgcagctgcagcaggtgggcaatggctgttggggtgcacaattgtagaggctggcgtagctgggtggcatgcagcagtgggccatgcttctgggaggtttttcggctgggaaggccggttgtgggtggtgatgtgatcagctatgaaggccaggcctgtttagggtttttttcttttgttttgttaatgaaagtcaattagggtttgtaaagaagttacaatatcttttctgtatctctgatactatgtgggagaatagaatattacatttattattgaattaaagggtcctatatatacgcaactcttagtatagaaagagaaatcttaaaattaattatagataggtattttgctcttataccttatatattaaattatatatgtcctttccaacaggatatagatttaccttcctagaggttaaaacataacacacacttgttacggtgatccttctcttagccaagaagtcgtagtgttagttctttatagagttcttataaattgtgtcatttgacaaggataggctgttgtacccacttatatgggcggaatgaatacgaatattgttgttatcagatgctgaacacattaacaatctctttctctcttactttctctctctcatgtcttttttggggggactgtttgttcagctgttgcagtgaacgccaaacttcagtattctgtt

SEQ ID NO: 8842 - DNA, 1654 bp, Carica papaya
  Intron number 2 from transcript evm.model.supercontig_65.6 4 (locus evm.TU.supercontig_65.64) derived from phytozome v7.0 (chr-ID supercontig_65; pos 674494 to 676147 reverse strand)
actacttgttcgatcttgttcttcgtcatctcctggtataatctcgcttttctccttcactctgctccgtaattactagttttttatttaaaagaaaaaagaggcaatcactactattggatttacctatttggcgtttattttattattttaaattactatttatttgtcatttttgtcgtacatgatgaatctacttccttttctttgtatatcatatagccgacgagttcggccagataattgcgctagtttatttccataaacaactcgtttttggtttactgctactgtaaattaacgtgttttatcagttaaaatgaaaattttgcttgtttcttagttcttgtatcaggtgcgtgactaaatctcttgccttagttttgtgttggttgtgagtagtaaattatgttgattcatgaagattacgagactcacttgatgcagctgctctgtatattgtctattcaatatggtttatttatcaaaatttgagctttctacaaagttttcaagcttctcgtggactttcattctgtaagatttatgggatatgtaagagttcccttcaaatcgtttagtgcatcatatggggtttgatttattagcaactagcgagtttggacaaaatcttgactagacaaacctatgtagtctttaataaattgcatatatctgcatatgttacatatactacaactaatcacactttagtttcttccggctaataagcttaatacactaagcctgattatatttatatctcacagataccatgagaattatcctatatgcaaccaaaccagttttattattttttttcttgtgtggttttgacggatttatgttttggtttcagttccaaattgattttggtttgtagttgtactcgaaattgaccagaatcaggctagggatgatcagaaatagcaactttcttgttttttctcttgtggggtagtacatcatagccagaagcttattaaaggttgtcatgccaagctctggcgatattcttttgatgtaaaaagtatgctgcgagttctcatcaatgtctccctgacaacctggatggccagccttgaaatattgaatattgccatttttcttcaaaaggccatgatctctttaactctaagatttatttaaaagatgtgtttctcgtgcattgataacttggttattgctaattaattatttgaaaaattaagcagttatttggaaaattaaacagttaaataagaatacccagctgcccttggtatttcttcaaaatgttttcattcataaactgtaaggttgcctttggttgatctttcattacgttcttaattaatatctacttctcatttctaacttccatgaacatttttatacaattagaatataattttttgtgttgagttatgaatctcctccttgaattagaattttttaatgctggcaatttcgttgcaacattttatggtagtggctgaattctcgcaagaaagtcttggtggtggttgttaatccaaacacaaaaggtcttttaattatgcaaagcaaaactaatatgggaactagaactaagaagttggttgttgctaatatattcgataattgaacgatgaaatcaggttaagctttctggcagcagaggcctgcttattgg

SEQ ID NO: 8843 - DNA, 907 bp, Carica papaya
  Intron number 2 from transcript evm.model.supercontig_9.24 6 (locus evm.TU.supercontig_9.246) derived from phytozome v7.0 (chr-ID supercontig_9; pos 1652706 to 1653612)
gtccacaagaacccggtatcgtcttcctcagccaggtatcttcaatcatccgtatatttttaaatccagttttctctcctattcttttccactttcatgaacgtcaagaataagatgtatttttcaaagattagtttagaatgaaaatacatgcaatgtcaattctatgaatgtagttaaaactagtctatgttgatgggtcccaaggaatcctgaggtggttcaaagattaattatattaaacagacaaatacaaaaatgaaatgaaataaagatttgaatggaattagtagaaccaaagttagcttcatgcccaattcaatttgggttacattattggtaactcttttcttgataaatggtaaaacaaatttattgtggttgaattaaagatacatgtgaaatatgttcaattatgccttaaaaaaattgatttataagtaatttatgtattaaataattaagattttggaaaagaatgacttgaaccaaatggagcctaagagtttaagatgccctggcttgtatgtcttgctctacttgatagtctatctaataaagcaaattaccaaatgataaagttctaagaattaaagggaaaaacccatgacttttcttttactgctttattctcggaatttctcactgactgaagcaatccacactgtcttgagaatttcattaagagcactgcagcatattatagatatatatccattagatcacagtcctagctgcagtagcagcaacatgaaagtgtacttgatgacatgcatgtggcagttttttcatctcttgttcataattacttaaactgtcttctcttcccccattgacaatctttaccctctataactttctaagttgcaattccttttcaacaggaactaattggggctcttcttgc

SEQ ID NO: 8844 - DNA, 5507 bp, Carica papaya
  Intron number 9 from transcript evm.model.supercontig_9.28 1 (locus evm.TU.supercontig_9.281) derived from phytozome v7.0 (chr-ID supercontig_9; pos 1922565 to 1928071)
tgggggcgtgaatatgtatgtcatgcttcgttaatttgtttcaagatattttagttttccacgaatttgatttacatgcatgtggactccttggatattttttttatgaaagaaatattagagagagagagagacctcttgcagaagatttaatgagagaacaagatatcctcttggcaactaaaaattacataaaagcaaattattaagacataatagaaacccaatcctttttcaaagagagaatggcatcctgcaaaagcaacattggacaaagccaatgagaagcaaagaagactatcctatcccaaactctagccaaataactcgaaaaagaaataaacagcacttagcagaaactaagaaaaggaaagttctgaacttttgtaacttcttttgtagtctaaactttcttctgttttttttgctctgaatatatatcaaatgaagaggaagaccgatggcaaaaaaagaataaatgattacatggcgactggagagagaggaaaaaaaataaaagagaccaagccagacgagcaaagagaacttagaaacagctgaccgtagaccaagccaccaagttaatgaactagcaaagaggttgcaacggctttaaggagagaggggaagaggtttagggttaatatatatatacacacacatcgggagtcatggattgtggaggacagagttagaaagttatgtttttcaatgatttttatgtatatttttaatttaataaaaaagaaaatatatatttataatgtataatttgtaatatattagtgatttattcattgcgagttggttacagtgtggataatctgtaaacccgctacattttgaaataatattaaaaaattaaacccgcttccggacagggttttctgcatcaaagcttggggcaggtttgggtttgttcatatccacctcatattcgctccattgccatcctatacctgacttactctatcataagtctccttcaaatccaatttaaacaccataactgagcacttgtatctttttagatgtgcaaccacttcttggcaaggaagcaagcctaaaatgtgtatatgtttgccataagaactttggatgttagagataatgtcactaagccttttcttaatcttagtgattagttgccatgttaatgggtcatattatattactttgacaatttgatctctattagaataagataatcaattatgaaagtggatttcatactactgtcacatttaggtgaaatttatgaaaaattttaaaagtttcacaatttctcgatagggttgggcacttaattgtcccaaaggtttaaatcgattaacaaactcaacttatcatttatattctactaaaagcttgccttacatgcaagtgtgtttgcatgtggatatcaacttatcagttacattctattataaaacttgcttacgtgcaagtgagttgcatgtgtgatacaagcacacaattagtagtagatggcttaattatgagcaataggatgaaacttgccttacatgcaactggattgcatgtggatataagcggacaagccggtaggagatggctcaattatgtgcaataggcaaaagaaacaaggggtgagaaagctaagatttgacttattctcctagaagtttaatataatagaaaatagattatcttatacctctattacattctaaccgttggcatgcaaaattgactacttctgaagatggcccttaaatgtattactttatcttggatggtagtgtactcaattggtctttcaagtgtgcttggattgggcatcaatgctgatgtggaactcatgagcaaccaatgtgatcaaacactgcaatatacagtttaacaacatgtgattgcaaattaaggaattggaagaaaaaaataagaattgataaaacggcacaagattatctcagtaagtagaaccaattatccacttaataagatagttgaagaactctctcaaagagcactaacggtagccgaagactaaagtttgaaaaagaacttaaaattctattgatatgaattaatctatcttgaatgcaaattctagttgtggccgaatttttcctccttattttaatcgaatttggatttcaataattaattaattttgatgaaaaagttgtgttgaagatggcttaaaaagcttccaaattgaagtagaaaacaattcttcttccatgagaaaatcgagaagaaaatctaggagaaaatttaggagaaaaaccaggagaaaatcgagaagaaaatgaaagagaaaatttaagagaaaatctagtaaaaaatataggataaaatctgggagaaaatccagccatgtttgagtggcaaaacaactcctttcttttgtagtaatcggccatgaatgggaatccttatccctttgaactttcataattcaaacatgatttcaactcatttaaaatattaatttatgaagatgaaaccaattagaactcttgcaagattgatttcaaattccttaaggaaacttggacacaaattttacttgaattaggattcatgaattccaaatatgacttgaagttgaacttcacatcttgatgaagagaatgtgtgacaaaaattgtatctaagtgggcggcttggataatgtggaaccttgactagattttaaggaataaaatcttttaatttcatatgtgaaatatgctctaaactcggataggactctcccaaagtgagtgattaacttccacttgtaaaagcaatgggaaatcccgagagtccaccaccttgaggactctttaattctacttaattggagtagaccgtgaggatctttgggtgtatggatcttgctgtgatttccatgcttcatgaggtcccttgaatgattcatgtcacctttgcccacatcaaatgctcataggaaactcaaaaatctaattcgtttggtgtccttgcttatattttggatgacatggaattggacaagctgaagagcttatgaggggtggagttgtctatccttttccataaaagttagatgcttacttcttctatggtgcacccaataactttgtgattatcatgtcttcatatagttccttataaaatataattgttggaaagtgcatatatttaatttaatgcataagagtataatagtggaacactcctatgtaattaattttagagtttcctttcttatactcaaaagctgggtatatataggacccaactattcaataataatcgtaacattctattcttgcacaataatagttcatgaatgagttagtgaaaattaacgagttaagaatcaaaactagcaatttacggactactttaatcatgtttcaaatcactaggtcagtctagaatcattagaaaatttttaatgatagaaaatcctttcattttttattaggaaattaatctttctaaaatagtgaaataccaattagggaatccactaacatgaagatttgatttgatttgatttgttgtaattagtttgttgccttttctctttataaaggctatatatacctatatacacatcattcttttcagtatacaagaaacttagttttttctaaatttcagatggtatcagtacctaggttcttttctagacttctctcgtacttatctttttgctcttgtttttgctattaagaaaaagaaaagctataatagagtttacagtctcttttattcgacgccactccggcacgagaatgtcctttgcacactaaagcctccctggtgcattatcttctctgttttctttgattttttcctatggctttgattgccacacagctaatgtcaaccttctttttttttctccttaactggacttgaattctctatctgtagccttattcactaggatccttgttgaacctctctggtatgaaatccttgaaggaagagactcgatgcaccattctagagaagaagatgttagaaagagctaagatgacatcgtttttcaacactactggctagacaggataagttctcatcaatcaacccatataattaattgtctatttccttaaaaacttttatatagaggattatgatattcaatgaaatacaaaatcaatcatttttaacatgatatcaaggcactaggataaaaaactctaaattttttaacaaaccctatttggtcttcattgctgaaacaacaaaactttaaaggatattaaccttcattgccaaccaccacactccagccacttgccaccacaagactggccatctccatgacaagttggtcttcatagctggccctaatccccaagtcgcacggccaggagatgccagaaggagcggctcacctgccagccactagaatcgcacctgcacagcctctatccctcagccatgtgccaacctcctctaccatgcacagacagctgcgcgcacagcgtaaagacaccatcaattcaaaaataacagtagattaatgctcgaagtatacggcaatgcaaattatggagactcagcaattaataagcagtctactacaaggcattgtaccgtttttgtaagataatcttgtgacctggaggagcaagaagcagaatttggttattaaatcaagtgcaaaggcaaagttcaatgatgggacagaaaagtatgtgaattattattactcaagataattttggaagatttgaggaacatatgggaataactaataaaattattttgcaacaaaatgtttgtcattagcattgctcacgattctgtgtattatgatataacgaagcatattgaaacagataggcacttcataaataaagaaagcttgatagttgattaacttgtactctatatgcctcaattaacagtcaacttgtcgatgtaccgacaaaaggactcagtagtaaaatgtttcaaggatttatctccaacctatgaatgaaagatgcatattcatcaacttgaggatgagcttggtaggatctattaggaaattgatcttcttaaaattatggggtactggttaggaacccccctagtgtagagatttgatagttaattttctatcttttgactttgtaaaagatatatatacccttgtaatatgatccttctcaacatacaagaaattcaatttctctaaatttcagaatttacatatcaagaaacttatctaatccattcatgagcacaacttttccaaggtctgggagcagaaaggacagactctacttttagataacaaaatttttattattagaataaagagaatttgtagaaagagcttttactggtatttcattaatttaagcatggccatgcttcataagtcataatactagcatttctttgggattctttgtgcacatgcagaactgcacataatttgctgagttgcatcatacttttctgaactatattatagtgagcttgtgttttgtagtgaattaattattatttttgtattttcttttccagaaaccaaatcttccaggtgctgttggtgttagtct

SEQ ID NO: 8845 - DNA, 2468 bp, Carica papaya
  Intron number 19 from transcript evm.model.supercontig_178 .21 (locus evm.TU.supercontig_178.21) derived from phytozo me v7.0 (chr-ID supercontig_178; pos 182920 to 185387)
tgtggtttggtgccaatattattctcaaggtaattgatatattcttattgctttaatctctaatctaaggtttttctaacatcatgtttcatgcagagaaaacataacttaggggataaaattcttcctgcaataatggttgttctttagaattcaatcttggtatgaatatcctaaaaaagtctataggtactgggtgtctttttgcaatttttacaagctattttactccatcaaatgcatcgcgatgtgttaggtcatgcatttcaattcataatttactgggacgaaaagaacagattagtaggtgaaatgagatttgtgctaatttgttgccaatgaggtgggaaaacaaaatgagtcagtgtttatcttctttatgtttgagtgcaaaaaagaacctgttgcaaactggaaattttggtggtgcttcactgccttgatcatcaacattcaaccataactggtatccaaagtgcaagacttcttctatgccttttagctgcagtcacaatattttctttggtcaattttagtattttgattaataaaacgatgtagttattatcggttaggtgagccctgctaacttttacagtctgaagaaataatctctgttttcgatgagaaagaatttctcttaggatttcccttggaattggctagtaagttgttgaactttttgagagtcacacaaggctcaggttcactttgaaaagacaaatgctgaagttggaggaactgcctcagaataagaaaagaaatgctaataagaccataggcttgataatgggtgcgaggaaaagggcattccatgatagatgcaaagatatttaactgatactatttattgaaaacctgtatgtgccaaaacacctcatacatgcataggaagtttacacagaagctggatcctacctcatgcataatgatgtctctcatttgcctttctcgtgtcttcacacatgcacaagcatgtagaagtttgaattgtttcgtgtcaactggaaaactaaacccaaccacaaatgattttgtttggtttgtttttactctccaaaattttagttttgattggaaaccaatcaaattttgaatttggttttactttagtttcaaaaaattttaaacaaaatccaaattatataattaaaaagtagtctatataaataattattaaataactgaagtgtctactctatttgccttaggtacctgagatagatgtatatttacttttttttccgctaagttgtatatataacttgtttattttgtgagaaaaattgttttaagatacattattataaatatgtaagttaataccgtatagtgcaagtggcagaattctcaaaattcattaaaaaaataagtataaaccgaaccaaactaaactaaactgaattattttggtttggttggatttggctttattagttaaaacagttcggtttggtttcaattttgtaaaaatcaaatttagtggtttagtttgaatatcaggtgtcatccaaaccaaacaaatccattcaaagagagtttgaaaataacactagagaaaatacgttaagaatcaaaattggtctcaaatctaaaaaatcaagcaaaaatttttacgtaatgattatataaataatgataaataacttaggtagagtacctttaggtaccaaaatacgatcaaaatagggaactttaaatcaattttaaaagtctggtagaaaggaaaataagctaattaattgaataatctataatagagaatgacttcttaacaaaataggaatagtacactcatattaataataaatctatagttaataatttcttaatgagccaaataccttaataatgaatagacattacaactacataaataaatcctattattgaaatatgtttacttttgggtttccttaatatataaacatgacaaacacataaaatatctctgattattgaaatatattcactttattcttgttctgcattggtattttaaaagaaaattactttgagagaaaaagcatatagagaagaaaatacactctttagccattttgtgttataaccttgcctaaaaggtttttttttctttttttgtgtctaggaattgctaccggaatagattatgattggtattcgaactagtttttctgaaacaaattcatgaatgatatggtaaaactgagtttgtgccacaaacaattagagacatgaatgatccaagctactaagtcttagtacacataccttactgaccataagttcatgcatggcaacatgctgtagactaaccgtgttatctacttgttgaattctttatacttacgtctttcactctattctaccagtttttttatatatatttttctggtttcccacgtcccttaccaaagaacgcttattctcacaatggctttctatctgaagggtaaagtgaccatcgcagcaaagtctggagtaaa

SEQ ID NO: 8846 - DNA, 2166 bp, Carica papaya
  Intron number 1 from transcript evm.TU.contig_31899.1 (loc us evm.TU.contig_31899) derived from phytozome v7.0 (chr-I D contig_31899; pos 3218 to 5383)
tctggaggcagcatctacattaaggcctataagatgtaattgccatttctttctatctttattttgatttcctttagtatttatctgtctttgttgttttctggtgcatatagttggtagggatgtaaaagtcaagatttggaataattatttgagacaaaggaatttgcggtggtgagggtttggttcagattagtctatttcaaaatatgggacaatgcaattgcacctgtcatcagcactagtgaagccaagatcttactttctttttattaagttttgaatgcaaattagtatatagccaagatcttgctattaaataaatactacgttgtcatgctgttagaagaaaaaggggaaagtggttcaagcatactcagactagagtgtaggctgttgatctacttacaatatgtttgttttctttttgaatcaacacaaatttcgtggacaaagccttgcctcctgataattatagtctcaccacttattcaccatgattcactttataggattgattaatattcatagaatttgaagcttctgagtatgcaactatgtatcccgatgatgtacaagaaaaggggaaagtggtaaagtactcatagtgcttcctttgattatcttccacactagcatgctctttactagaatccaggcaattgaataacacacaataatcatgtttttctttttgaacaaaaacgaatttcatagacaatagccctttcctcccgaatgattatagtctcatcattttttcattctgattcacttgtttgtatcaatcaattatcatactatttgaaaattgtaaatattcaacaatcttctgccccctaggatggtgttggaactaagactcttcccttgtttgtttttagtgaaaagaaggccttcactgttatttgtgtaatttcctgcatttaagatgaattttctattgtcttttatagttgcagtaattgatagaaagagcttgagttaattatgaaggctggtttcagtcatatcttgtttgcaggtgtaacatgtgccattgtacttagaatttttattcttactgtttcttggtaaagtattctctgatctgggggcaacatgatagacttttctaacaaaaaatttatattcacatatggttcttctatttggttattttctttcacatctctgtttagtttaattaattgtagaatccaatgagtaaaaagagtggattttttttctgaaataaaaagtagagtaacaagagtgggcttccatgtttatgaaattaattaccagaagcagtcctcacaaggaaaaatgaatgagaaaattgaattcagttgtaactttaccaatgttgttaggaactagaatgctattatagaataggagacgaatttttactggaagaaaatgagttctcaccatagtttgagttcatttggatggtcctttttcaactttaagtcacaggaaagtagaatctgtgttttgttgggatcaaatttttcttgttcctttctctagtaatgtcaattttttcatcaaacaaaaaattcaggttggtcacttaaatgtgtctgggaggaaaaaatgggtgccgagcaagtaacctgatagctacaaaatagggatggaaaatgtaaaaaatgttaaattatgaaccttttggcaatatttttttttcctcttagtaatttgaagaattcctttctttatatttatgatattgattgggaaaaattttggttgttcatctttttaaaagctttagattaacttatatggagaccaatatgaaaatttgaaacctcagacaatgtgattttgtgtgggtttgagaactagatcctactgagcttatctactttattaattttcccttgtatgtttccttgttattcttgtaagattatgcatgtgagttgcctagtttcttattcgttcttttgccgcattatatgctgaggcattttatattcatggtagatacttttggtaccaactattagccaaataaatactcaaatctgtttatgccttgtgtctatggatgtgggttaaatttattatttcttgacttgctcttttgttcttttatggattaaatattctgttattgctttcctgttaagtgcaggactggaagtggcctgataagtgcttgtggaggta

SEQ ID NO: 8847 - DNA, 1092 bp, Carica papaya
  Intron number 7 from transcript evm.model.supercontig_85.3 1 (locus evm.TU.supercontig_85.31) derived from phytozome v7.0 (chr-ID supercontig_85; pos 188066 to 189157 reverse strand)
cagacctttttgattattttccattgactgccttggttagtatttgacgactggtgtttgctagttctatttcaaatgatatacacttggatttgcaatgataaaaaaaaattggggagtgtaccaattgttggcctatgagaaaaggtgagaagggccaacctatgtgacaaacttcttctagggaacaaatgccagaggagtttgtatgagctcaactaccaggcttgaatttgccatagggaactgcccttgaaactgaggatttcaaagttcttaatattagcagttgggctatctatttgtttaggttatgctctttaagtacactcatttgcttcagaatttattgctaaagtaattcactttgtcattgacttggttttggtgcatagctaacgaacttaaatccaattcttttttaggcctctttacagttcctgaaattgcttttcgtagtcgatagatctttcaatgtgaaaagatgttgcatctatggaaaagcattagtactactttcttgactttctgatgcaatgcattacatcccccacgttcttgccaataatttagctgggctagtggtaaggcaatgcacctacaagaaggcatatatgattcttatggaatcatttttcagctttgctcttggcgtttgggaagctagaaggctactgctgagaaaactcagtcaaaatggtatttggcatatttgaagattgatgagtttctgataatacatccatttaattatcggatgaaagataatggtttttggagaagttctttaaaaaaaaagtttttggaggagggtaagaaaaccgagataagttattggtgtttgctaatttgtgtcttctaggaagctgattgacggtatagacttgtgatcatctttgttgcagtgattttgatggttgtgaatagtagaatttcttaagtgtaatctgccttattctgccaaatcataaccgtgttaattgaaggttattctgcttcaattttaaccatgttagttgaaggttttaattattatttgaacattgctgatcattagtgtgttacaggttgaatcagaaatattttgcttgc

SEQ ID NO: 8848 - DNA, 2800 bp, Carica papaya
  Intron number 14 from transcript evm.model.supercontig_671 .1 (locus evm.TU.supercontig_671.1) derived from phytozome v7.0 (chr-ID supercontig_671; pos 9621 to 12420)
agcaattagctacaaaggttgctgaattcttgaaggtttgtttcttactgaatagaatgttcttttggcttaactgtaataaactatgcctagctttactgtgatacgtatgtgtatatatatgtatatattgaaatataaagtgtaacatgtataaatataggcaccaaagaagtgctgccggtttacgacacttacaattctattaacgtatcaacaagttacacaaaatcctctaatgtaatcagaggatgaccctgtaataaaaaattaagggtttagagccatctattttttaaaatatcaaaatcattagcatcatcaatcccctcaaaagtcctcgtgttctgctctttccaaataacccaaaagagtaatattatatgtatatataaattcttctcgaatactataaagtcaaatatgtgaagttgactaagctttgtaattcaaataatgtgtattaggttccattaacaaacaaattgaattttgtttccttttaaatgctggtccaactttatctttgaaaaccccctaaaagagcgtcttttttttcggaaaagagaataaaagagaaagaacaagaaccaagaacatgatgttagaactttgatgtttttgttttctcttttaatagtacttttgattatttttgtactaaatatttaaagaattagtttttaaccaacacaaatttctgatggattaccagtaattttcatcccttgtaccttgaggaatgtgatataagacaaagagagttgaatacaaaacttgaaggaattttattaagaactaaacttggagatattggatttcaattactagatttcttaaataaattagaaattataattacattaaatatagaacagctatactatttaagagcctattattatattatttagagtattattataattttagtaatttaaaattatatttttattagggtcagaagtttatttttattagtattattttctatttgtattaagattagtgttcttaattctactatataatcattttatagtttaattccagttagaaaaaattatttaaagattattataaatagtgttgtaatttcatttattgttcatttaaatattcaataatatttttaagaatttctcacttttctggtgcatgatgtaatcaattttaaatatgatgtttaagacttttcacatgtgatatctaagaaactctaagtgtgatatttaggtctttcttcccaaatctctaattggataaatcaaccctatttgtcatacatcgttggaagagcccctaggataaggaacaatagaattgctggttgtaggttgaggattggagatactagattcattattcctacaaatgccatcatgtgccattcactgagttggtcgtgtccttggtagcatgcaagggagactacaagattcctattgtacttctcaacttctagatctctaatttaggcatctaccagtgaatctgaggaatagtgcatgagttgtctcttaaggtctgccctaagtccatcgataaatttagtaataatgatgcaaggtttttcttcaaggcagacgtaagtagcaattcttcaaacctagacatgtgtaatcactcgcacttgaagtcaactgtttaagactaagtaattggtcaaccaatcatctcttgtggtaggttgataaataattttctttgagcttttgtttcatcacatgttactaagttatggagggctcctccaggcgctcacgattcagttagacaacttgctaaactttctagctgaccctttcaatttcatcttagcaaaccggactctttctatgtctgtcacctcatagaattcaaagtaaccctccacgctgattagccaatctaggaggacatcataatcgagttgaccatcatagctagtaacatctatcttgacttgtttggtaatgccagatgtctgttcacttttccatctagattgtttatgattgtttcattccctgaaggtatgatggaattcccttgtttggtaagaatgcctagatctatctctaggttgattgatatcatcctcgtcaggagaaattacagagcgtttgatgggtgtgtggagaatttgatcagaattagagatagatcaatacatatttttgagtctcttagtctagagcatggtttatataggtgagatgattttgaattttttttttaattttttaacttatttttaaatattttacacatgcgtggtatccatttggtgccttatactttatacacattatttttatctcaaaaaacaataattcattctcatcaaaggctgacgcacacagatgaaggtcatggtaagggattaggaaaataggaaatcttcctatttcctcttattataagactttcccaaaactttatttctattataaaaggaaattaaatttcctattccttttagtggaaaaagaaaattaaaatttcctatcctttttagtgtaaaatttctccaaacaaatgttattctttgttggttatccttcagaatgtatatttaattttgagattactattcattgggagatttcactttttttttattggtcaataaacttagtcaggttaatttgcttaaatagttaaattgtcttgccaatattttagtccccatgctttcttttgtttgttcaagacatttctatttgtgcttggtgtaacttcgttctttttcttaattatcggtggtttaattaaaactaaatttctttactaattcagcctggagttactttgaaac

SEQ ID NO: 8849 - DNA, 270 bp, Carica papaya
  Intron number 5 from transcript evm.model.supercontig_199. 4 (locus evm.TU.supercontig_199.4) derived from phytozome v7.0 (chr-ID supercontig_199; pos 43027 to 43296 reverse s trand)
gacttgttcttcgatcaattgtaagttgggtatgctactaatttttgtgatttactttacttgattgttgatatgttgttatcatcctcagaatcattgtttaaactagaagtctaaatgctgtatagatacactgtgtcagtagttccgagtcattttatctttatttagacatcattattgtctggattatttcattgatttgtctcttgatatacgacttctatgtccttaggccctgcagctggagaaaaagacgtattcattttc

SEQ ID NO: 8850 - DNA, 2759 bp, Carica papaya
  Intron number 11 from transcript evm.model.supercontig_62. 59 (locus evm.TU.supercontig_62.59) derived from phytozome v7.0 (chr-ID supercontig_62; pos 414070 to 416828 reverse strand)
ccaaaatcaaggtaacaaacttctcgaattttgtcgcactaactgctgacattcttaaatttagcgtttgtagatcgagagggaaatagagaaaaattattgtggtttttaattttttctgatttttttttccacacatcacactgtctcctacaaaaggaaactaattacaccaaggatcctacgaatctttatagtcaattattccttattaattacagcgatattattatgaactaaattgcaaataaatattaagaatatagataaaatatttcaatactccccatcaacttagcataaaattcttcctttgccaacttggaaactaaactgtcaaactgttacttgtgaagccctttagtcaaaatatctgccacttgattgatagatagaacataacgcatacaaatgatcccattataatctttttttatgaggtgattggcaattttcatatgcattattctatcatggtgaataggattatgtgcaatagcaattgctgatttgttgccacaatgcaccttaatcagtagtggcatggagatctttaattcttcaaggagttcctttaaccataaaacttcacaacttccatgagcaacatatatatattcagtcttggcactacttctggctaccacatcagcatcccaatcatcgtccctgaatgttacaatccctctagctctcccaatcatgatccctgaatgccggtcttgaaaaaacacaataagagtcataaaaaataacatgaatagataaaattttgggtcataaaaaataacatgaatagataaaatttttagagaatatgttaacagtctagaggttaaaagttttgaaatgtggcgagcaaatttaagatttatatttttggaaattttgacaatgccttttcttgctatggaagagaaacttccatcagcaatttagactttttcatagccagaacaaggtgtataacaataaaatagattagatagactagtcatatgatcggacactcttgaatcaatgatccaaggagaggaatttttacctgaatgagctgtagaagacttcagaagcttcagaagttgatcaatttgctcctttgtaaatggactaggctattcgagaactacattagcagagtgctgccgttttttgttcggttttgaattatctagttttttatggataaaccaccaagtcccctcaaaacttctgttactcatctccgcagggtcagagaacccgttgctgtctcggctttgctactggaagctctgaggaagtcagaataggagagcattcatcttggggtgggcttactacttaaatactttcaatagttatctactccgcacttggctacccagcatttatcgtgggtacgataacttgtacactagaggtgtgtccttttcggtcctctcgtattggaaaaaactcttctcaatgctttaacgttcacattggatatagatcaaattgtctcatgatgttctaaatccaactcgcataccgctttaatgagcgaacaaccgaactcctggaacatactacagacctctggtgcggcgttgtttattgcaatggtcataccactgtcatgatatttcttctttccttcgtaggtttggaccattttacctacttgcatgggccttttcagtaacaaatgtcaactctttgtcatgctatttgattcatttttctttccaagtatgacatatcatcgattctcctcttaacgaacttcagaaagacttcattaatggagggcataggattcctccttataattcttcctcagacttcatcgtatttaacattaacctgcaaggaatttaaagacttgatttgtatcgataattgttcggtaccgaatagcatcatcaaggtacttccacttgtgatcattaaaaaggtccatatcctgccaaacacactttaaagaattgaaatagtttgtgatagatagattcattaccttgacaaatatcactaagcttcaaagtgggtttatacacttgggattgattgcccaaatcagagtacattttaggtaacattatcccaaagttctttggcagtagtgtagcacatgttattagaagcaatatcttcctccatagaattcatagtctatatcataaccgtagaattttatgcatcctaggttgcttgtgatggatctgtcatggctagcttctgaatagcacatataaggtaactaatttttcctcttcctctaatatacatctggactgactgtgaccaacgtataaaattgttaccattcagataaatggtgctaatttggactgttgagttcagagaaaacttaagaattatcggatgatgaacattaggtagagatatattgatgttatgattgctataggaacagttgttcagggtttggtaaaaaataattttgctctgataccatgtagattgagaataaaatgaggagaaatattctaattttaatttttttcgtatattataaaatctcttatttataacataagggcatcttatataaaatgaaaatacactaaggatcttacaaatctttctagtcaaattttactttttaattacaaatttttctagtcaattattgcctattaattacatagatatcattaaatactaatttagaaataaatattaagaatctacaaaatatttcaacagtatttttctcttagattgatttaaatgaaaatctttttttttttacataacaggaagaaaacaat

SEQ ID NO: 8851 - DNA, 1622 bp, Carica papaya
  Intron number 1 from transcript evm.model.supercontig_1.10 4 (locus evm.TU.supercontig_1.104) derived from phytozome v7.0 (chr-ID supercontig_1; pos 1702356 to 1703977)
tcgacgggctccggcgggaaaccgcccgagataccgtgagtgcttttccgaaaaatgagaagaaagaaatttggattatgatatggactgagtcgtaattaagagcaaaactacatgctattttaatttttgtagtatctaaccccaaaagaaattaaaaatcaatgcctctttattttcttttgcagcgcagacagtgctggtcggtgtccgtacgatcgcagacactaaacagtactgtcaaaactttctgctcatgcaaattagaaatgtttttgggtggttttgtaatataagaaaaaacgtaggttcaacgaagagaattcaaagaatttgaggggttgttttcttctattgcaaagaagcccttaaacaccgccgctattgcggcggtaatattgtgcctccttttctgagctcttaaaatgttcttcctgtctataatctccggctatcttttcttttttttttttttttttttacaagtgccagattttcgtaagtatagaattgaaaaagcgaaaaatttagcgtaataaagaacccctttgttccttcacaaaccgcttttgagcatctctccggatactgatcactttggagatattcttttcttttgattttatttatgacccatttgttgaaaaggtagtttgtgtatgatcttcattcactgcatacattaatgaattttccttattatatgatggtaggatcgaactcgatatatttctgcaagttgcatttacgtatctttcatgttatacattctgttgtatatacatgagggccaacgttcaatttagtgctctagttaacttaaatagaaaaatagtgatagtttgtcatgatatatatgtatgtaattaattattataatacaacgagcaactacgacttctccatttcttttctctatttggcttttagaggagatatttttatgatggcttttcaatttgacaaaagggtctcctcagtttcctttgaagatgaatgaaatgacgttaactaggtgagcatttgcaacatcttatgcaattatatagagttctcgagcatttattattagtaaatacaatgacattcatatttcaaggtgctaaattcgagaatcacagcttttcttcttccctttttagatttctcagaatatttccagtgcccaattggcttgatataaactggctggcagattaattggtcaatccacgcagcttttggaccttcaaactactttctgtgacccttaaccagctttgtacctttctgttcgttgtcattaattattggcaccgaagtctaatgcggtgctttgcaattttggcctcatcgttagtttacattgcttttttgagcaaatttcacttccttgagaagaaattttacaattaactttatagttagatgtgtaggtgatctttccattttctcaaaagatgaatcttatctggaagcactatctagtttctattagttctctttattacatatagttttggaacatcaagaagttctttaaatttttaggttgttttcatctttcattttgatgattaattgtttttgacaaattttaatttgtaggaataaagtcaggaagaagggacaaaagcgagtcc

SEQ ID NO: 8852 - DNA, 2577 bp, Carica papaya
  Intron number 2 from transcript evm.model.supercontig_66.5 (locus evm.TU.supercontig_66.5) derived from phytozome v7 .0 (chr-ID supercontig_66; pos 40098 to 42674)
gttattttggaagacatagaagcagtctgattcaggtatggaacattgatttaataatagaattcaaagttgactgcttgaaccttttgattcatgggtatggatctcaaacttatgatttccaaactcataaagaaagaaaggaagtgagagtggaaaataactgaagtaacatggacaagagtaacaaaatgtatacaattttttgtgttaactttagaccaaatattgattagtacataatcaattgaacactatttaaaatgtaccacaaaatcttgaaaatttttgctcccatttgaccatttgtatctataagtattaggatcctttatttcaaaaataagtattaggatcctaatttacagaatcactattttgtggggctgttaggactttggtctctttctaggaagtcatcagttgcacataacatcaccaactttcgaattttcgtatgctggagttgatcataacgaaactgtgctcttcctcatgaaattacaataaatcaggatattttgtgtcagctttattaaagttttactgtgggaacaaccccaactttaattgattaaaatatgcggaattttccactttccaggaaggattacctacagtgacccagggtttatggttgattgataatgcaaaaatattcatttagctgttgcaattcttttcctaattgcatgtcatgtgtataggactagctgggttattagccatggtcttaaatatattttagaagcccataagggtccatttaaagtcaatgctgtaaaggacgagatttgattttatgcctctgttatttgttaccccttacttttatctacccttgcaaattattctctgaattttaggaagcatgttccaagttaggattatatgtatggatcatgtattggacttgttagtagagattgttactatcaggaactttatataatcaactctggagatggctgaatcttcaaattttggttgtcttaggtcatgccaaaaatagtttctactttttggttagtcatagctgggtgggaggtgaaagaagaagtcgcatggtatgaacaaatgctacttcggagtggagcaagatcagtgggaggagaagggggtggtaggtaaaagaacaagttgtatggtatgaacaaatgctacttctgagtggagcaaggtcaacaaaaggagaaggggggtggaatttcaagaaaacattgaaaagagagaaataataaactgtttttgtggctagaataatttttataataggccaaatagtgaactgtagtttgtatcttttttctttctttctttggtgctttaattttttataactcctaccacctaccatcttttagctttttgttattgttaataatacaagctatagaattttttttaatcagcttaagtctatgaaaaactagtccagcatattatttaacatgatattaaagccagaggtctagtatttaaattgaactatttatgtaattaattctacaacaaggtagactagtttgtctttggtccatgcttgcaaactagcagacttctgcatgagggcctgtagagtataaataatgtattataccattttttatctgctttgtagctataatatgcaaaaaaagaagaaaaataaaaaaataatcgaatgagtagaacttggatcacaaaatttgatgttgcctgaagtgctggagtacagaagtgccacttctcccactcagtttcgagagttttgttgatccaatttgataactttaagtctttataatttttaccattttgttactggaaaaggaaatatattattagtatggcaccatggtcttactatttgtgtatgagaagtatgcagttatattatttacacaacataaagtcttgtaggtcctccttaagagagacgactagatgtattcatgagctaggttgcatttggtttgtttgcctgaccagccacattataataaatcaacacaatagtctgactaaaacatgtattgacatagaagaagttattcaattatgatgattgccctttttgcaatgtagcagacggatttttgaactacctcaacaatctaatatgcacctgctataatatcttctaaatgcagcctggaagtttagttaagggatattgttaattgttgaccgaggctgattctctatccttcccctccctcatgtttagttatttggtttgttcataaaactcagcaagttatatgaaaatttatttaactcttggtcttgaagctcctattatgcctttttcttcatttgtttttcaaaaaaagaaaaatcatttacttctttctttcactcttgaagaatttatcagtagctagtcttggagttaaaatttccaaatcaagcgggtttggtattcacaataactctctcatcaatgatggtataacatcattgaccagcaaaaaaataatgataaaagcaatttaaatctctttcatgaatcatgatcacattcgtgcctgaggggctatagtgaattcattgtgaattgcttatctgatggatggtttatctttttgacagaga

SEQ ID NO: 8853 - DNA, 1516 bp, Carica papaya
  Intron number 2 from transcript evm.model.supercontig_18.4 2 (locus evm.TU.supercontig_18.42) derived from phytozome v7.0 (chr-ID supercontig_18; pos 289738 to 291253 reverse strand)
aggtacgtacagactagggagcttgttcatatttcttaagattgagctgcatctgggatgtaaggaactgggttgggaaaaaagcatgcagatattaggtgggaatatggtgcacataactttgttgatgtgtattattttcttgctggcagtaactctatgtactttgtattattttttagaggaaaaatgaaacaattaaccagacacggagggttgctgccttgttaaaaagtaggaatttattgcttagtcataatatcagtaaggttccaaggtcctcatcacagttgagaggatgacccataaacacaaagcagatggtttgagagactgaaacctaaatttttaaaggctcttctatttctctcttccataataactgacaaagtagccaaggtatatgagaaataagtttctttcttctattaccctaatgaaggatagatagcaaaactatcaagtgatcaaagatttaacttttagtttcagtttggtctcattctctatttactccataaatctctcattggtttgctttggttatttttgcagttttaagtcactattatactgatctgtctagatattttgttcaagaaaataattaaattgctaaattcaggccctaatttttggtgagggctggattatgaagttctggttggttctgagttgatccagacctgtgaaagtccctaaacttgatggtagtgtttcgtacatgctcagttttgatgctaaatgaatacttctgcggttctttcatgtcagagtatgttaaccagatcttttgtggtatgataggacaaattacatctagatattccgtggtttatatcaaatagttttgatatttgtagtttgaactcagtcaggtaatacaacactgttgacttcaacacgggaacaatcaaatcttaagaagcttgaaacatggatacctcgtattgtactttctaaatggaaaaactaaattaaacctaaaacttcaaaatattccaaaaataaaaaaataaaactaaagaataaaatgtagaatacaagtttttgggaaaagtttagactagagagttatacaacaagtactgaaactgttaaaagtaaacagaatatattaaatatgaaaaacataaaccaaagaatatcaatccgtactttgccttaaatataactaaaagtgagaatataggattgctatttcaagtcctttgaagaaacttcctgtctggcatcagcgagtggttaaagctgctgtttggattctgtacatatttgtgtgcccctcgtcctcgaactgtatggaattgagtttggtggtgttttcttctggcacacagaccttcaatattcttgcagtgcctgtacatactcattttcatggttgatgtttgtttagaagcatgcggatgactcttcccttctttactttatttatgacagttataagactcgtagatttatttttattttcttctcaggcctctgttcgtgagtttgctgaggctatccgtgc

SEQ ID NO: 8854 - DNA, 3374 bp, Carica papaya
  Intron number 1 from transcript evm.model.supercontig_14.1 0 (locus evm.TU.supercontig_14.10) derived from phytozome v7.0 (chr-ID supercontig_14; pos 145556 to 148929 reverse strand)
aaggaggtaaaacacttgtttatatcctacttgcagtcttttctgtttttgggaatgtgattagtgttgttgactgtcattcttggtttcatgtgcataaatgattaattttcattcccactgtataaaacaagggaaaaaattaggagcaaaactgataattcttagctgagaggagggttcaaatgttatatatgaagataagaaagtcactattatatctacaaaaggaatcaatataacaatttctgtgcccttgagtttttgatatgggttgtctaaggctacaatcttgaagtaagcaggctgcttttttcccttatttcctccctttgtggccatgtagaattagggtttggggcttgttggaaagagaccaactatctcctagagttaggttcttttaaaactttttattcctagaaaatatgtagctgcactttgctgatgaaatagcttaaatatatatcgagaagaccgtggtaactagttctctgatttaaaggatcttgctggcccaatgaaagccaaattaaactttctgttttgccttattccaatttttagccagggatttgtaagtaacttcgaaatcagaaacctaggccaaaaacgataaagtttaatgccactgggatcaaagaactgcctgcaacactatttttggagagtcaaggatgcagggttttgagactctcgtctcattcatacagcctagcaagattcatggaaattgtagctagagaggaagtgaaaggatatttgaggaccgttacttgtcatttcaagagttctgggagagggtaatgttcttcgacttctttatgaaccaaagctcacgggaactattctaacctagtgatccctctggtttattggaattgtgagttgattttccctcctcaatcggctttaatttcattttttactgtaactgatttttttttgtcagaaatagtaaatgatgcattcttattcataattctgtggaagatgacttatttgctgcatatatattcctttttctccttttctttatggtatttctttttctattaaaaaaaactctacctctactgtaatatagtcttgaacttacaaaaatatgtaattcctgctcccaagcaagagagctagcatgagcagtttgttggtcgaacttctgtttaatattctttcactgagctatgctgttgtttcttggaagacttgccactctttttcttgtgtattgcgggcctgaaatgcatgctctattgttgcttaatcgtgtccatgatagttttgggcaattagccttaagctggacatctccttcaaggtgcaactagagaagcccaactttctcatctttggatgtctattgatttcagaatgagattgagttgtccaaggggctttgtgctctcatcaaaacgaggaacattgaatttagaatatttaagaacgtaccttcatgtagcttagcgaataggatttagaaagataaaaaaattaaaagaagaaaaagataaatccagtctacaatcgcgatgatcgcaacaactgcatttactattttgtcacaaggttgttaagcattcaatttagtgtgagaaaatcaatagtttctatttattagtggcccatgaaataatgatgaatcatccattcatttatcagggtgttttaacctaatatcactacaattcctaaatataaaaagtaacaaagtaagacttctaactaaggtagattcttaaaccaataatacacctatattagataacttataaataagctaaatacccttcatgtatagtaacaaacggtaagtaaataacattttataattttaagatatatcaattttagacttttttatttcaaaaaaaaaaaatcaattttagggtttttctgtttgcatcattctcctcctcttagtaaaaactcgacctcgagttttgaaacgtcgaagtagaagagaggttaaaacttggaaatgtcttctaaaggatgtttgtgaaacttgggagtgccttaggaaaaccaaaatgcttataaaactatgggttccaataggttagttaatcaatcaggcaacaaaaaattcgaaaaggaagaataaccgaagtttgtttatcacccattggagccaattttatttatttatttttgtgtagtctcttcaagttgagcctctttcttcttcattgaatgcaattgactaggatatcgtctttttctatttgggagttgtcaaattgagtgacatcattgtttactacaatattgaggtgactcagtttgttcaaaggaaatcagaacatcttctacaatgtccttgtttaccccatctactgtattgcttgattagctagatggtcaattcaatctgcaaagctgttgtcaacaagaagtgataaatcttggcatattgtggtcattacatcattataatcatgctggggaatgcattacaattttgattcttgcatcaaggattgtttaagtttagtggcacaactttcaagaactcttcctattaaccaatgggcaaacggtgaaactctttcttcatatgtttagacattttccactggtggagagggcaattctaaaaagatgtaatcactttcttgtaagggagtgatcataagtgctctcatgtatgtgggaacatccttttgttgaggtatatggacttcatgacttgaacattttacgacgaatccttcacacttaggatcagaactttctaggtacagtctaagtcttgcaatcgtttcaataattaagatatttttgacatgtttttgcctcatcttgtccgctgatatgttaaatgtagaaataattaactaaaaatcttattcatccgttcatcatcataaggaatctagtgttattattgtagttagctcatagatgcaacactcaacttcaagtttcacatcaatgtttgaatgcttgagaagttgattaacagtggatgcatcaagttggagggttcttgatatatatttgggagacaatatttagcttgatccaagaggcaaagaataggaaattaggagtactaattctaatacaaataggaaatattaaaacaaataggaagaatactaaaaagaaaaaaatcctacagttaccaaaactataatagactcctaaataacataatagttttacatttaaaaaaataacaatttctaatttattcaggcataggcttcattaccggtccatgtgtttctctcttgtgtttttattttacaatattgaccatagtagtttctgttaatttagttgactctatgaactacatcatgtcaacagtgaaaccttcttgattttcaggtaagtcttctgttagcaacaattgtaagaaaaat

SEQ ID NO: 8855 - DNA, 9948 bp, Carica papaya
  Intron number 1 from transcript evm.model.supercontig_56.1 04 (locus evm.TU.supercontig_56.104) derived from phytozom e v7.0 (chr-ID supercontig_56; pos 1272963 to 1282910 reve rse strand)
tctccctcggtggcgatttcagtatacaggttcctttccgtttgactcactttaatttatgctcctgtttttaattgtgtgcttttgtttgctttctgattttttcacttgctgaaaaaacaaagcaggagaggaactgagtagtttgctttcttttttccccccctccgtgataatggcttaggaaaaagcttcttcggtacgtagtacgtgctgctacttacagtagcttttcttgtttggtttctcttggtcattctacctgcgtattgctatgaatttggagcagtaaggagctaataattggatttttgaattttgtattttctattaagatatccgaagttttttgggagaaggttttatttatcttcgctggttacttctatccagctgaatgggagtattttctttcttcatacttgaatcgaaagggaactcttggactctttatgactgtgatattgtttcctctgtccgttttgtttatttgaataaaggaagtttgtactttgcttttgggaaaatttcttacaagcaagttttcatttaatttgaacttgcggcaatatttcctcaactttccattaccatgttactcgtattccaacaggcataagaaagaaaaggcatcaatatttgacattattgtatcccctcgtagagctgtatatttgattaaatgagcactttaaaagaagatgaacaacttcctcgtttatttgtctggatatttagcattaacgaattttggtgatggagaagccattcatttaatgtgaaagttggttgacggaaggagggagggaggggtatttttcctgtgaatttgtggtaatttgaagttgttgtgttggctgattgacgcatgcaagtccaaatatgggaagctatctttgcatttaggagcccttcacttaatgaacttgttcttgagactgctgtctgatttgcttacatgctagtgatattaaagcaagttatcaataactgctgcggcaatgctattaaatgcaagtatcagtaacctctctttttatagtttagttttaagtgatgtaggacaagttagcttgggtaccaactggtatatgacaataaaacaagagaaagaaagagaagagattagggataggactaaggaagccagctagtcaattggagagttgagggacagaaaagcaattcgggataggactaaggaagccagctagtgaataggagagttgagggagagaaaagcaattcaggatagaactaaggacatcttatatctcaaactcaataatctttgtgctcaaacgtcacgacacatgtacatcttaaataggagcaaatctattttaatagaaagcttaaagaaaagtctaaattgtgatacggaaatttcatatggggtaaattacataaaccttgccaagttttgacaaaatatacaaagaccatcccacttttaaacataaatataaagcatccttttttctttttttctttttttgaaataaataaagcatcctacacaaaaaccttcatactttttgcattgttagctattccattcattttgacttaccatttcactgcttagcactaaaattactattgtatcctgttaataaaaaatcaccataattatttgcaatttacctctacatttttttttctttttcattttttttatctttattgtcctcacacttctctggtccgtatacataaacgatttgttttattattagaaacctccactctcttcatgttttctttccctaaagcgaattcttttttatagagaaagtaagctaacatgtacagcctcaaaataaatcattctgtatatagatgatcctaagtttggtatttttgcaactgaaaatttcacaattgctcatcatcttttcttatatttaaccatcgttagcattttatattcaaatctttaattaaaattcatttctttatttggataaaaacatatgtttctttatttttttggttcattgcttttttccccttcattttcttgagtttttcactagccaaacaaacccacactcaaagttttgttatttaaagaaattggtagagaatggtggaggagaaaagacatacagagagaaaaaaagaaatgaagaagatgggattagagagagaggtgcacggattggagagagagaaataaataatttgttttcgaaataaaaagtatatattcactggcactaagaaagtggaagctgtatacaatatttacaaatcaaacaaaatatctatgatgtccccaaagtccttgataaaatacagcgaatgaccccttaacaaaaatttgatagtgtggatccaattatccttgaatttgtcaaagttggattcaattctcttgaatgcctttctattcatctctttccaaatcatccagaaagtagctagcagaatgagcctcactcacctgtccccatgaatgccactccaagcacataacttctcctttacagaatcagctatggcccagtccaatcccaaaaaaacataagtcaaactcactcacctatacttaatgttccttacgatgatacacatgaaaaaagggtttttgagctaattgtttctacatttaaattattaagtgattggacaagacagtaacatgctaacgaattttaattcttgcgatacttgcaaggactaagttatatctggtaatattggatcttgagtgtgaataattaatcatagaatgttcaagcactttctgaagtctatctgacaacaaaggaagaatgttcccatatggaagagatcatgatcacgtttttacagaaaaaagtggttgtatctcaatagaattattagctccacttttgcacaatgttcgaatagataaggaaagaatttcactatttgctcatgggtcagtaagagcgttcttgatagctgttcttactaagttacgccgtctttgctgcagtaataaatcttcaggaacttccctgcaatatgatagtgaagcagaaaccactatatatcactacttatctctttctatggagcgaaatgatctcactgtcattgatgataatgatgtagtaaccactagataccatgacttatctctttttataaagcaagatgatctcactaacattgatgatctaactcgtgagagcaagttaataaatgaggcaactgaggaggtcactattgatcatctgactaataaagtaagtcagtggataagataatcgaggagattgtgaaagatgctgcaatttctatcatacaaatgagtcacttggtgatgagtctctcaattcaattgcaagcaatgatgttgttactgttgaaaatgatgatattcttgagaaggcggccctacctgaagatattgaaaaaatttctttcctcctaagagcaatgtgaaaagtttggttattcttccttttatggattttgtcgttcctattctttacgtcttcaaaatccttgatcttggaagcattcatgctttctcattacaatttgaagtcccacaagcttcattattaagaagacaagttctaagttcaatattttttatgtttcaacatttcaaaacttgaagctgagtttttgccaagtggggggagaatgacaccgaacaggaagctccaaaattgatcatattctaataataggacatatgcagcagaaccaatgaaggaacacaaacattttggcaacttagctaaaaggaacaggaagatttgatttgatttatattttttggaaatatttgcaataaaggaaagtaggaaaaattactttcctattttctagatttccaatttcctattttttgatatttatcttttttactatttattaggttttctaaattttctattttgatgtatttggcacctacatataaggttacataatttagttactattttgtatccaattgaatttcgtaaatatcatagttttcttcatgaattttaggaaccaacctcttggatttgtagtttctataattttaagtttgtagtctcaaaccaatgaggacaagagccccatacccacaggaatttgaggaattttatattaagatggtacaatggttatacgttgataagcaagaaaaaaagaagaaagaaattatctagtactttattttgatactaattaaagttgtgttgctgtgtgagaagaagatagctataactgattcattatattctaaaaatacccttgacacaatattgacgatctcacaaaaatccaatttcagtgaacttccatttactagtctcatcttttatagtattgatcccctaaataatatatggagctcagcatgtctagaagaataggaaaaagttttgttgctgatgttattaccaatattcgatattgggttattcatagcattactatatcttccctatttattgctggttcattatttgtcaacattggtttagcttacaatgtattagaagccttcatccacacgagtattttacagggaacagaagtagactattcatgataattattcaaatattgagacactactttgattgttgagattcgcaatctccaagtttttgtttttaataaaattctctaggttttgtcttgaagcactttttctcctatgttagctggtaaagttcttttagtcatacatcagaaagtttaatactcttagactgttttggatgattttattagtgaattagcgtaacctacaatccaaacctagaccatttatactgctcacgtccatggcctcctaacaactaactttttggaaataaatctggaaaatgcatccctggatggcttttgcttgacaagctgtgtggtgaagaatcctcactattgttaatctaatgaagagaggctgtcttggttaatgctgctttctgtttatttcaaaaaaaaaaaatgctgctttctgtgcacgagagagtgtggatcccccagtcatctgttcatttgctgccccaaggtagctagtttcaggattctgctttttgattggctgaaccttaatccggtggttggagtttcaattgctaatgaattgaagttgctggatggtattagagtgggcaaaggcaggaaaaactctttattccccgttctatttttggatcatttggaaaaagagaagcaaaaaagcttttaagcccatttgctctccttgctagaataagagaccgctggctctagattttatgttctgtttcaaggtcatcctctccttcatggaattgatgggggacctgttagatattttagtttgacctcttctatatatatatatacatattttttccttgtacttagatggtaggtacttggtgccttatgaatgccattcactttccttattcaaaaaaatgattcctattcttggggtttctgtaggtgttatcattacatatttatgcatgtcacatactttcactttgaaaattagtagtttcaaacaaacaaacccaaatatccaagacatctaacttttacttagtctcagaaattaaaaattaaaaagacaactattacagaatctaaaactttctgctgctctagtcattttcctttccctttgctaatattgggctaattccgaaattagagaaaaatctcggtaaatcttatttgctaatactgatttctgtctctattttgccattttgtctgatctggattatgaacaaactggatttcgaataacaggatccagattgtagttcttgttggggagagggaagggggtctgctgtgactctttcattggttattgtgagagtccaaatattcttcatttgtcatcttcacaagggaatacagagaggttagaagatttatgagaccaagtaggtaataagaaatcgaatcttgacaaatttacatatatgctttaatctattgaaaaggattgcacacgttacttaatatcaattgatattatatgtttatccatccttaaactatgttgaacatgaaaatcttatttgtcatgattttgataaaaaaaatgttcaaaataatagaataaatgcttcaatttctgaactagctctttgtcttgggggaggtgaagtgtaagattgaagtttcacctcttctgaggagatacattactaagattggcttcatgcattctagccaaattttgtacttctgctcatctattttggagtagtaattacttcctatctggaagaatcatggatgaattgactttgtacagtctttagcacaaatcgcacccttgaagcaattgatactgaatacaagcttgcaaaatcaaatgattgctttattttctccagtaactcatagcactcagaaacatgatataatacatccttgtgatatgataaatcaaatgatggattgtgaccgagagaggtctattgaattcaaaatgttcatctctccttttagtttgccaaatagaaaagaatagaagttgcttcatgagtcaaggttgatgtctcatactatttacacagctttgataatagttgatgcaggagaagtaagacaagggagagaacaggagaaatcagggccaatttggtttggattatataataatacaacaagcattatcaggaatccagactttaggaaaatgatcacgggaatatattatttgtgtatttggttaaattgctgaggttatttggaaatatttcgtgatgttaatgggaaattttattgttttgtttggattgccaaaaaatattgcagaaataaaaacttttggagtcctttagcacttgtttcattcgagaatattaatttgttatctaaattctcaactaccctccactagaggtaactctctccaatatttaaggttagtcttaactacgcaattttttactccaacatccacaagagagatcactgatccacccacattactcagaatatttcatagaggagttcaaccaaacactgtcttaaggatgagaatgaggaaaccaaacagtaaatagaagaatttaaggagagaaaatggaagaaaaggggagaaacacagaggaaatatcaagaagaggagagtactaaaagatctaatatccaaactcaacaaactttgtcttgacctatctagaaaccttaacagttgcttttgtataaatgtgaaactaaatctattaaatgtaagagattaactaaaagtaaaccaaatcaggataaggaaagcaaataaatatccaaatagagaactaaataaaaacccaaaactgtattttaatttccaaaaactactgtagttgttaaataccctaagaagtcctgtacatgtaaaattttaaaatgctgaaaacatcttttaattttaaaatgctattgattagcttcttattgtggtggtggttgactgccttaccaaatatggacactttttggacttgagacacagtcacagcagctaaggtggccgagctttttcttgacagtatccaaactacatgaaacacccaaggttttctctagcttgttttgggaggaactcatgaggttgttaggtaccacattgcatttaaactctgcataccatcctcaaacagatggacaaacagaaaagctaaactagtgtctgaaacctgcctttgctgcatggctcatgataaactcggtcttggtttaggtcgttaagattagcagaatggtggtacaatactaccttctacaccagcattatgatgacaccctttcaggcattatacgactaattaccacctcattttgctgacactgttgaaattgaaactctcttagatagctagaagtgttcctggaagagaggcaacagatgtgcagaatactcaaatagaaattgctggaggctcaaaatcgtatgatgcaatttgctgacctccacaggactgaaagacagttcgaagagaaggatttagtccttctcaaattccacccttaccggcagcaatcgctggccaaggaagggagttccaagttgtctcctcggttttatggctgtatcaagccccatagaatgtcagccctgtagcttatcgcctcaaactattagaccatgcaagaataaaccccacattccatgtgtttctgctaaaaaagtatataccaggaaggtaagattatacggaagagttaccacacattgatttcgaggaaaatgccaccttccagcctgttagcttgctgcagaaaagggtggtctctaagaaacaaaaaatggtggaacaagtcttggtacaattggacggattgggagatgaagaaaccacttgcgaggatgttaaacacttgagacagaattttcctcacataaaccttgaggacaaggttttttccctaagggaagcaattgtcacaacccatgagaaaaagggagtagatgataacaggagcaagagatccaagccccttttggtctacaagcgccaagcaaagggaatattgctggtggttgtccaggtttggcagagaatgaacgaaaataatgattattgtactataaattagttactccatttccattctattatagttgttttgttaagatttcattagattttctgtttgaaaatttcaggtggaagtatatattggaattgtagcctggtcctcaagcagatgaaatttattaaattcaaatctacgtaattcagagatcctggtgaagttgcagaattttatctctaaccttttttgtcttccttatctccctcttctctacctctttttctttctctctgtctttattcctggattatcttctttcaaccatctcgtccatcttacctattccttactggaatacatgtcaaaggctcctgatacagacccctaagagaaatgatctggcatttggatacaggagctaaccttgtgcctatgtgctgctaatcccagtccgaattacataatgctttcttcatgtgtcatgaattattttgctctttgcaacttggcccttcgtgcattagcctgtagaacttcttggtgctggaaaccagacgaggaactgcataaatactaggtttcagctttgcttattaggtgcttataatatttgtattatataccaataagcacctttacacagcaaaaaaaggtgtcttccccttaacttcttctgcatttactcaaaagtacatattttcttatttttacacaagtttaataatttactgacaatttttactatttttatataatagaataaacattttgatgataaatattttacctgaacctatatttcaaatcagcacataagtgctccaaacaacttaaaagcacctagtgcatactacaggtagctctctttaaaagtacttcgtcccccgcatattagaaatcagggaatgtgagatataaactgatattggtagcttttgaactgcataacgtatattaatttctgttatgcatttgattcctttactttattggaccttagaccttgaaaatagattctgtttttagacacatcttgaatctatttccttgttgtttagcagttagatatacaatgatccggtgatccatcttcatgcttctttttaaagaaaatttctttggatgtaactattggtttggacatggttatctatatgttgcttcgtatatcctctaactaaatgttgaataattatgtccaacattacgtttgtatttcaattcacaaccagaaacatggtcaatttaaccaaaatctgcttacataggaattcctttaagtgcaagagtggaaaattaattatgatttctatagcattgaacaaatgatgctctgtttattgttgggtatcaaactgcctaagcacatattttctactctacaggcaactgctcttattaacatataagaatttggtaatgatctggttgtaaaaattcctggttgcaggttttacagaaggcactagaggtttgggatttgca

SEQ ID NO: 8856 - DNA, 1216 bp, Carica papaya
  Intron number 3 from transcript evm.model.supercontig_51.1 1 (locus evm.TU.supercontig_51.11) derived from phytozome v7.0 (chr-ID supercontig_51; pos 177511 to 178726)
aacaaaggaaaaattttaggaaggtctgtcaactgtttcaatttttttttctggtagaacagtcatttggatgctgattatatatgaacataacaaaaaaaacccactagtaaatagggctagggtggtctgatcattataactaaattctttttgccatttcttggaaacctttaaatcagtaagtcttcttacgtttctcctcctttgaaagtcttgtagtagttgcttctgagtttatgaaatcattctctctgtattctgtgcatctattgatgaacaagtgaattatggaatcttcttacctttttcctgtttaaaagtcttgcattagtagcttctcagtaatggtatcattctctttgcattgatgcatctcttgatgaaaaagtgggaattgtgttttcaagcaagttcctaactgcataactgcagactgagaaacgaaaatgcttacacatgtatgtacatgtacataactttgcatgtgttttcctctacatatttttagatggttgatgatctattgattgaaaagttgctgtccgtcccacctatttggatgctaaagtagaaagctgaccggctatggaaatcagatttagtggttgttagtacttttgacacattataaaacatgcacatatatgcttcatataatctgttcgtagtttgtagtttgctcaaatatgtttgatttttggtgcccctaaattttgaagtgtacttattttttcttgcaaataaacaggatgtccttcacattagtgtattcttctttacttttgttattacttcgcataacaaagtagttgtctttctgtctgggggaacgtaaataaccctccagtttgaaataggcagtatctttgtctattttgcaaagacatttgctgcaatttttacattggatttcactttctccatttgtgtcttttctttgttctaggggatctgttgcccttgatatttacactatcttttaatatttttgtcttttattgtgtctttatttgcgaagacatcacctccattgacgttctcttctccacttttatcaaacattatttcattttcatcaaaagagaaatgacagtgtcgctacaagtatttcactaacataatagttaagctacctgttaatgtttctgtgacaacgaatgttctgtagactggaggtcatataattgcatacatcaacaggtcaaggaggaag

SEQ ID NO: 8857 - DNA, 493 bp, Carica papaya
  Intron number 10 from transcript evm.model.supercontig_1.3 03 (locus evm.TU.supercontig_1.303) derived from phytozome v7.0 (chr-ID supercontig_1; pos 4185237 to 4185729)
gcagggtaagtaattaactatggtagagcttgatgcatatcatggttgattaaatttttttttttttgaaataaaccatggtttattataatgattcaggaattggaataatgtatgcacaaaaattcttctgttttgattctacaaatactagtctgacgctcgttatggaattccttcttcccagcctaaggcttcttcaccacctcctttcctgaaaaggaggaaaaaagaaagaagaaaaataagttcctggaacaacttggtgaaattactgacattgtgtaacttgtgaatgttaatattcttaacagagtttggatggctgtgaagaattgtaattgatctctaactacatatttttatctgaaaaaaaatatctctaactgcatatttgaagtctgattagttgagtgatatttctcctctagccttctcttactgccttgaatatgctcttttcttactaggttatctaaagaagcaaaaaaga

SEQ ID NO: 8858 - DNA, 5796 bp, Carica papaya
  Intron number 1 from transcript evm.model.supercontig_678. 1 (locus evm.TU.supercontig_678.1) derived from phytozome v7.0 (chr-ID supercontig_678; pos 16923 to 22718 reverse s trand)
aaaaatctccaagaaaggaaagagcggtatgactactatatccatttctcaagttgcttgctcaaaatatctagtggttatattatgatatttttgtgttctacatgtatccactaccactaagtcttaaacaactttattattattatttttttgaaatagtcttaaacaactttattctcatatagcagcaatataagtagtatgaagatgtgaccaatgagtagaaagtatttagttattcttgtggtcattttgcagaaaaccattggttctattgatttcacattacaaaacattattagtttatcgttgacatttatagaagcaagtctttacttttttatatcctgtataatagattctccaatcaccgaactgttggtatatgagaaatattgtgtatgaaggttgtcaaggatctgatggttctcgttatcccttagagtgttgtagatctctgtagttgttgctctatcattacatatagctgcaatgtgccactcgaaaatttgatagaatcttctactatcagaggacttgtttttaagtttgctttaacctcagttactttatttggaaaagttttctgaaaactgaaaacattatcttatttataaggacccctatcaattaccactctagttagtaaacattattttatttaatcctcgaccttgatagataataaaaacacttccctctttttagggttccacgggccaaaagacaaggggaccctcgatcctcttttctctttgtagtggatacagaggccttaaactgaatgctgactagagctagggaccaggacctattcaaaggattcaaagtcagagagggtgagagggctgggtaggtgattctttgaagatgacacacttttgttatgtgagccggatccaggagctcttcttaatattagatgtgtgctctttagtttttaggctgcgttgggtttcagaattaatctcacaaactcgaaactggttcatctggggaacaacttgagatcatgtagtctggctaatatcctgggaggtaaaattgttaatctccctgtgaagtacctggaattgcctttgggtgtgaagcacacatatgtctgtctctactagggatctagttgtagcaaggtttgaatctagactgtctgagtggatgatgaatttgctttccagagagcgtaggttgactcttaccaagagccagctagtattcctatataccatatgtccatgttgacaattcctgttagcgtgacaaagaaactggagtccgttcaatgtaagttccttttggggagaaattgatgggaagaggatataccaacttgtagcttgggaaacggtgaagcaatcgtttcaatttggggaattggggttgagattcttagttgttttagtaaagccctacaaggaaaaatggttatagagatttatgaaggagagtgatagtttttggaggagagtaattgaggctaaatttggcatggaagacagggattggttcatgagaatgccaaacaatccttatggggttgggatgtggaaaggaatttttatgagaagggatgagtatcaaaaatgcattgaatggaaggtgggatcagggaagagagttagctgttggcaagacagatggttggatggaggattgcttaagaatcaattcccaatgatttatggcaaagaggcttcatttagggattctttccaaggcttatcagagaatggtacatggctaatcctaatgattgggaatcttaatgattgggagtttagtgagtacatattgcttctcaaattggtatgtaagaaagttcttaagagggacatggatgaaccgatttggggcttaaactcaaaaaggaccttctctgcaaaaatctttctacttgtgagcaaatcctttgtgagctgatttggaaagtcaaagcctagccaagcatggcttttttttttttcatgggaagcctaaccgtagatattttgataaggggggataatgttttggttaatggatgctatttgtgtatagagatgcagaatcgcgtgacagtatcattttgtagtgtccttctatgtataggttgtggtctatcccgttagctacttttggattttgtggaaggaaaggaacaagagaatgttcaagggtacaagggcaagttctgatagtcttaaagattctaggttctagaccctaggttttttggttaagggtcatcctcgttattcatgtgagggcctaggggacttcattgatattttgattgaattgtaattattttgtatatgagtttgcatccctttagtgcttgtaaacataataccatttttactttgaaaaagttattattaagagaaagaagtttgtcgactcagggatgataaaggtgtcagcattagactgcaatcatcaccggaacagatcaggaatatttaaaatcagtatggatgtgtttgattaatccatgtttggcttttcgctttagtagattagggtggatgtttggcttgagactttgtactagttattgctaatgggatgaactattttgatactgttgaatgaagttaaagaagtcaagaagggcacatgtgcctgcagctgtggtcaattgccttgtgatcaatgctctgtcaatttaaatcattcttgaacgttttctacctggagtggattctagatatgtgtatgcagataatttgggatggactggaaaggggaaagcgcttatcttgtagcttattaactgggatgagataggcatacaaaggaaaggattttcactggcacctaaaccttattaaggaagtcagattacaatgttgatctatagatattctcagctcttatagctgtgaaatttagaggagtattgttatgtgaaggagatcaatctgcaatacaatttttttttcaataggcataccttatggggatttctgctgattgatttatttagatttacataatgatttcagttctgcaagtaaaaactaagcaatgaaaatcggtagttaataactctagattgttttgtttggagccatacagttgaggccttacatttgacttgaaatgggttaaccattgtcaaagttaaactcatgtattagcaccgaacaagcaattggtgccccatattgagtgtgtttttattctttatgcatgtctatttgtgtataataagcatataaaacaccatctaagtatgtttttgtggttcaatttagtttcatattcttaatatttgatgtcataaaaaattgggcagattgcagaaaaccctttgaggtttcataaaatagacagacaccacccagactttgcgattattagacaacctcctttgtgataaattttctaacaacttctcaactagaatacctcaagtacgcttcagtccttattcctttacccaagcaacccctttattttattccaattcctataaccgaacaacgttatcaatgttcccaaacactcataatgccagtgctaatactattctattcagtagtgttgattgcttctaaccacagaagtgatgtacactgctttaagtctctactgagcaaagaatttgatatacaaggccctggaattgcaaagaaggtttttgggaatggaaatctatagagacaggaagaagaagaagctttgggtttcaaagagaaggcatatagagaggctgttagtgttggagaggtttgacatggacaatgtggtaccactttctaccccatcaacaaatcagtgatcagatttacagtgtccacagacaaatgatgacggcaaattgatgtcaaaggtttgtggtgctattgtggttcgtcgtttggtgtaagtaatcgtgtatactaggccagacttggcttaagtagttagtatggttagcaagttcatggctaatccaggtaaggaatattgggaagccatcaaacgggttcttcagtatttgtggggacatgttgattatcttattgttttgcaccacttatattgatttgctatgagatatgtatatatagattatgctggaaatttcgataataaaagaatctatcacaggatatatgtttatgttaggatcgctccaataagctggaggttgacgttgcaaagtgttatcactatgtcaacaattgaagtaaatccatggcaataataaaggttgaaaaagaggctttatggttgaaagcgttgatttatgcaatggcattgatggagcaaatgcttggactatataatgatagtcaaaatcctatatatttgccaaaaagtcaggtctattatgctcataccaagcatatataagtgaggtttcataaaattgaagaattgaaattgttcagtgctatttcactgttgaaagtggatatggaggataatacactgatatgttaacaaatttgggggctggatgtttgtggaggcttggaacttaaacattgtatgtttgtggaggcttggaagttaaagattgttcagacttgcttcatgttgtttgttactagaatagtttttgagatagggctcaaaggtagaggtttggtctctttgttttatttttttccaaatggggataaatatttctctaagtattgccaaggtaagaatttgagttgcagctcatattgggagaattcgcaaccacaaataggtcttggtgaaggggtgtggtttctcccacaatagagtacaccattttcggtcttgggcggttttctatcatggagagattcttgttaaattggattttcttcttccactacaagtaggaaaaaccccacttggcagaggcggttattcaataatgaaaaatttcataggtggctcacggagttggtacatcgccgaaccttgttaaaattctgcttattttctttctctattgcttttaatttaagttttagtcttgcatgggtactttcatgatgatgtctttgcggcagtacgccatacaccggatcagttaaccggtcaggtttgtaattcctgggcgtagcattagtcatcttcttcaaaagggcttgtcctcaaatacaaaatatagatattgatgtatctgtttggaggcattttaacatggggtatcttgggagaaagtcctccctcgtgcaccataagctcatatttgcatgcctagaactggtctaggattgcttgacaaacatcaagaatcttgctcgaatgaactatttagccccacggaatttttttaaacaagacacatgaacggcctagtaaatgtgagcttccacaggcaaatcgaatttgtgtcttacttctccaattttgactggaatgggaaagggccaagaatttaggaagcaatttcttaggtcctttagcaactaaggacactagacaatagggttgaagtttcaagagcctcttgtccccccacattgaatgtgatgtttaggggggattgccgtaagacaatttcgtggcagcttgtagcaaatagtcctgctagtagtatgcagattatttatgtggacattttagaaaattttcttcattatttacaaaggaatcgggaggctgtcttatcttaaaatcattcaacttctcctcttttattttctttctttcttttttgtttatttttgtattggataccttatcctcattttctaattctttttcttattcttattaaactcttctttttcctatccaaaacaaaactgaaagcacctgctcagtaaccttgcaagataaatcaacatgaccaatgtgatcactattttggtaatcatgattttatgcagacgcaat

SEQ ID NO: 8859 - DNA, 5589 bp, Carica papaya
  Intron number 7 from transcript evm.model.supercontig_17.8 8 (locus evm.TU.supercontig_17.88) derived from phytozome v7.0 (chr-ID supercontig_17; pos 1138758 to 1144346)
gttggaagtcctgatctaatctccattcaaggtacactcagttgtatttctcattggacaatggaacttaatagaaattcaggaatgtgtcaaaccttccttcagaattgttcttcctctcttctttatgtgtatactcatataaaaatattatatgaagtttatctgctatctcgaaaagttattattattgttaatcacactttactgtgagtgcttaatagttttttaaaactcatggataatatatgcagtgcttattctgcggaaatttgtatagattaaaaatgaaaagaaacagtgaaattgagtaaacagggatttgaaagaagctgagaggcaatttttgtgatgtttctataatgaaaaatgaactccacatcttttcccttaaaatgcatgtaaacttatgtgtctttcatttggtaaataaatatttcttatgcaatgtgatttacttttctgcttcataattgatgcttatacaaaaataagaaaataaatagtatattttcagttccaggctacttgaagaatgagatgagaaactggataagtatttgaaaagcatgttattctttatttgttggtttgttgctttgtattttttttgttctgtacacttacattatttgagactgttcagttttattctcaatgcaagtatattattggtccttgacttgccttccatattgttcggattcaactttaatatatagtaagatgtagattgaagtcttcagtcactgtggtagctgttggcatacctttgtttctttctcaagaactctttattgaatagaaacaacaatttgcttagcagggatattgggatcattggttagctgggatggctatatttgtgggaagtcaagcaaaaataagtctatgttcttaacttcagtggattgcaaggacttcccatacgaagagtgaaatatgatttttttttctcattaagagtaacatatattgtcaagaatggttgagtgtgtattttattaaatagtattcctatacatacaagtttatagaataggaaaggaataaaccatcaattatataaattacataaggtatgttttgtcttaatgcgctttaatctaattactcactctctttaacactctccctcaagctggagaaaaatactatcctccagcttgccaataataacttgggatgctggattactttagtttctgtcaacacatctacaagttataaactgattggcatgtatggggtacatattaaaccattatagaactttttttgatgaattgtttattaacctcaatatatttggtttcatcatgttgcatcaagtagtaacgtttttggtcaagttattgtcatagtataagcacatggagttgtcccacttggttttcagatcatctaaattctctttagtcataataattcacatacttaatgagttattactcgaaaatctaattttgcactcgaccttgcaactacgttttgtttctgacttatcaaagtaatcaagtaactcccaaagaagatacagtaacccgtagtagatattttgtccaccattaaccctgcatagtctatatccatataagcgtctaggagtaacctatcattcttttcaaatatgatctctctcccaagggaccctttcaagtagtgtagtattctataggctatctataagtgtacttttttagagttgtacatgaactatcttataatacttattgcatagacgatgtctagtcttatgtgtgacaagtacattgacctttacatatccttatttactggtatattctcttttaccagttccagtttatgattgggtcgataggattactcatggcttacatactagcttacccatatatcttaacaagtcatgaatttattattgttgggaaatagagatcccagattttgagttggtgactttcattctaagaaagtacttcaacttaattggcttcttgatttcaaattctctagtcatacattgtttgaataataatttttctttttcatcatttcctattatagtaatgtcatgaatatatactaggagagatataactcccggtctcaaatcttgataaatataatatgatttcttgagtctgcttgtatccaagcctatttcacctttgcaaatctaccaaatcatactctatgtgattttgtgtccaagcctattttacccttacagatctaccaaatcatactaggtgattgcttgagtacatagagcttctttttcaatttacaaacattatatggtcttatccttctgtcaagttctagggggtctccatatagatttctttttgcagatctctatgcaagaatacattcttgacattgaattattgcagttgtcaatcaaaatgagtaactaaagataacaagattcgcactatgtttatcttataaattagtgcgaatatctcttgataatctatctaataggtctggatataggtttttgctaccattcttgttttatacttctcaattgtcccatctattttatattttattattgtaaaataacggaaaaaatgggtaaaatattttttgtcttttattccaatgggttaaggatatatacacagaagagggatttataatggtgacaacataaatcaccatattaatttataacccataattatgtcactatatataaaaaattaactaatgattacataggaatattttgtaatacattatgtaatattgtaacactctccctcaaggtgaaacataaatactaatcatgcgtagcttgttgtggacatattctgttcgagttccatttaaaacttttgtgaatatattatctagttgttcctctatcttcacatagttagtagagattaagtttttctgaattttctcacgaataaagtgacaatcaatctcgatatgtttggatatttcatggtacattggagtagaggcaatataaatggcaagctgattatcacatcaaagttgtgcaagtaatatgagcttcaaccttacttcagcaaaaagtgttgtatttatcaaatttcacatgtggactacgatatacctctgtattccaactcttcactggagcggaacacaacggtctgcttcttacttctccatgatactaggctttcccaagggaaaaaaattatgagactatgaacatttatataatggtaaaaattgtgagataaaataaatgagatgtttaatacattctttgtttcttttacaaattgcaatggatatattataatcaaactatgtagggcttttatggcttaatttagaattcgtgtctgattcttgaacttgctttggctcaaaactcatattcttcctccttgtgtatacctgagggaacctagggtcaaatatggtttcttgagtgggtggattctcttgcgaagtagtggttgagtgtgtgataagtgtggtggtagggtcaaagaagaactctgtattcttattttccaatatagactcctcctgaaaataaggttgagaaagatatggtcttgtttaataaaggtgtcatctataggtgtatagaatttttgaatatgtgaatggtaatgtttgtactcctttttgaaaagataagtatcccacaaacacctatttcaggactcaatgatcaagttcctcatttgatattaatgaatgtgaatataagatacaaactaaaatatctatgggactagatagtttatgacatttatttatgggtagaatctgaaaaaggtttttaggggactttaaaactataaggtctcaacggtaagtggttaataatatatgtggcggttttaccccaatattattttggaagtggttttggaataaagactctagtggttgtaagaaggtgaccattcttacgttcaactgttttgttttgttctgaagtatggatacatgatgatccatgaatgtaaagagttagggaagaaacatgatgattctccattgctctaattattttcctcggtctcaacaaagtttccttttttgttcaaaaaaaaacatagagcccattctgttccctacctagttcaatccttttttctgagttctgttcttgtaatatattgtaagaatgataaaaaagtacgtttctattaaaaaacaatgcttatcgtgactaagtttctgcatgcatacgaggttggtaaaaaatctggagacagagagaatattttttaatatcagggattgaccaatgcaaatatctcatagaccaactgcagtattgtgaagactatttgcaacagttatctttcgcttactcggtcaggaggtataacttctaaaatttagtgaagaatgggtcagataatcgatggtgtcagagttaataattcatagaattttaatcggttcatttgagtagttaatccttgtgaaatataaaacacacctgagagtgcaagaaagcatgtagcagtaggcttctctaatgattttagaaactcctttagaatgcgagaaagtatgtatcactaggattctgtaatgattttataaacccccttattttcttcatctcctcattattcggttgttacatgttaagttgactttgcctttattttgttgtcctcagttaccccgctcattgtatggccagttgacctttcaacttcaaccccttctcttcagcataccttaatttcttgcaacactagggatcctggtggtcacttgctgaggatcttgacaagtgtccttacctttcatgtactgacattctctcaatttttgttactattgccaaccttttggacttggaactcaagcataaacctcctctcctcttccctccccccccccaacccagctcactcatttagagatagtacctcttaagaagagggttgattgagtaaatcctttgataagatatttctttttggaggttttattcaggagaatgactttcattttttcttttgtatatgtttcctgtttacttctctatgtatagcttatatatatagggtcaagatgcatctgtaattcatatagaatataatacaattctctgattgtatcaattactgtttaatcttttggaattgctaacctaacttatctaaaagtcgagagcttttgaatcttggctatcctatttttattaaaaattaaattttaattttggcataagatatggtaaggttcaatcttgggtgccttatttttattaaaaattaaacttaaattttaccacaaggtattttaagattatgcctgatccgaagttgcccatgaggggtaaaaatgtaataatacattggattattttcaattagtttaggcttttggaatcattggtaaacccatcctattttatcacatgctttggtgtctagtctctttcttcaacctcagtgaaaatgacttagttttccctcaatgaaatacttacacgtttttttttcttgggaggagtaaggttataatccctgcattatctttctaatttacagctgatacattagctctccaatctttcaaaggtttcatcatgtacatttaattggtgctgcaggagagacaggaagg

SEQ ID NO: 8860 - DNA, 6088 bp, Carica papaya
  Intron number 3 from transcript evm.model.supercontig_163. 30 (locus evm.TU.supercontig_163.30) derived from phytozom e v7.0 (chr-ID supercontig_163; pos 517673 to 523760 rever se strand)
tgctggtcaggagagatttcgaacaattacaactggttagtcttccatagggaaaatcaatgactttcttttctcttcttccccacttcttaatccttaatccttaaacccatgattaattagaggatatgaagtatatttagttcatattttcctcagcgaaaaagaaaagatatgactagaaatctaggatcttttcttatttttgagaatattgaaatcaactgaaaatttagttcaagtttttgaagaatatggatgtagacaagaagatattattttggaacaaattttcaattaaagattttttttgtgatagttataattatttgtaattttaatttatttagcctacttaggttttggcattataatttcctatttggtcgatttaaagtactataggaattaaaatatttagagttgctcttttatattttgcttattagttgtggctaatacctataaaagctagtagctatcaacaaagaagattaatagatgatagtgaattagaaatttctttgctagggttttattattttttatctctctgtatttgttcttcgagtcattattctaacctttctcgttcgatctagttctcgttatacttctgcaccttgatctccaattccctccagttttatctattcttcggtttcttgcctaaagtttctagatttctatgctatccctataacaagctagtttaaccgctacatctcttgtttcaattgtcatcagactcaactttcctgcacttttaaactgcataaaggaacacaaaaaaaaggagaatttcccaccatgtccatccaagaaagtttgttctgaaaaaaagagaagccaaaatattttactatcttcgatcgtcaataatcagcagggagtagctacactgccattccaactggaaccagagggctttggctgacctctttgttgatttgcaactggtgattttgtcggagaacgcgagatgaaggcctatggccactaccacaggttatatcaaccacatgaaatagagccatcgtaatgagacaaactcatggtaggaagaatgacccttattgaagatgtacgtcctgcacgtgcgattatgagtaggaattttttcaatgtccagttcacacagattgccagtctgatttgtctacactggttcagatccttcctcactagtttttgatcagttccctaggtttttcaatatgttctatccttcgtcactacttagatttcatgttacagtcactttcagactaaatctctgtaaaggtggctactcaacatggagtccaacaaatttttagttacaattcataaagagtatttggttctcatgaattcataaagagtattcagctacatccatagtatactcaaaaattaggaagcataggttatgaggaaaaatcaggatcagtttccgtacgtaggaatttaggataaaaacatagatatcacacttagggtttcttagatattttattaagaaattttaagtatcacatttaaaggtttgattgcattaaacaactaaaaaattggctcaaatattttattgaaaagttgaagattatcccaaaattaaatttacaaagatatttatcgtgcttcttttttttttttaaaataaaagtataagatttgtattgattaatggtgccaagggggcaccgtgcgtatacaaaagatttacaaatcggttagagtatcaacaatgaagcctatgtcttcatggcaatcaattgtatgccccaagactgtagaaccaaaatagtgaaaccaatcttctaggatgactctgaattttacttcaattccttcaaaagcccgtttttcctttctttctagatgacccaaagtatggtgagaggaatgattctgaactttttcctattgctgccaaaccattcccaagtaaaaagttcagaagaaatatattcgttcctgacccaagactggccaatcaggccgagcgcagtggaccacagcatttgagttgtggggcaatcaaggagaagatgattaacagattccaagctgtttttacaaaggaaacatctattgacagtgatgatgcccctcttcattaagttatccaaggtgaggatgcagccttttgctgcttcccaggcgaagaaagcaattctaggggatgcacccaccctccaaatgatgttagagggaaatgggcgggtccagatgtgtagatgccctcaagaaagttgtagaaagatcttattgtgaacttaccgatcttggaagaattccaccacaacgtgtcctcttgctcggtaagatggatagagtttaaagtttgcaagagtctctcatattcctctatctcccaatcgtgtaaatttcttgtaaccatgatgttccagtggccggggaggttaggctcggtggcatctttgacaagcatttttttgtcctgtgagatatcatgtatgagatggaatctggctgagagtgtctgagccaagccagttgtcagaccaaaaatgcactttgagaccgttgccaactcgccacttagagttctccaggatggggttattcagctgccaaatggctttccatagactgaaaccatatttcccatttctgatcccttgaaagtccccgttgatgaaccatttgctcacaatgatagatccccataaactgttgcattcatttcaaaatttccaaatccatttacccagcaaggctttgttgagtggtgtgagtgatctcaagcccaaatcactgactttgatcggtcttttgatttcattccagttaacaaggtgcattttctcatttgagtcatcatcccctcataagaaattgtgttggatggattctaacttgttggcaatgctggaagggatgttgagaacagataagtaatagattaggaggttggagagagtgctcttaatgagggttggcctaccttccttagatagatgtcttcttctccaatttgagagcctgttttggaacatatcaatgatggagtcccaacattttttgtctttgtatttggcccccagtgggatcccgagataagtgatggggagttgtgtaagcttgcagcctagagcatttacaagggtattcctgaccgaatcccccagcaccacgagttcagatttgcttaggtttatcttaagacctgagacagcttggaagcaaagtaataggcatctgaccttttctgtcgtgcttcttaactaactttttctaaataatactaatattaataaaattggaaaataatactactatacaaataggaaaaccaaatactaaaataaataaaattctgaagtttctatgtaattataggcttctaaatagtatagagttttatatttgacacaactatgatttttaatctgtttatgaaatctagggttaacctattttgtatttctctccctttgttggaaaagaatttgtccttgagtttttttttttttttgagataaaaaacaatgtgtattatctataaggcaccaaaggggtgccacccatgtacaaagtatttacagcttagttagaatatcaataatcttcccaaatcatcccactcagagagatcattacccagcattagagcccaaaagtatgaatccacctatatttaattctggacaaatcctctacatatctattaaaactctgttgttcctatcttttcacaccactcaaaaaatggttaaaggtataagctttacaattttttatttcttacaaatccctccccaagtcctaagtccatccctaaccgtttccgcaatctcccaattgataaccaaaagaccataaatccatagtccaaatattataagccactggacaccaaagaaggatgtggttacaagattctgctgccttcatgcacatgtagcaagcattagtcataattttaccccgtccacaagttctgaagtactgaatgatttaaaatattgatgtatgtggctacttcaagaaaatttaacaaattctgtgatcggtcattctcttcagtagtaaaacataatgtgaacacataattgtttagaattgtgaaatcctgttggtaagttgaaatcctcatagtgataaatttgcacttcaatttcattcttaagtggaacatcaacagatccaattattggtacatgttcctccttgcattggccttccatagagtgtctttagggaaagatcttgggcgatggggactcagtagtgattctttctgctcctccactttaggtctgtggatatgcacctaactgcagatgatgggaggtatttacttatctgctaagaattacatcatcatcctctcacggaatatgtagccaacatgttttccttgcatctcatcctttattaatctatgggcattggtaacccatatgttcactctgtctgcaacttgaaaaatgatttcatcacctttataaggagtcttggagatagatgttgattcattcttcaactcaccttttgattcagaggtgtcttaaggagtagattccgtaaccagaaactcaatatttcttggaattggatatttaaaatgttgagcaacatcaaatcaattttttagataattttattttgcctcattggttttgtgatcctaaagaacctataattttggttaactttcaatttttctatggatattatcaagagtcttgcctttttgaagatttttttttctttttctttttgaaataaaaagtataaagtatcattaactacaagcaccaagggggtgcaaacccatgtataaaaacatttacaaatcaatcatgctatttatcaaatcaccaagatcttccatggaacgcaaagattgacacattacaaaaaatcctagggtttgaatggaatgagccccagttgttttttcttactggtgatgccattctatgtctaaatttcatcccttacactaccagttataatccaactgtatcccaagatcccataagccattgtccataaactgtacgctatggagcgttgaagtagaatatggttgcatgtctctcccactctcttacgttagcagcaccagttaacaatgatctttcctcttgtcatcaacttatcaatgatcagaatacatcttcaatctgcttcccacgcaaagaaacaaccctgggaggtgcatttcgccttttgaaatttgccacttcaatctgcttcccacgcaaagaaacaaccctgggaggtgcatttcgccttttgaaatttgcctgggtgggtaactgttcttgtgggctcgttcttggtcaaatgtctataaaaggaaccaactgtgaagttccctgttgagctaaggaaccaaatctattgatcatcatttttttcgagagatatcgaacacaatgagtgcaagagtgattcgtattcattaatttcctattcattgaggttcatcatgacctctgcgtgacaatctgcttctcattctctatctctataagtctctttaactgatatattcttgtatcttgcgatgaaaaaaatctgcgggaatttgtctttcaggactcccccctttagcccaaacagcctttttgaagattttgaactgcatgtctgagcttttcttttcttgatcctttgtctcttcagaaatcaagttcgaattttcaccaaatgggaaagaatgatgaagaacaataagatattattttggaataaattttcaaacatatcctatctttgcctctccaatcacattttcagttgggggtttgggtctctttctttcacaatcaatagattatgttgtcccaacgctaaatctttttccttcttcatgctctagtttcccattgcttgtagttgaataatttttaagtctgttcgccctttttaaagatgtttaggacatcttttcaagatgctattggtgattttatcttcttaaaagaatctttccttctgaactgagtctatacgagtaattttgattgatgaatttttctcctttaatgaattgttgcctcatagtaagttaaactgaaccttattcaagttttttactctttctgcagcttactaccgtggagcg

SEQ ID NO: 8861 - DNA, 1120 bp, Carica papaya
  Intron number 11 from transcript evm.TU.contig_26789.4 (lo cus evm.TU.contig_26789.4) derived from phytozome v7.0 (ch r-ID contig_26789; pos 8914 to 10033 reverse strand)
caagtgagttttcttttccaagaatctgctcttattaggttcccatcaactgttatgctgtctattttactctttatttggatcaaagaatgaactcatatgaatgactgcattattaggactttgtttttgcgagatattccattggggtgcatatctcagttatctttaactttgttgcagttttggttatcagtgatcccagtatgatagtttatattctcagttccaaactttcgaattagttcttgggtttggattgtttggaggatgagtatttgtaatttgaatttgattggcatatttagaaataattcattggtttattagaatactggacttggttggcataaaaattaagttagtcatttatgtttcttcattttgttttttttattatccataagtgttaaggaggtatttatctgaagtgttggatccttattaagtcagttctaatggagcaagcatcttctgctagtgaaatattatcctggctagaatctgaaactcctttccttttccttttcttttggctctcactaggagcagtaataacagtgcacttaagaggctgattgtcctaggatttatgggtagtcacagggctaaaaattgttgatgcagctgtccaaactgagactttagatgatttgaagagattgaagagccaataatttgttgaaaataaagatagacctcttggagataaagcagcttagttaaatgttcattgctcaatggaagatagtagatttacctcttcctaaaaacttatgagatatcttggcaaatcctacagtaatttcagctaacaatcttttcttgctttatgtactttttcatcattctcaggattaaaatgaagagttgcacagtgaaaagagttcatacattctgattcttgtgtttatgccagggtggtcaaatggcttctgctttttgaaaatttgattcattttatttttacatgtcatcaggtttttccttctctgaatttactacttgctagttggagttactattgtctctctttatattgagaagtcatcttatagtaaaccgagtctttacctagttgatcgtaaatgatgacatttcatttcaggctggtggcact

SEQ ID NO: 8862 - DNA, 2340 bp, Carica papaya
  Intron number 4 from transcript evm.model.supercontig_6.50 (locus evm.TU.supercontig_6.50) derived from phytozome v7 .0 (chr-ID supercontig_6; pos 313024 to 315363 reverse str and)
gagaagtaagtaaattattttgacaagctctgtttttaaactaggttgatttttgaaatgatactaattcttgcgcttataacttttgccttttcgattagcctgggatcttgatgtatgcagaatcacaaaaatgccattgttaactagtagttgaatgatattgatgttattgtttgcatgtgaatacattcatctaactacacaaagatacttaatgagttagatatgagcaattaatgtggaaggctgtaatgtgccatgaatcaagtcagtggtgtctgccatgcaattttttctttgtacctgcaatatctttactggccttttcttgactatagcctgtaaccagcaatatgtttgttggcctcagctttattaatgttggacaaaacaagctcaaagaaaacttaaagaaattttattaagaactaaaattagagatctcgaatctcaataatcaaagtaatatctcagcatttgaataataattatgaataatttatttaataactaaccttatatgtctcatttataggcacaaaatataattaaaagtataaaatttaaagaatttagtaaataggaaaacaagctaaatagaaagaaatataaaactacttgggaaacgaaaattaaatctttttattttttaattgtaaaactttctcaaaacttttatttccgctagaaaaggaaattaatcttcctatttttgttattgtaaaattttgcaaaatgtttatcttttttttattagttctgcattatttataccttcaccttttcatttagcttgtattcttgatgtttgtagaatcatagaatgccatcaatatctaatagttgaacaatatccaatcactgatgtaatggtttacatggtagatacaataatctaatgaaataaacaccggcttgatgggttaggtaagctcaatgtagaaaatgacttggttataatcgtatgcccatgaaacaagtcagtgatgtttgccatgcaattgcaactttgaacctgctatatcttcgtctatagcctgtaagaataatgacttaaatctccagaaattttgaaatttgggcatggacctggttcataacatttaggtgaaggttgattgcacagttcactagagataaaagattagattatgaacagcaaagcaaattaaggatcacaacatagaaatactatgtacctggcaactatccttttaattatgtgtaatggaaactggcgcatctgatccgctttcgagatccttttctgttttccaattcacttcttagtgcagtatgtagcatgatgtgtgggatactctgatatcatatctgaagataaatgtgattgttaagttttacacaataaaaatttgagcaagcttttgagtgtcagtgacttagatttaaatatctttgggttagtggtgctaagaattgaagtgttacaaacaatttcagagcacgtacaatgtggtgatacatggttgtgatcttgaagcttgtaaagttttgaattttgatttgtgattgtggtgctgaatcccatacgttatgacatgagtgtgaaggagacactaaattggattattttcagtaattaaaatttttaaattgcagcaagggaactggtaaagaaaattcagtagaaacagatatgtactttaactcatccttcatttaagtaatatttttagttcactagcactgtattcatgcacagccgtcataacctctgcctgttaatatatcgtatggactgcaattcacagctacgagtcgtttacgtgaaactctataaacacaacaatccattcctgcattataatattggctgctttgcgtttgtctaaggtattatacaacttcaataaaaatctgttaaatctttctaaagcaccagaccggcgaggtgttatacaacttcaacaaaaatcttttaaatctttttaaagcaccagacctaaaatgtctgaggttctactagattaatgggcagaggtagttatggagatattaatgttgatacactgaaccatgcatgattcctgcactcttacatcctgaaatgtttatcgtagttgttgaaagtacatatctgcaattttgagattttttcttgcggacagttggggtgtcatatattcttatctcgtgaaaattatcatgaatttgcaggtatcatcattctgaaccttctaaaaatcctcaattgtttatttttcacccagtcagatcatttgactatttgtttgtttattcgttgcattagttaacgtttcatttcagggcaattttaaaaattatctgagtctatcaccatgtttcaggcattca

SEQ ID NO: 8863 - DNA, 1641 bp, Carica papaya
  Intron number 1 from transcript evm.model.supercontig_184. 4 (locus evm.TU.supercontig_184.4) derived from phytozome v7.0 (chr-ID supercontig_184; pos 25563 to 27203 reverse s trand)
caagaggagaagagaagatatcaagaaggataacggtttgcttctccctatattttcttcttcttcttcttcttcttcttcttctttgtttttattacgagtgcttcttctattcatttgtttgattgacaagaaatctggggattatgaaggaaacaaaacgtttgagctcttttttgttggcgtcgggccctgttctttctattagccctttcgaaggagattttacggtttctttttcaattgatgggggaaagattcttcaaattatcattttccaagattgcaagaatttctttggttgaagttggggtcttctgcttcttttatgctgtttcgctgggcaggaaaataaagaaacaaaattgcacttttctgacatttggccgaggaaacgttagcttaacttactgatttcatgagaattatacagataaaatcatgtgattgtcttagtctcgtatataagaagttctcaacgaacatagataatttttcttgtgttggacatacgttttaatttatgttgttgaaagagctgcatattatcaattcttcttgtgcgattcttttgctttcgaagttgcatataaattacccctaagctctatcagtaggcttactaagcgaaaaaagggtcatattttcattttctattgaatctattcttttgatttcattccaaacttgatgtacctcataggtgagttccgacatgttctgaggcagtattgtgattcaacatgtggtacaaagaaacttaatcttgcgaagaatctaaatcacattgcacggtgttcaggacttgcactatgctttggcattttatatttcgttctaaatttaataaggaaaaaagaaaaagtttgtcatgtaacctgttgtgctattattcagcttctttggctaccatttattagctatattttagtaaaacttgatggtatccgaaaatagattattctctacagatatttaattttaatttcacatttatggaaaaaggaataaggactcgagggaacaatgtcagtaacatactcaacatgatgaagaagtcagatttgtaggttttagctaacaacatttgttgttagtgcacactatactatcattattatgagatttgattcttcattttatgaggctatcaagatgtttgtctttttccccatatttccaaataacattttaatttatgcttggacattttatgttatgatttaatgtggagaaagaagaatcttgctttgtaatatgtttctccatttagcctgtttggctaacacgttattaagtaagaagtaaaatcttgataatatcataaactagggtcttctttctacagattcaatttcattttttgcatttcttggaaaagaaggagatgggtatttcaggaacaatgtcatttaaggactcaacagatataggaagtcaaatctgttggttttatttgacaaataatcggtatctgtcatagcaggtgatatagagagcaatttgttaggataataaagaacatatatcttttgtcaggacatagcatgtacttgctgtttcatttatcagtttttattatagctaattggattctttttttcagttctggatctcacttggtgtcctgaggagcagatt

SEQ ID NO: 8864 - DNA, 1501 bp, Carica papaya
  Intron number 2 from transcript evm.model.supercontig_103. 28 (locus evm.TU.supercontig_103.28) derived from phytozom e v7.0 (chr-ID supercontig_103; pos 228846 to 230346)
caagccagccacgtttaagattttaggttctacaggtaaacttccagttctcgggatttctacatttcattttcttccgtttgtttactcgatttgtgtatatgtggtgattatttgcagaatttcctcgagtttgtgtatatcatatacaggagttttgttcacttctcatttaagtttctttatattttactttattcctagacctttttataagtaaaatcgagtcataaatttttcttattctttctttaatatttggatcaaaatcctattgctagctttgaagtccttcaaaatggattttgggatcataatttttatgttggagtcaactctatttttagcttgagttttttaagatggatttacatttcaacttgattgggtagttagaaatttatttacaaagaattcaagctatgactgaaattcattcaaacgtgaaattatgatccaattctatatatccagaattttctggtctttacttaaaggaataatcggaattgaatgagccattagtgcatttctcatttatcttctggattatgtgaatttcattttctgtgtgtgatataatcaatccctaagtgtaatgattagtacttatgtatgatgtctggaaaactctaatatttaggtgtttatctcaaattctaagcaacttaattaactgaacttgtgctacatcactttttttttagtgtttctctcttattctttatttgagttggcacaaagaagaaagctaggttgctctggagatgagctctttgaaagctaggttgctctggagatgagctctttttgctggtgccatgttgtggttagagtacaatgttagacttttcgaggatcgtatggctttttggctagtttgcagaagtacaaattgattttgatgcatttctttctttctttcttctttttgttggttttggagatttattatcctctgctttttgtcttttatctcacctagctaacaatatttcttttttcatgaaaagaaaaagtggctcctgtaaagttttttttccaacaaatgactttacaaatgctatttggcgtagagttatttttatggcctcttttgtggactaaggcacacagatattacaggatttaccattttatatttttcaaaggaactaagagggtttctgatattaattagacatcttttcctcttttcttttctttcttgtctgatatctcatgtttttgtatttgctttcctccttaataaattattattttcctatctgaaaaaagagtttagttgaagtatatttaatatatgaaaattcttttctgtccaaacagccccttgtcctttttctcggtttgtttagcatgagataatgaagataatggaggcattacgtttcctatttatgtttacgttcatttatgcactttggaatttcatcaagaaagcttatcttgtatcacttatgcaggtgaaagtatctctggcggaaaactgctgattgat

SEQ ID NO: 8865 - DNA, 1168 bp, Carica papaya
  Intron number 14 from transcript evm.model.supercontig_36. 129 (locus evm.TU.supercontig_36.129) derived from phytozo me v7.0 (chr-ID supercontig_36; pos 1022599 to 1023766 rev erse strand)
aaacaccgaaagctactcccagaacagaggtgaaggtaaccaaaagccacattattcttttcagattccctctttggaattatttgttatggtccaattgtacatttttacttttttaatttttcttcgcgctttttttctcaatttaactacttgaggaaataatttaacagttcattggagcaaatttgaagaataaaaatgaacaaatagagaattgacaccaaaagttctttaagttttcagtgatctcccaccagatcgtgaaaaatggcaatagaaatggagcatgctcatcaaagtggttgaaaaactcatacctgctctgctttgtttgagttgactcgcaatcttttataacagggggaacaagtttcatttccacaatgaaatcgaattaaccaccaattgtaaaataaaaaaagaacattctgaaatccaaacatgagcatgaagttgatttagaagatgcatttagatgaaaaattcataaatacaagaggagaagaaacctatgtgattttaagtacaaatacagtgaaaatgacaacacttcttctttttctcaaagagaaaacaagagaaccgctagatttgctttaatatcgtgcagtctagtgaatatggttgctagcaccagccattattgtaggatatatcttactatgaaattgaaaatgttacatcatcaccttagttctgcatatctgaatccttaactattcattctttttcttgtgaaaatttcctacttcagtttgttgttgcaacctattatcccaaaatacaaaatggaacatataaactcacaaaagagtgtagaattcattgtatagttcacatttttatgattagaattagttcaagctattttaatttcatatgaaattgagcatgtacactacaaaccccagctaatttcatggaatttggaaatgaattagtgtgaggaaaatggatccaaatgtgttctatattcttcttgtttccccaaatgtaatctattaaattcaacaaaatatttcaaacaacttcctatccaagttatgtacaaatgagtgaattttcaaacaaagagatactacagcgtgtaagttttctttagtcctgcataatgcgtgtacattttgcagcgtgtgaaggctaggggaactccacgtccttcaaa

SEQ ID NO: 8866 - DNA, 329 bp, Carica papaya
  Intron number 2 from transcript evm.model.supercontig_146. 26 (locus evm.TU.supercontig_146.26) derived from phytozom e v7.0 (chr-ID supercontig_146; pos 116460 to 116788)
ccactaagctcatctccaaggtttataattgtgaaataattgtaagagatagacatcgatttcaccatttcagaatgggacattgctcgtgtaacgattattggtgattcttcaatatcagcttatataatttgtagataaccaatgcccattttctatgcttgcagcttccagattctcctcaatttcatatgaacaaaattgtataactttagtttagtagtaaaaatcattaatcatgtcaaaagcttatttttaaaatgcctattatgttataagagttttaacattttatttcctgatttgttgaattttattgtgtttctagc

SEQ ID NO: 8867 - DNA, 875 bp, Carica papaya
  Intron number 4 from transcript evm.model.supercontig_12.1 04 (locus evm.TU.supercontig_12.104) derived from phytozom e v7.0 (chr-ID supercontig_12; pos 930155 to 931029 revers e strand)
aggattggaggtaaggctatgcatatcatggttgtggttgacccatttattttctcctttattaaacactgcataattttccgtgaatttctactatgtttctacctgctactgttgtcattcttgtaaatggggatttaaagagcgttaattattattctgtgatcttcatcatttcatatcaaatagccatgatagtatataaggagtcacttggaagctagatacatcgttgagaaaggaaaatggtttctaggattttatatctgcatgcattaaatctcttcatccttccggctgctcccttcttcttctattcacatgagatgtgcttcaattttattgcattatagttttattcagtcgcacaatagcatataatgagttaatcaaggggcttcttagcctctatcctctttggatagggatagaaaaactgtatcccttaacatacaagaattgagctcatttttgtagtgtctgtgatatgatctgcctctgttggtgatcggacaagtcacgtgagatatgctatctgggagtggtacgtttcaattaatttttttttaattggaactctggtatatatgtattctactctcaagattattgttgtttagaaattggagtgtattggtgctataattttagagagaaatatacattgtaatatttagaacttgttcttgtaatcaaatctatttccctagaataggtaatctgactgaacccagtaattttttttctttttgtccttatttttctgttttgatctgattgtttattattattatttttaatcacgaaatagagtttacggattgcatgacttatttccaggaaaacgtagagctctgatacctccgtctgtggga

SEQ ID NO: 8868 - DNA, 1543 bp, Carica papaya
  Intron number 4 from transcript evm.model.supercontig_113. 41 (locus evm.TU.supercontig_113.41) derived from phytozom e v7.0 (chr-ID supercontig_113; pos 541447 to 542989 rever se strand)
aaattttagaatttgtattttagagataggcccaggtaggctttcacatcattctcagacaatgggattgggttgttgacaaaagagtattactcaaatgcattgcaggggaaactcaatttttctctctctcaataggccctcttttcttttccttcataatttcattctgtcattattactttttttttttctttcctaagatacatacacccacatctacaatatatacaaatatatctctatagttcaggattattgacttagtggcaacctattttctgctgtgtatgtgatatgttggctaaatttttgttgtgtcaaattgagatttgatgaaaataatacagctctgtttcttaatagtgttttctgacaaaagtaatggaatgctggaaaacaagataaattattttctttttaatgaggaaaacatatgaagaataattgtagtctacatcacccacttttctaattctattcttttttcccacaccacacccatttgctatttctttcttctcttgaatcatggcagttcttgtactaacatagctgtaaggtaaaggtatctcaaccctactctctttctctctcttctgttcttactctatatttaataatttttttttatcattctttgtgtttgattttctcttattgtgatatttggcttgctttcatcacatgcctcagaaattttataaaataaatttcaatttgttgcagctttatcattcctttatcctcatttgctttctctttttattatttagtggaagattatgtgagattttgccacctagcacatgattacttgtaaatggcggtatgttgggttgtgaggcaaaaaatcaatgccaccaaacagtcttttaaacctttttaaatccagaaggccatacatgggtgaatccgcaataagtaattcatcaaccctagttaatctttttttccccaactcctgtaattccttctcacatcatgcattcattgttaatgataattagaatcatcttgcatgtgaacattttctcaaacagttggtgggtatgattattttcttgatattcagctgttattactgaattttatatgatgtttggtagataatttcatgtggatttgtatggaatttgggttaaaattatttaaagataactttttaaagtacccaattgggtatactctgtgttttcggctctccagacaggaaggcccattcttcttttttgttttatttttttaagtttgcttgttgagacaggatatagtattgattaagttaggcatcaagatcatgaacatgaaggagtagaaaagaaaagcgtagtactgggctggattatcatataactttgtctttacattttctatttgagtataaagctactctgcctgcttacattgcttaaataattcatggagaagtgtgggtgtcttgtttttccatggcagttaagctaaagaatggggggactaagataatgtatgcttcttcttcccaggaccaaaatcaaagccctattagcccccattaaca

SEQ ID NO: 8869 - DNA, 370 bp, Carica papaya
  Intron number 6 from transcript evm.model.supercontig_50.3 7 (locus evm.TU.supercontig_50.37) derived from phytozome v7.0 (chr-ID supercontig_50; pos 450871 to 451240)
cttgtgcaggtattctcaaatgcaagaaattataataatttatttcttttgaagcaaatgatggttacaataacaactatttcttatttgaattgttggtactcttctttttttgtaaaagtttgtagattcaagtcggattgtatgtctcgtgtgttctcattaaaaggttgtattataattagtgtatatttatcatttaattatcgaagtatataatttttactccaaaaaatgatagataaaatacaaaagaatgaaatctattatgcagtacgagtataggccgtgatctataccttttattttttctttaagaaaaaaaggaaagaaaaaatctcaggaatggatttgttctggtacattgcag

SEQ ID NO: 8870 - DNA, 904 bp, Carica papaya
  Intron number 6 from transcript evm.model.supercontig_12.3 05 (locus evm.TU.supercontig_12.305) derived from phytozom e v7.0 (chr-ID supercontig_12; pos 2790802 to 2791705 reve rse strand)
caagctttccaacattttgataaggacaatagtgggtaagtctttttacatcaacctcatatcggatagatccaattataatgacttgcataaaactaccaagtcaacatagcttgtattttactgtcagatcaattaaaatatttggcatcaaatacaatagtcactctagatttttctcattcaaacatgcacacttcctgtgacatcgagctctacagaattagggagtcgactaatgcttcccaattacagttaggagtcaagtttaagttttcagattctgcttgtttcattctgagaaacttgattttatccaactttgcaaaggcttcatgagactttttggctccatgtattcctcgtctcacgggtgtagaagccgttaaaacactttgcctcaaatacatgaattatagtgccactctggaacaggtttctgtaacttcttttcatgtaaagttgtaaactgaaagcaatagccaaagcatatgattaccatgaaaatttaaagaaagccatgatcatgattgacatttctttttgggtgcttataagtaattttaagcatcatggtaaaatttaccaccttgataatgcaataaccaagcagtacttgttatgtgccagtaaggagtttagtgcaggaaaaagcaccttaatcaaaatatgtattgttcttttctctacaggcatgattatatgctgttctaaatcaaaacctggatcttttaagttgatcaaaccaactagtatttacacgatttctttttttttttttttttttaaagaaatctcagataacctctcagtcttaattagataacctctcagtcttaattcttgcagcttcaagtattggaaattcttatatttgtattgcttttcagattcatcacaagag

SEQ ID NO: 8871 - DNA, 5247 bp, Carica papaya
  Intron number 7 from transcript evm.model.supercontig_181. 12 (locus evm.TU.supercontig_181.12) derived from phytozom e v7.0 (chr-ID supercontig_181; pos 305027 to 310273)
tcacatttaacctgacgcccgaggtcatttttcaggtatgtgttgttgagatggttattattttgatcccgcttgtcacagtgcagatatgaactggtattcagaggatgattttatttattacacaaatttgctaatgttgtaggacactagaatgtagagttcaacacaaagtatactacatatgaaatagacattaaaatgtcgaaaagatttgtagaaatgaaaattgtaggggattcattattggaaactaaatgatgggttgttagaatattgtaaaagatctatatacataatagattgattatgtttccaaatgtattaaattaattaggaaagaaattaataggataatttatatttgttactatatataattctatttacatgtatatatatccctactttaattttaataaaatataaaaaatattcagtatttttctctaaaatttacatggtatcagagttagagttagagtttttagaggtcaaattatatcagaccacttaaaggattgaacaacccattcccgacaccggaggaagccaactatcattctctgattagttcagatcgcggccgattcggtggtgcatgcagaagaggtggacgaacttgctagccggcggttctatgtcatcaggcgtcgggtgaatcggaggaggccggttcgcgtgtgggaagagtttgacacaaagtcaaaacacgaagaaacattcggccggcctattctgagcaagaaaccagaaggctagagcggaggaagtcgtggcggagcagatcacgcaacaacaagtgttcttcggttttccagtgcgatttgaggtatttttttgcagccccttctgcatttcgattgtccggtggggtctgtgatgatttcagaccaaacagaggcatttcgatgatttccggcagtcgtgtggtgttccggcggcaacgcgtgaacttccacggcaacgcgtgcagcggcagttagtctccggtggtggcagtgtgcttctgttagtttccatgctggaaaaggtaatgtgtcccgcatgtatgatgtttgtaagaccttctattgtgttgagaaggaggccaaatctctcacagtttactttatggaattcaaaaagatttatgaggagcttaatgtatttttgccgtttagtattgacatcaaggtacaacaaacatagagagagcagatggccgtaatgagattattggctagtcttccacctgaatttgagactactaaatctcaaattttattcggttctgagatcacatctcttcagtaagttttcagtaggatgttacgcacagagaatactatactcaatcagcaccctaatgttcttgtcgccagaggagaaagaaataataacatgagaaaaaaacagagcaatgaatagtcggaacaatgattcaaataatattgtttgttattactgtcatgagcagggacatacaaagcggcaatgttagaaattgcagaatcagaatcagggaatacagactgctaatattgcaactgctgctactattagctcctcttatgagaaaactattatagttttagctgatgagtatacaagattctctcagtttcaagaatctttgaaagaatacccaccggctactacttttgctgaattaggtaaaatatgtcttatcttttcatcaaacaaatgggtgattgattctgctgttacagatcacatgtaggtaagtctaatatttttagatttcgatcgcacaaagcaccctatcctgtaactattgttgatggatcaacttaaaatattgagggttctaggactataaaaccaactcccttcattaccctgatatctattttaagtttacttaaacttactttcaatttgatttatgtaggtagacttaccaaataacttaattgttatatctcattgtttcctgatcattgtttttttcaaaatcttatgacaaaataaattattggtagatgacatgtataagaaggtctctacattcttgatagttgggtgcctcaactagttgcctgctctagtatgatctctccatttgaagtacattgtcagtcagaatatccatctctcactgtattaaagaagttgtatcctcagtttcatgctaaatcttcattagattatgagtcgtgtcaatttgtaaaatattatcgtaactcgtcaagttcaagaattaataaatgagctaagtttacttttgaattagttcattatgatatatggggtccatgtcctgttatgtcaaaaataaggtttaaatattttgttattattgtggatgatttttctcgaataatttggatatactttatgaaaaatcgttatgaagtgtttactcatgtttgtacttttcatgcagaaatcaaaattcaatttaatgtgttggtgcatatgttaagaagtgataatggtaaataatatatgtcaaattcatttcaaacttatatgactcaacataagactctttatcagtttttgtatgtcgatacatcatttcaaaatggggttgctgagagaaagaacagacatttacttaaaattgttcgagctctttttattctagacacaaattcctaagcaattctgggcagatgttgtatccactgtgtgttttttgattaatcgtctaccatttatagtacttgaatgtgatattacttataatattttttttttcaaataagtcattatttacagtacaatcgcgactatttggtactattggttatgttcgagatgtgcaaccagtattactaagttggattccaaaactttgagatgtgtctttttgggatattctcgtttgcaaaagggataccggtattactcttcaaatctcgataaatatcttgtatcaaccgatgtagtcttttaagagaatatactgttcttctcctcatagtccagctctacagatcaggtgaaggacgatgagtggttcatctataaattccaacacaatactactatggagcaacaaggtaatagtatttctttttgtgtgccttctgagcaaactgatgatggtatgactcaaactcaagaaccaccgccaattattcatgtttattccaaaagacaaaagattaatgatacatgtcctgcaccagctttttcgtcatttgatcctaccacccatgatcttgatctttccatcaatcttcgtaaaggtacacgtcaatgcaccattccttattctacttatcccattgctaatttcattttatatgatcatgtctcatttgtttaactttttaattacttctatagagtcaatttctatactaaaaatagtcaaagaggttttgaatcactccggttggcgtaatgccatgctggaaaagataaatgctcttgatgataatcatacctgggatctggtggatttactcaaaggaaaaaaggctgtagggtgcaaatgaatgtttgcagtcaaaatgaatccagatggctctgtagcgagacttatttctgttcattctctctagtggtcaaagttatttctgttcgtttattcgtatctattgcagcctttcgtgattgacccttacaccaggtaaacattaaaaatgtatttctttatggtgatctattagaagaaagtgtatatggagctaacacctgggtttgttgctcagggagagtacataaaaatttgtcatttgaaaaaatctctgtatggtttgaaattgagtccccgcgcgtggtttgtcaaagttcagtgaggtagtctgtcagttcgaattgaagtagagtaagtgtgatcatttagtttttttacaagcaatcaacagttggtagtatattttttgttgtttatgttgatgatattataattacaggagatgatcatgcacgaatatcctctcttaagttattcctacatactaagtttaataccaaagatttgggataactaaaatactttttgggtattgaagtaacaagaagtagggaagagattttattatctcagaggaaatatgtacttgacctacttgtagaaacagaaaagttaggagctaagtcatgcaatacatcaatggtactaaatctacatcttacaaaagatgatggtgatctccttgataatccagagacatacaggcgactagttaggaaattgaattaccttaccgtgactcgtctagatattggatattctgttagtattgcaaatcaatttatgtctgcacctatattcaaacattgggaagttgtggaacatattttgtgatatttaaaaggtgccctgggacttggcataatctttagaaatcatcaacattctcttattgaatgttttacagatattgattgggctggatgtaaaattgatagaagatctactacgggatactgtgtttttgttggtgagaatctcgcatcatgaaaaaataagaagcaaacagttgtatctcgttcaagtacaaagtctgaatatagatataggacccaatctacatgtgaaatcttatggatacattattttttagataaaatgggtttgaagcctacattttctataaaattctggtgtgataatcaggctggccttcatattgtctcaaattctgtgtattatgaaagaactaaacatttcgagattgattgtcattttatccgagataagatttaggaaaattgcatatctattgttatgtgaagacaataaaacaatttggtgatatatgcacaaagccttttaatagaatacaaattgaatatctttagaacaacttgtgcatgattaatgtttatgctctagtttgagggggagtgttaaaatattataaaagaactgtatacataataggttagttatgtttctaaatgtattaaactaattaaaaaaaaaattaatagggtactttatattagttatcatatataattccatttacatgtatatatatccttatttttattttcataaaatataagaaatatttagtatttttctctaaagtttacatggatatttaactctaattttctggatttatgccataaatttcttcatgcatttttcagctacaagacttctaatcgctggtgatgcagcatattatattagcctccatcagtagtctacaaatatgattttttttttagattctttttacgatctaccatttttttcttcatatgtacattttgtaacaatacatttgtcttccagatatttgctgagaagccagctgttcggcaggcatt

SEQ ID NO: 8872 - DNA, 5357 bp, Carica papaya
  Intron number 1 from transcript evm.model.supercontig_1915 .1 (locus evm.TU.supercontig_1915.1) derived from phytozom e v7.0 (chr-ID supercontig_1915; pos 437 to 5793 reverse s trand)
agctccggtctatattccctctcatcgaacttcaggtattttttctctgaatattaatgtataccagtgaggacgtaagttttccaagggaaaacagctgaagaaatttaattgttttgacttgatgtacttgtttaaacagtttatttgttttaccttcgtgtttgtaaatatgttaatttcgtacgattttggttgatatgttttgcctgcttctttttcttggtattttattcgtaagaaatttttaacaaattttcatatctatgtttatatataattttattcaagaaagacgattctatagcggcttttgttatttcttgcaatttgatttattattttctcgttgttcctcgtgtgatcgaggatttccatatttcttgataactatatttacctgtatgaagtttgttaactttctgagaagaattgtttcagcaatgaaatttattttgtacttactaatcttttgtgtaagcttggataacaaagaagattttagccttgatttctatgtgctaaggaaggataactgtgtgtagttgttgtgatcttaacttgaatctccttgccattttcttctgtggatcccaaaaggtacgtggatgtatgattcagtcctcaaatcttcatctttgtaatttcaattagacagttggaggttcagttgtagctaactaaaggcatggtatggaattagggaaggcaaagctcagtagaatctgttcctctaccttttagctgttttcgcggttatttcaaaagaaatacattgatgaaaaattgctgtcatttgcttagattacctagatgaaaatatttatggacttttaaatattttgattagttgtttcttttgtaaatcctttttgtacaggggcagaacccctcagtgtcttgtcaatatcatacatagtttttgtttagaaactaaactggagaaggtgccatttgttcttcggaacaagatgaattgtaatgcaattgatataaaattgattatttgtttgatagcaagctagataaggtatttcctatatttcaattcacaaattagtttattacaaataaatactggtggacttgatgttattattatgagttttttttttccctgaaagttaagctatcaaacactaatctgtgagagtgtgagctatagttaatgctggagtctgagtggaaaaaggttttctctaaaaagatttaatatgtccagatttttcttatcataggtatgttacttcatatgattagattacaagtattcaagggaactagggaggttggtgaggcagctacgaaagtaagcccaaacttgagttatgtttctttttttgaggctggatgagcctttctcttagtttattaacctatttcattagctagataaataaaagaaaaatgtatatatattttttcttttattaggattttggtctatgatagtgaaaccgcacttgatctcgcaactatatttatttcttaattctccaggtgagtagattgtcttcaaagaaggtatagtagtttgtagtagatattctatttatgataaaaccagcataatttacatcagtatagacttatagaaacaatttgttttacttcttaaatataatttttttccctggtgactttttaagtattgcaactctgtaaattgtttgtaggtgtacttctttaggattgtgcatgaattaacttataatatttactgtgtagtatgtttggttttgtgtgggataggtagatcaatttctcttctaatctctgatacatttgcttgtttgctggcgtatcttcctctactattcttagttcatggttaggattaataaggattgttagttggtttgcatgctagcttgtcaatctcttttagtaggttatgaatatattttttgttgagaaataaaagttccaaatttagagtaggtaacttcaattttcataaaatatttcaacttgcctaactcattgatttcgatttcttttatttggcattgttttagtgtttgttgttttttcttcttgttttttattacaataatatcatcaagttatttaaggagaactgtaactctctatgtctctaagtgtttgatgaaaagagggtagtctctttgtgcctccttaaatatcaatttgttattactattacaaacctgccaaaccatgctcttggtgattgtttacgttcatataaaatcgtctttaatttacatactttatttgattgtgttcctctgtcaaagcctgtaagatattcatgtagatttttttcttctaaatctctatgcaagaaatcaatttttacattaagttgttgtaattgttagtcaaagtgggcaactaatgacaataagattcgcacaatattcattttggccactgatgcgaatgtctcttggtagtttattccattctgtgtatagccttttgccagcagtctcatctttatctctcaattattccatctgctttatatttgattgagaaaattcatttttatcatgtcgatttcttgcctttgattgctttatatctggttcttttcaagtgtctgcatttttacactcataatatttttctatttcttataagataatatctcaaatattatgttaggggtataatcattattaaatttgtaagaaaatttttatgagttgataaacacttatcaaataacataaattatgagataggatacaaaagatatttagtgtattctcttgtacctttacgaagtgtaataggtatatcattatcagatgcttgtatatgtttttcgggagttaccttggttcgaggaagtcagattcttggacctattttggcttagtgtttgtcattttcctccttgtatgcgtttgagaaaacctagagcttgctatgatgatttgacagaatggatcttgaaggttttcttgtggtggtaaattttctggtgggttctgaacattctcttgtggtaatggttttgaagtgtgtggtaatgatggtagatttatcattctcttctaatataggctccctctaaagataagattgtgcgaaatagaatttttgttcaataaatgtgatgtccgaaaacacacagaatttttgagcaggtggatattaacgtttgtacttctttgagagaagtaccctacaaatacgcatttcagcatctaatgatcaagttttcctctttagtgagaatgaatatgaacaaaaacaacatatttaaatatccgagggattagataatttgtcacttattgttagataaaacagatgaaatgtttcaagagaacttttgaagtcaagaacacttgtgggtagacaattaataatgtaggtgacagtaaggacggtttcctcccaatgttgttttggaagagaaaaattttagtggtagttaaaatgtgattattcttgtgtttcactactccgttttattgtgaagtgtggacggaggatgattcataaaggattccttcttgacggaagaatgatgaaattgtgagattgaaaaaatcatgagcattgttggtatgaaatttctttatggatcttccatattgcgtttttatcattttgcaaaactggggtatgatatgattaacatctaaatttagctctgagtaaaaatagtcaggtgaatctagtgcagtcatcaataaatgacacaagccatcaagccccaaaaatattagatatctaaggtggtccccaaatattaatatggattatgaaaatggaaatcaactttgtttattgctcatgtgaaaattttcatatttcgaattcgtaataatcaagaaaatggatgagtgccctaatctttttggggaagttagatcttgcatatgaggtcgttagtaatagtaaagaatgatactccaagtgcattcaagtaaagttttttttatggttttaatacgttcaattatctttctcgaattctggtcttaaaagtcatagtgagaaaaatcaaatattattttgcagttcaaatattgtggtaacttattgaccgacacaaaactagtacacaatttgggtacatgtaatacatttttttggacaaatgtagagctaagcttaatattgttcttacctataagaatattgaaggaactatttgcagtgataatttttttattatttaaatatgaaacatatgtaaaaaaatatttagaagtatttgtcatatgatatgtggcttctgagtttataatcaaaaaattttcaaatgatttatttaaaacatttaattcctttgaggtagagggcgtacttgagtgtgccgattaattgatattggtatgtttttccaaggggtcaagttgaactcttagccttttgaatctctatgttgcatttactaagatctaaagttgtcatgtcaacatttgctaccataacttggggtgtactttccaacatcttttaagaattggatagtaattaattatcaaaaagaaaaaaattaccacaagaattttacgcagaacacgtgctgtatgaagtaccttgcgtctggttgcaatgaaggcaatagagagagctgtgtgtggcagtttatgtttgtggacagctgctagagactaccagctacagggagcagctactggttccagggccgactatgaaggttggctggtagtggaggtggctagcggcaggagggtggtggccacttatgaaggacaaataacatttgtaaaagagttcatggatttcttaacctaaatttctaatatcatgctaagaattgtttgtgattgatgtgttttttgttgagtattacacccctatacgaataggttttataggacggaaaaggaaaatgacgattaattataattaattataggtgtaatttacctttatatcttgattttctttcttttaatatcctgatttatttcctctttaatacattgatttacttctctatttaacatatataaacaattcctctctagtttaatgcttttcgcataacatcttaagagatttttcatttaatagaagtccatgtggcttgtaatatctactgagggtttcatggcatggtttaatgcttttcaacatagcttctaaagaaaattttcatttaatacaaggccctgtggcttatgatatctactgaggatattgtggtgtcacataactctcttgatgatgttatgattctggggatggaagtataaacaagtttactcccttctgttactgctgcttttgcttgttcattgcctgattgagagtctgcggtctctacatcttttcggtttatccttccactaatcatctaatgcttttctcttgcagatccttgagagagcactggagga

SEQ ID NO: 8873 - DNA, 5198 bp, Carica papaya
  Intron number 1 from transcript evm.model.supercontig_23.1 40 (locus evm.TU.supercontig_23.140) derived from phytozom e v7.0 (chr-ID supercontig_23; pos 2156493 to 2161690)
tcaggacagtcgccatatcgtactcggaacttaaggttggtttcatgctcctgtctgtttggttcctgagaaaactgagtgaaagagaggggaaattacttgttcacgtaaaggagaacgaaaaatagcataggaagttggtgtatctgcctttgatttcttttctttctattgagcttttgcgttctctttggtggttcatgtttgtttgattgtgttctgtgattttgaacgttaacccgtttagtatgcgcatgttcatatatatatatatacatatgtatgaggcatgtcttttaactgttgtttctggtttgagctgattattaaatgtgtaagttaattagtttttatcttttcatttttcgtaaattagttattaattagttgttaattagtttactcttatcattagttttggtgatgtatctataaatacctatgtatttgattagtgagataataacgaagataaacattttctttaactcggaaatatggtagcaagcaagatttttttcttttttgctcactcctcgataattttccactagttctcttttgtcttcttttatgatttcccttcccgatattctccacttgttctctttctctacccaataatcttccacccaataatcttccactcaatcacttcctctgatgtcctttctcaataatctggttaaagaattcaggttaaagaactatgattcttgtttcttgaatcttctttcttcaaagaaatggaaatcttctctcttagcttcgaggaaaataaactttgatccaaccagtgctttctttttacttcattcagatagttctagcctaatgctagtgtctcagcaactcaccggtgataactatgccttttggagtagagtaaggatgaccgcacttttggtgaaaaataagttaaggttcattgatggatatattgcaatgtctgatgattatgatcaaagtcttctcaattcatggattcacaatatggtaattcttagatttgaaactcaatatcaaaagaaatttgggcaggtttatattttatgagtctacgtccgaaatttaatatctttgtgactgattccaataaagcaacagcccaagaatttttcaactcagacaagatcttatcaaccacatatgtaatcaaaactctataagggtatattgtgggaaatgtatgtatggaggtattggtggactcgatagttatttttaacgggtgtatgcttcatcttttctcatgggattgaatgataatttctctaagataagaggacaaatcctgcttgtggaccctcttcctttcattaatgaagtcttttccctagtttcccggcaggaacgacaacgagctattaactctagctctactttgaagttagttgaaccatttgcaggagtgactttcatgactaaaagtgaaaactttaaaaggcctggtgggaataagaatggaataagaatttgagaagagacaggtctttctgcattaattgtaatattcatggccatacagtcgaatgctgttataaagctcatggttatcctctggctatagatagaaataaaagaattcaactactgtcaaccaggttacgacacaagttacagataaatcaaatcaagctggagctgataaatttgttcagaacctcaatacttttcagtctcagcaattgataacgtttctatccagtcatatgatgaattctgttaaagttttacgagtttcaagacaatccttctacttcacaccgtacaggtatctgtttatctgcttccttatgtttagatgctgttttgagaagagattggatattgactttggagcatcaaaacatatttgttttggtgtaactagatttagttctttcaaacctgttcaggattttatgattatattaccaaataatacaattcttccagtaaatttgtatggagatgtcaaaataaattcatattgatcttcaaagaagtactttatgtaccattgtctaaagtcaatttaatatttggtggagcaattacaagtgatttagatctcaccgttaatttttcttctgatcattaaatgatctaggagccctgcaacaaaaagatgattggcagggctaataagtggaataacctccatgtttcacaatatgaaaggcactcaccagatgcactggatcctatctttggtaataaagtcactattcaaacatgacacaagaggtaagaatatttatcttttcctatacttgaattgttggaattcaaattacaattcctcaattctaagtgtatgggtaaagatatttgtcatgtttgtcctctagccaaacaaaaacatttaccatttgaatgccacaaaagtcatttgatcttatacactatgacatatggagaccattttctgtttcatcatataatggatataagtactttattataattgttgatgattgcacacgttttacttttctcaagaataagtctgatgctactgctgcaattccacttttctttaaaatggttacaaaacaacttaatagtcatatcaaaactttgagatcggataatgcacgagaattactcattactaattttcttgatgaaaatgaggtcttgcatcaattttcctgtgtgcaatctctataacagaattctataatagagaggaaacatcaacatttattgaattttgctagagctctctgcttttagtccaaaatacctctgcatttttggagtaagtgtataacttctaacatttctaatcaatagaatatcttctcgcttcacaataaatctccttatgaattattttacaagaaaagttttgattactcgtttttccaagtatttggatgtcttgcttttgcctctacattaactgctatagatgtaaatttgatcctcgagccacacttgttgtgtttcttggttatttggtaggagtcaagagatacaagttgtttgatctgcagaattggtaaatatttctttcttggaatgttatgtttcatgaaagtcaatttctctttcataattttaattcagaagttgaagttttggatttattcctaaatattgttttgtcattatctttagttttcccagaatctaatatatcatatactcatcaatttttctcaaacaatgtttgatcatcctcaacagcaacaatctcattctttacatcacaatgctattcctcggagatcgtcaataacaactaaacctccattatatatcaaagacttttactgcaataatcctttacatattacttcatcctcaatagttgcacatccatgagccagatccctgtttgatagaaaactgcctccatcttgtgaaacgtttgtgatggctctctcttctcctatgaaaccattttttatcatgaaactctcaagcatcaacattggagagaagctatggtagctgaactggaggctataggatagaattatacttagtttattgttcaactaacgcttggaaagcatgccattggatgcagatgggtgtacaagatcaagtacaaatctgatggctctatagagcattacaaagcttgtctcgttgcacaacactacacaacaagagagagttgatttcaacaagacattttttctgattgctgagttagtaattgtcaaattagtactagcattggcaataacccaacattggcatttagccaaactaaacattaataatatgctttttttgtatagacacttacatgaggaggttaacatgaaacttcccctcggctatcatagcaagagggactatttagtttctagttcacatgtttgcaagtttcattagttgatttatgggcttaaacatgcatcaaggtaatgatattcaaaatttactgatgtattgcttcaatttggatttgatcaatctaatctcggttgctccttgttcaccaaaggtaccggctccttattcattgctttactggtttatattgatgacaaaaaataattgttggtccctctattgatgtcattaattccatcaaacaatttgcgcatgcatagttcaagttaaaagatttaagggttttgaaatattttttaggtttagagattaccagatcttccatcagtgcacttttatctcaaagactctattctttacaattattggaagatattggatttttttcctctaaaccaccatttagtcttatggatcctaaatctcaattgaatcttcgtgagggtgaagtattatctgatgttccttcttattgtaaacttattggcatacttctatatctagtagtctccaggcctggcatttcttttgcaatacaaaaacttaaacaatttgtgtcccaccatttcctcctctgcaagtagcatacagattgcttcaagccaatttgtctccagccacaccttcctcatctgcaagcagcacacaaattgcttcgctacctaaaagcaacacttggacaaggcattttcttttcttcatcaagttcattgcaattaaatgcattttgtgatgctgattaggggtcttgtgcctgctccagaaagtatatctctgggtattgtatatttcttggagattttatgatctcctagagagccaaaatgcaggctacagtttgtagatcttcttcagaagttgagtattgtgccttagctttgacagttctcaagattaaataattgcttcacgattttcttgttgatgtttcacatcctgcattatttttttttgatagtcaagcaaccatatatatagcttctaatccagcatctcacgaacgcactaaacacatcgaaattgttttttaccttgttcgaaatcagattcccacaatgcacatcaaacttctttctatctggtctcaccaccaacttacagatatcttcacttaagccttatcttctcatgatagacttcctctgctatccaaaacgacggtaaaaaatatatttgctccatcttgagggagagtattaaaggtgtaaattaattggttgttatcttttcttcttttgtcaattagttaattaaaattagttgttaattagtgcacccttatcattagccttggtgatatatctgattactgagataataatgaagataaacattttcttaactcagtgatactgattgaaataggacaagagcactgacctgtccataaagattgaaga

SEQ ID NO: 8874 - DNA, 4150 bp, Carica papaya
  Intron number 4 from transcript evm.model.supercontig_77.1 02 (locus evm.TU.supercontig_77.102) derived from phytozom e v7.0 (chr-ID supercontig_77; pos 1341193 to 1345342)
tccaaagcaagccaggtatgacagtacaaataagatgaacttagttatttattttttgtttctgttgagtttaatgctagatcgatctcataaattgaagtaccatgaggaactgctaacggcataaaagttccgtagtatcaataatgggattctggtgggaatcacgggttaaccaataaccttttgtccccttgtcagttttgtttttccttttctgaaattcgtgtttttttattgagcctcatgcttgatcaatctcataaattgaagtaccatgaggaactactaacaacataaagttccgtagtatcaataatgggattctggtgggaatcacgagttaaccaatgaccttttgtccccttgtcagtgttgtttttccttttctgaaattcgtgtttttttattgagcctcatgcttatcaatctcataaattgaagtaccatgtggaactactcgcaacataaaagttccatactaatattttttctttattgaaaagaaaaggaactattgtgaaagaacttaggctggagaagttaacccctcatctttgtgttgaatatatgataggttcaatattaataggctttatagttaggaatcttgattgctacaatcgataaccttacattttgtttagcttttatatgacgctcattattattattattttttattgtcgatcatttactttccttattcatagtctgaaacttttggactttacgtaattcataatcattaaaagaaaaataactcttataagtcaactattatttctcagaagtaactgccattaggcgtgccacgtcgactgctattacgattgtccttatcttttgcagtaaatagaactatatgaagttcagcatttttctgcatatttgtcattcttgtggtagcatctttctcgtagaaaatgggaatcgaaatattggtgcttctttaaggatccatggagaacctctagaattttgttatggtaacacaattttggaacctgtacagcacaaatggatactatatctggcattctagaccctttactgattcacctgatttggattaatatagagaatcagaaaaccgtttctccttggcattctttatttcgtcttgcctactgttctttgagttgaatcgcctcatttggcatgatgtctcatgtttatgctagtgatattgaaagtttgtaatcatgattgcttgctttagtaactcgcgaattccttcagaaatgtttgtaactggcacgttttgtatcatataagatataacattttctcaacaaaaaaaaaatgcacaccttaatatttagcggaaggtgaatggattgtatctattctctttaaagatctctctccttttcttaaatctctcgctttcagtttttggtattattctagatcgtgggtatgatatttgtttatttatgttccgaatttcataaagattgctcctatttgagattgctgtttccgcaagtatttaatgatcgagaagcaactactttgccaaagatagtgcatgaatgtggacaattataatgtgtccttcctgtaatgattttgtgatctgcaaaagacaaaagtatccgttgtctacacaaacctgttataactacatgatatttgtttcatctaattttgaatttatttggatgatccataaaagtcaaaaatcttttttttctttgagctcaaactgaggattttattccttgcagaatagtagttcaagtaaaaagtcaatgaccccctggaaagcttcatgcaaataaacgagtttctttatgttttcattgattccgtgtttgattgattctttgttttgttctagtcttattattagattttttttgagataaaaataatgtgtattatgtataaggcaccaatggggtgccaacacagtatttgcaaactcagttagaacatcaattaccttctcaaaatcattccacccatagagatcatgcctcggcattagagtctcaaaagtatgaatccacctatttttaattctagacaaatccaccacacacctttaaacactttgttgtagctctatttccataccacccataaaatggttaaaggtataagatttacaatttttgacttcttacaaattccaacccaagtccaaagttcatccctaacctttccttaatcacctagttgatacacagaagtccataaaccattgtccaaatattataagccactagacaccaaagaaggatatggttacaagattctgccattttcatgcacatgtagcaaacattaaccatgattttacccgttctcgtcagcttgtcggtggttagaatgcattcctgactagcttcccaaacaaagaaagcaattcttggaggtgccttaactttccaaatctgttgggcaggaaatcttacatcatcaccaccacactttccaagatgaaactgaagaacatcaaagtttcttgttccccttattaataagatgaagcggaccctctgggcttcactacctgttcagtgaggattgtaccagttccatatgaacccttgaacctgtattcatcctgctgctttttctctatcactgctaagtctttcatcctgttgactgtggaagctcatttgagctactacattttcttatattttttaagaagtagactctttaatgtctacattcgaaattccaacaggatctgttattcttctcccctacaatctttttctttttgtctcttaggtgataatatttttaaattcaagcacaattaagactatactgaagctctgcgtgcgcactaaacccaaaaatatcagtgtcttggctaaactgccacctatatcaaggtgaatgtttttttttcaaaataacaagattgaaaatatattaataaacagcaccaaaagggggtgcaacccttatacaaaaatatttacatttctgttgggctatctattatatacccaaaatcctcctctctatgcaaattctgcccaagataaatggatccaaagagatgaaactatctatttttaatctttgcccagtcactaaccaccccatcaaataccctactatttcttttcttccaaataacccaaaaaacagtcaaagggatcaattttattagtctcttttttttaacagaaaccttcccacacccaaatgtcattcctaaccgaacccgacatcacccaactaacacccaaaaggttataaatcatagatcagattgcataagccgcagggcaccataatatcaaggagaatcttgaaccataatgatggtaatgaagcgataaatgcatattgctacttactggatatcagaacccagtgatccgccatcagttctgtgacattcatatcacattgatgacattctttctttcaataccttgcttgccttttcgaagtattctcatgtttccttttgagtttaataataacagtgccacattaattgtatttttttctcctcaagatgttggttgttcatttaaaatattctcatttttccttagtttaggacttgggggtatggttgactgttggattttcattcctttccatatttacacggagcccagcaaacaatgtgaagtttcagcttccaagtcctagtacaattctataaaaaagaaagccttgttacaaattcccgtgcttaatgagattatgaggatagagccttattatgggtcaggcttttgtttgaacattgacctgtcaaaagtattttagataattgctacagaagataaatgctttagaatggcagatattattcagtttgccacccaacactcactggatatttagagagttgtttgctttccttggtggtgttgtttctgctttctgttgtttaatggctaacatattatttcttgttttatctgtgaaagttgttgatggtgttttttttatttgaatatgccgagagtatgtttttgtttttcctttgtagttgtagcaagaatgaaaaatgtaatactttgttcatgactataaatctgtggagcaaaactttgtttcagagctgctaactgcattcacttataacatcactgcatttgtctttctttgtgttggtgcaggacccacaaccagtatataacctttttggtaccat

SEQ ID NO: 8875 - DNA, 1643 bp, Carica papaya
  Intron number 8 from transcript evm.model.supercontig_37.1 1 (locus evm.TU.supercontig_37.11) derived from phytozome v7.0 (chr-ID supercontig_37; pos 73759 to 75401 reverse st rand)
cagtggaatcttaaaacctgatgtaagttattttgctttaatgcattgaagtttaatgtgttccaggtgtatgatactgatgatgaagaatggtgacttttcttgctcagtatttctaacctatcttgttccttccaccatttgctcatgatagcaaccgtcctacttgttgtaattgagatcgtggatctccaaacaccttaactttgattttggttcaaattttaattttatggaatgttaatgagaatacagtacaaataagataaatatttgaatagaacaacctaattctaactcatttccgtgttcaattcaaggtgggtgtttttgtgatttcttctttgacatgttggaatataaatttatcattgtgaaagtgaaaatataagtagatttgttcaattattaggtgatctagaaggagaagtgactttgaagattgtgatatcctaaccccatatcattaaaaaaatgtgattgttgagtttgatataagaactcaagtgacacacaaccaataacttagttcaaatttgttgaaattttttatggtcagcagtttggattcaaaaagttattgggcaagtgatgcttaaatccaaggtgttacaaataatattagatcacatgtcagcttgttgactttggactgttgctgttggatcttatgggtatatggattgtgatttgtgatgaagtagaaactacgatacctcaatctcaagttgaaaagaaatatgattattgaattctgcataagagctcaagacacacattatcaataacttaagttttcacttttaagaatcaatgacttagttctagggtgtaatggagatcctattaatgtcattgatttatgttcaatctttgttctatagatagacttgaataaaagatagtataggtgcttctgaagaatgttaacagaatagacttaaaccaaacaaaatataaatgcttatgattttgggtgtgaccattatcactgttgcgtggaaagagacacattgaacagccaacatttgtgttcttgcatatcttaaacagtaacacaaaggaatagatcagcatgcattacaatgcatatgacatagtcttgtcccttcataagccgaaaaagggagaaagaagaagatactttaaagccttttgatgcaatgctctcaaatctcgagaaactgtagaaaaattgcaattgacatttactgtatgtgattaaaatccgcaagattacaggctagatagttgacaatggcttccacatttgtgaattttgaaatttgtttcaagattaggcggctacatgtgcttattttgagggaaatattttatgatttttttagtctaggttattgtcctgctgcttgtttgctggggctgatacgggactccaactacagtttttatcagtcttgagggagaaacagaaaaaatatatgcatttctaagtatgttgttcaaatttatttgattttttgatcctttatactaattattttctccagatgctgacatgaactcaactcagcaatacagaacacaaccatttactattttgttacatttgaattgaaaatctgaaggcaactctaatgatttcattttgcttactgtgaaggttgtcttcttcggtgata

SEQ ID NO: 8876 - DNA, 5539 bp, Carica papaya
  Intron number 16 from transcript evm.model.supercontig_122 .39 (locus evm.TU.supercontig_122.39) derived from phytozo me v7.0 (chr-ID supercontig_122; pos 887542 to 893080)
acattgtgaattcagctgaatattgccacaaaacggtcagtttgattttgcttattgattgacttatgcgtttgttcttttgtttttcatatttacaatgcaggtgttgtagaagttctagaaaaatgtatttagatgaactattctgcttcaaatttgtgcaaataacaaatgcaatgttgtagttctatgtttgcaaagaatgatcacatactgcactgtgagtgtcatggttgtagagaaatgtaggcatctaagaatgctgcgttgtttgtttatttgagataggatgaactttttgtgtctctttgggcatattagcatgacctctataagtattctagttgcacagaagattggtcagctgtcctctattgagctgttttattctctattaagtttggcgtgtctttctcatttttctgtttgaatttcttttttactttgagggcatttaatcctccgttgatgtagtatctttatctttcttttattatttctttttctataaaaaaaacttgaggtgtttcttgagttccttttgtgttagaggggcatttcaatcacataaagtttctgttttggcctttgcatttgtactgatcatgactaagttatttgcttggttttcaaataagtattttatctagtgtcaatactctgcatcggaaatttgactctaactaggaaggcctgattaactcatctatctgaggtttcacggaaaccattttctgtattgatatttcgtacatttagttgtttcaatttgaactatcctgttgcttttatcatttttgctattgtgttgattggacttccacatatttctgtgttcccagccacttattctgtgtatgcgaagtgtgacaatgctccacatatctgaaatagattaagcttatgccaaagtagttagtgttgataattcttggacttaaatgctgttatcagccaagttcttggtgatgactgtaatgttcactcaggatgctgtaagcaaaccgctcaaagtttatataggaagaagggtgaaatagagaaagaccaaaaaagggctgaagggccgttttgtaaaggggtagattagtcttttacttataatcaattgttgttgggtgattgggaaattgtaactattcgactgtgtagccatagcaacttgtagctgttgtaacatacaggtgtgccttttcccaccaaccttggcctataaaaagggggtctggtttaaataaactcatcaaggaaaaattctctcaattctgtcttctttctcttgactaattgccctttttctcttttctttgtttctcttccaagccaaagtcataccgtgactaaggtctctgacaagatggtagcagagcttttggaatcgcctaagacatatgcttcagtcgtctcacgaattaggtccaaaggaaaggcggtggtggaaccgcccaaagcattattcggtgagccatctgcaaacgaggttgaccaaaggctaaacaatttcatggtggagatgtatgaaacgtagtggtaaacccaacaacaattcaactagattgttgagttgttacgggtcgacactaaaattaacgaggtgactaactaggcagctcaaccaactccagtgaatgtcgaacaatgaggaatcttttcctccccaattctacgcgaccaagacaaaaaatttcccttcaacatggatgaaaaaccattgacggcccataatcgacctggacggaattctctagcttctctgccaaaagttgaaatctagctacttgagggagtaattctccatggctggatcagaaaatatgacaagtaatttctgatacatgtcatcctcgacgagctaaaggtggaagtagcacctctttttcttggtaaaatggcagatgtgcggtatcaagtgtggttgatgaagattcacaagttggagtaggagttttacatggaggaacactgctgttggttcaatgtgcctcaagaaaagacttcattgaagaattcaacaagctcacacaagccgagattgttcaagtgtagcaagagtagtttgagcatttacgggctttaatgaatgcaaacaatcccatgctctcgaagaaatgttttatctctagcttcattcgtagcctcaaattggaactgtaacctatgataaggttgctcaaacctcgtatactcaatcaactatttgaacatgccctgctccaagagcaatccataatagagatttcctaaaactcatacttcatggagaagtccaccgacccttttggaaaattgcaaatatcaggaacaatgaattttgaatgggctcctaggaacttgggaagagaaatggagactaagaaatcaacgacgacttattacaaatgcggtgaccattattttctagtgcactattgtcaaaacaaagctgtgatggctgtggaggaagtccttagctaagagagccttgtggagaagataactgaagaattgaccgataaggaagaaaatccagcagagaccttatccattcaaaccacaggagtagttgcaggaagcaccctaaaaatccgagggttggtaggtaggacatgatgtttggtctttttggacagttcacatttcttgggcaaatgtattgctaggtggatcaagaattaattggttagcaacaaactactaatgatgatggtaaaaaatggccaaaaaattactagcaacattgaatacttggagggtacctaggtgacgtagggttataagttttgctataattttttcataatatttagttaagcagatatcacatgatacttggagttgattgcataaaacagtttagcccaatgatatccggtcttgtccaagccactatcaagttcaattatggtgatttgctgataatatttaaaggggatgacacctgtggaaaactaaccacgaatataaaggaggccactgctcaaaaatgggttaaacaagaacacaacattgaaggagggcaatttttctaatcatggaggtaaaaacaggagtttgggctgcatagacgtcaaacaagaccctaaaggccttgatcaatataaggacgcttttggggagctacgagggtctcctccatctagggactttgaccatgtcatatcgttgactcaaaaaacaaacaattaattcatgtttatatagatgttcttttcttctagaaaacaaatagaaaaacaattacataagatgctgaaagaattaataattcgtcccagccacagcccattctcatcacaaatcttactagtcaagaaaaaaaatgggtccttgagattctgtattgactacaggggactcaattccctgaccatcaaaaataagttccatataaccatcattaatgatttacttgatgaattacaatggagcttccgtatttttaaaaccttatcttagagtagggtatcattagatccgtgttagagaagcataaaacaaccttctaaacacaccagggtcactacaaattcagggtgatgctttttggtctcaccaatgcttcagccacctttgaggctctcgtgaatcatgtctataaagcttttcttcaaaagttcatctttgtcttcctcaatttaagtatcaataaataaaagcattaaacatccttgcaccgaaaggttgggcccttgttgggtccttttgggttggtttcttggaatagggcctaaagcctttgaatctttcttcccaggcctttaaaccggtattcttgacaaatcttggatggatcttggacttgggctggtgcgggacatcttcttgggccggtgcgggacatcttcttgggccgaaatctttgggccttgcatacttggacttgcgggagtccttgcgtgagtggaactcctcattcctgcaggtaaaaaccccctcctgcgggcgcggttgaaatccttaccgcccctttttatgcgcgcaattgtgtgcgtgtatgtgcgcgtgcggcccacccgctgtgtgcgtgtgcgtgtgcgcatggcctgccgcctgtgcggctgtgtgctcgtgggtagctatcccgcaggaatttggctgctcacaggattcctgcttcttgtgggaaacttgtgtctttgggaaatgtcttccttggctgttcttgctcacatcagaaatggttatggaaggcttacccatcagtactggggaaggcatgataagtgtccaaccacaacaagttgtgacattgaaccatcctttgtggaaatcaccctgcggagcaggttcttatgcagtgggaaggtactccatcagaagaatgcacttgggagaattacaagtacatatgttgacaatttcccaacctcaaccttgaggacaaggttgctgctctaggggggagtattgtaagcaaatcatttaaagcctactgtaggaagaagggtaaaatagagaaagactgaaaaagggctgaagggtcattttgtaaatgggtagagtagtcctttacttgtaaccaattgcagctgggagattgggaaattgtaactatctgactctgtaactatagccacttgcaggctgttgtaacctccagatatgcctaacaaacaagcgcacctctttgcaccgaccctagcctataaaaaaggggtctggtttgaataaaatcatcaaggaaaaattctctctattttgtctttttcctctcaactaactctcctttttgtctcttctctgtttcttttcgaagctgtcggactatgagtaaggtctctgacagatgttttctctttgaaaggaatagaattcctgcaaatcttctctcttttctcattttcttctgcatcccctgacttcattagttcaaagaagcaaacaaaacgtgagattctaaggtccctattctacacttcatgacattagaaaatctttggctgctgatcctagcatttgcaaaggaaaagggttccctttggaggaatattgcaaaatatgtggcactactcatccagttaattggtctgagtgtcctccatcattattttctattagtggggatcttctttgccttgaagcagttaaaaattatttatagtttatgtacattccccatgcatgtaaagaaatgaatggtaaccatgtgactgcaggttcttcttatttattgttcttgttttattttttcttttattatatcagagtttggttcaaatatattgtatcaatgcagaaaatttcttgtactttaatgcttatctctgggtgtttattatttaatatatgtttggacgcagacactgatttctcagacttttttgtttaccttcacgttattagaagatttaattatttcaacatccagatatagaaatgtgctgtattaaataattaaagccccttggtgtcttgtgaatgaactttttcttttctcttaaagaacaaaggctgagaaaacgttgtgctagttatgttgaaacacattttgcatagtagctcagccttattcttgttgttgacagtctggtgagctggcagaaagtgtgtccaaaataat

SEQ ID NO: 8877 - DNA, 1320 bp, Carica papaya
  Intron number 18 from transcript evm.model.supercontig_64. 121 (locus evm.TU.supercontig_64.121) derived from phytozo me v7.0 (chr-ID supercontig_64; pos 847081 to 848400)
gccactcatctcgttccagaaccatcatagaagcggtaagttctttctaaaattgaatttagtatcattcagctcaaattgatggtctgcatgtaatattagtgagaagaagtacaagagaaccttaacaaaacaagattagaattccaattaactcattctttatcctacacaaggttctcttcagatttcaccatcttgatagttagttatatggagtagtatggtccatgcaccagcccaaagacatcaataaattaaagaaggcttgaacctcagaaagctccctctctaccatcttcttcacagtgaaaaagagccttaatttgaataacatagaattatgaataaattactattgttcattccagaacaaaattaaaggtctatggcataaaaatccattctgacaacaataaatgcaaaactagataattgtttttgctctcttataagtcaaagagaaacagggaggaaaaagatacggcacatatatggcattagcctactacagtctttttatcttcttttttctcacttaactaaataattcagttatagttaaaaatttgcaagtaaaataacaagatatctacttgaatttaagaaaaaaaaaaactctctaagaatattgtaggaacaaatgagcttcttttttaattgaaatcttagtttcatgaagtcatttccatttctcatatcttaaatagtctagcgaagacaagaaccaaacaaatgagagaacttcccttttaaacattcataatcttttttcaactttcatatttcaaaaaaaaattcctttcccaaattttaccaattctcatgaaacttggaatgtattattccatttcaacttataacttatttgatatttgaattttctcattctaatgtctagcatgaaaatcttatttcaaaaaaaatgtctagcatgaaaatccaaataaattctataaaaatagttaatctgttatgaacacaccctaagagtgaataaaactgctcagtaacctgctctgggataagtcacgtaagcagttagtccttttttttctttttttaaaagtaaagcagttagtcctactaacttgcttatgcagatgtttagtcatatctagctcagaactaaaacctcattagcaaacaaatgtttgtaggcaagcatgtctgtgtgagatgaagggctcacctttcatgtacagaagctaatgtaaatattttacacattgcatactgttttcatttagttagactaatactttattgtggtataatttgctaggcttgtacaaggataagaaggtgttcgattcctca

SEQ ID NO: 8878 - DNA, 7438 bp, Carica papaya
  Intron number 1 from transcript evm.model.supercontig_11.9 8 (locus evm.TU.supercontig_11.98) derived from phytozome v7.0 (chr-ID supercontig_11; pos 1091550 to 1098987)
gcaatattgagctactgagtggttcgtttctttgatttacttttttttttttctatctcccgtttgtttgctgaaaatatatagaaaaagttactttttctaattaggaaaaaaaaaaaaaaactgtttaggtagtcgtcgatcttgcgtcgtgaaaaattttacaccatatagcatcagatcgatagaatatttttgatatatcatgttctgtgctatttgctctgttaagtgcgaaataatcatattatacacagtctttatcattattggacagtgcgaaatgatcataagcataactgtgctattacctttatcttttggtaaagctttagaattagcagttcttaacaattagtaggtgccagctattctagttgttaaagctagtgaaaaaaggatattggaaatcctgctcacatcgaaacacacatatggggcagtttttgcaagaaagatactctatattggttgaggaaactgatctctgaagatcagtgagaagaaatgaggagcaagaacacagagagaacgagagaaagagagagagagagagttggcgttttggagagaaaactctaataaagttttgacttttttgtattctggatgcttcttacaaatgaaaggaaggcttataccttaaaaaagaataaggcagttgtacactttttaagcattgtatcattttccttttaaccctaatatatatgtacatacatgtacacatgcttcacttgcgtattcactacagggctccactatccacttttaacccgggggcctggtaatcagcactttgacattttccctcaagatggagaatagatattctttgttttcatcttaggtacatgatgattgagaagaatgtttgagagtgtttggtgaaaatgtacactatctgttgtctgctttacttgcttagttgcaacactcctattctgaacttttcacggaccaaatgcaatccagttgtatatgcatttttcattcatgaaacactggttgacagctatgtccattgtagccttattgtcataatgcaacgtagactcccaaatcatataatagatattttatcctagttcacaacaaatactggctgtagttctgtactcggcctttgcaaatgatcgagagatggtgtgctgcttgttagatttccagaagatcaagaagagtccagaaaaatgcagtatcctataatcgaccttctggtatcttcaaacctccccaattactgtcactgtaagcattgagtttcaatttagatgagtgtggataaaacaaattactcaagagcacgtttgatatatcttaagaccttgtaagctgcattgagatgtcgatctctatgattctccataaattggctcaaaagttgctccgagaaggctaggcctggcattgtgagagttaaatacataagcctaacaatgagtctcttatatgtggtcgaattaggaatgagctcacttttgccctttgataacttgaggtgttggtctaatggcaatcttgaagttcagacacccaaggtcaccgtgtccattaacagatccaaagcatatttgcataggaaaatgtgaatccctcttttcgataagggaacttagttgccaagaaaatatttcaagtcccttagatcctttagcttgaacttgctgttcattactgccttttaagtcatcaattagtttgatattatttttggaaataattatatcatcaacatatactactagtgcagtaacttccttcgcacaaacaggctgtagttgtccttttgttgtataaagccttgcttaacaatgaaatctgaaagatctttaaataccactgtaatgatgcttgtttgagtcgatatatacttttaagtagtttgcacacttttggcctccctcatttggatatccgggtgacaactccataaaaacttactcattcaaatatttatataggaaagacattgttgacatcaaattgatgtagatgtcaatctttaatagccgttaaggagagaagtaacttaactgatacaacttttgccattggtgagaaggttccatgatagttcaaaccttccctttgaataaaccctttgccaacaagcctaactttgcatcttccaattgtgacatctacgttgaatttaactttatatgccaatttgcatttaataggcttcttcctaggtggtggatccataattctccatgtcttcttctcttccaatgcattagcctcatttctcattgcctttacccagtcagattctttacaagcttcatcatatgagcagaacccattttatgaactcacaaccgacaaatattttttatatttatcaacaattccagtatatgaggcagtagaggatatgagaattgccttacctattggtggatccttttcattaagctattgcgagtggggaatggaagtattgatacgctcacaaacaaaatcccttaaataggagggtgcctttctgactgtggttggtcttcttgttgggcgacaatcattggtgttggagtcatcctccacaaaaacctcaacagtgtcttcttcatcaggtccttgtatcaggaagatggaagtttgtcttcttcatacgtctggtcattctgtgcatctatatctgttttctcaactatagattctttgctcacttcttccatgggacaaacaatctgcatgctctctagttgaatgttggctggacctggaacactgtaactttcagagttgttgttctacattctacaaggaaatatgttcttatagaatattacattcctcgagatagagattctgtttgtttccatgtcaaacagcttttatccttgacaccaaagagataccctaggaaaatgcatttttttgctgtaggatcaaatttgtgcttgttatttattaaggtggatgcaaatgccaagcacctaaaagctcctagatgtgtgactttggcttggtctggaacaaacaattcaaaaaggattctgtaattaatggtagataacagtgtactgttcatcagatttactgctattaaaataaaattactctagtacttcagttcaattccactttagaattttagagctctagcaatattgagtatctattgatgcttcctttctaccattccattctacttaggcatctaaacacaacttttcttatggatgattcccttctccaggtagaaatttctcatctctaactctctccaattatcactgtgaatgaccctgatccgtttggtaaattatgtctcaataggggtgtagaagcttgacagagtaaggctagtctcagcctttgatttcaacaagtaaacttgtgtatatttattaaaatcatccacaaatgaaagaaaatattgatatccatcataagaagtttctttacaaggtccacaaatatcataatatattaaatcaaaatgctgtttcgatttatgttcactaacagaaaatggaagtgtatgaagtttagctaattgaaaaatgtggcaaggattgcattctttactcttcaagacacgtgagagaaaatctgacttgaattgtgaaggatgcgcaagacaataatgctaaagatcaaatgtttcaccttgttcgggaaccgagactattgtgccagagaattcttattgggactctgtcaaagagcttctatgttgttccagctgatacaatccatccttcacttcatccaccctaattgctgcttctaagtcataaggtcttgtattacaaaaaactgtggtgagaagatgaggcaacacttagtgtcctcaactaatcttctagcagatttcaaattaaaattgaaagatgagacacataaaacattatgaagaatcagtttattagttatttcgaccattccaacgtgaggacattcattttatcatcatttgataaaacaacttcaaaggaagtgtctaccgaaatgcttgtacaaaattggtgttaatatgatgtgatccgaggcaccaatatcaatgatccaaggaatagtaaacgtctatctaatctatggaatgagccgttgagacaaagagacatattagagaatccagttaaagtgggtttctgaaaagaaatagtagatgattgtatcgtatgcattgaggggtgattttgctcgagcaatgccatgagttgtgcatactactcttgtgtgatgatcggttgtttttttgtaccagtttgttcttgttttgggagggaaaagacttggttggcacttgaatacttgttttttttcatgaaccttgtgtctctttgtatatacattgagtttgaaacaagtttctataatatgcctgagtatgttgcagttggagcatgaatgcttgttcggattggctttgaagcatcggtctatagagtgacctgcaattttgcactaaaagcggtaatatctttcacgatttgaggtaggttgtttgcttgtcttggttgtgttgaatataaaagcggtaatatctttcacgatttgaggtaggttgtttacttgtcttggttgtgttgaatataatattttattattttaatttattatctaattagttgatattatataattagaattctattaaaatagaaatctcattaaattaatattttagtagaatgttattttctaattagtagattaagaattttataaatattttaggtgtaatttcatatagggtgagaaataaaattattattttttcttcgaaatcaacatgatatcaaagctaaataaaattattttaaggatcaattttaaggttctttccaaccctaaaatagtacaatatgctggattggtatccttttatccagatctactctcattaccatccaaaacggatttgaacctgccgatgtgttttgtggtgtttacagtaattttcagcgacagttgaggtgccaatagaaaggtgcaaccacgctctggaggcgccagtaaaaagtgcagctgtactctctaggcgctgttaaatagtgcagccgcacatctacaaactctggtaaaaacaagcagctgcattcttgaggcgccagtaaaaaagtccagccgcacatctataggcgacggtgaaaaggtgcagctgcatatccgcaagtgtcgggaaaagtgcagccgcacatctgcaagcactaataaaaagatacagatgcacatccctgtcgccagtaaaagatgcagccgcacatccgcaagtgctgataaaaagttacacttgcatatccacatgtgtcgacaaaaaagaccgcgtcattccatttttctgtgcacatttagagatatgtccggagaagacgagcctgagttgagctgctgcctgagccaagtgagtccgagcagtttgaaccaagtcgctgtgttgttagacaaatctacttctttctccgtgcgtgagctgctttaactagacttttctggtcttttttctggcttctctacgtgcgaccgcctctgattttgcggctaggccttcttcacacacaagcccttttgaccagccttttctggccttattttttggctctattttttggctcttttgcgagtgtctgcctctagttttgtgatccaacgcagatccgcttcttttgtgtgcgagcctttctgaccaactttttctattccgttttcagctcttctaagcacgtacgcctcgggtttgcaactcaggttgcagattgggtatgtgagatattcatgtaccaacttgaggggggatgttgaatatatttattattttagtttattatttaattagttgatattatgtaattagaattctattagaatggaaatctcatgtaattagcattttagtagaatagttattttctaattaataggttaaaaattttataaataccctaaatataataacttaaagggtgaaaaataaaattattattttttccctaaaatcaacagtttgtttccttaatgctaaaagtcagggctctattgactgaagtatgcaatgaaatctttgtacgtttttcttcttggtctataattaaatacccttcattcaaactaggaaaatattttatcaatattatatgtgctttaattgctttatataactcattcaaacccatgaggaacttcattatccagttcgtatgttgatattggactattgttttcaaccctccacaagtacaatttggaactcattcatagttcattaactcattgagtaaagtttagttttgaagaataaacacttacagtgtcttggttttacatgaggtttgctatgacttgcttcgccttgtagattcttggtgcattttgcgatgcatgtcttagttccaactcgattcacatttgatatgccgtgtctgcatagaacgtgttgcacttaatatcaacagacagtcacgttctttatccatatgatgactatgtcactgcatcgtaaccaatgttccatgagtagatctgctagatctgttggttcttttgagctgccatccgcagaccttagcttgtttttgatccgcagtgctcgtttgatcgaccttgcccagctgtggtaattgtttgcatctaacaattaggtaacaagtaacacacccgagctttcattggcactaatatagtacgggctgctcggattagaaggatctagggtgattcctctcgacaaggacggatcttggtgagaagccaagtttttcatttcatttgagttctcgctctccgttacagtctgataccatgcaataatatactgtataatggttgaggaaactgatatttgaagattaatgaagaaggatcaagtagcaaacacacagagagaatgagcgatcaactttttggagagacaaccctaatagggtttctacttttttatattttgaatgcttcttacaaatgaaagggaaggttttatacctccgaaaaaataaggcaattgtacacctttttttcattgtcatttcccttttaagcctaatatatatatatacataaatgtttacacatgcttcacatgcatactgactatggggctccgccacctggttctaacctgtgactccaggtaatcagcagtttgacagttctataaaggaaaagggttttgttttttggtaatgcactaacctactaggcgtcctgtgaactaaaaaaaaaaagattctagttaaagcaaattttaattgctgatagtaaagttcagtaccatcttaccttctattatggtaattatttttttttccggtaattatatgttatgttataagatttacgcaattcataaaaagtaaaaagaaatatattttcttgaattggttataacaattcaagtcaaaatggaggaattgactaacttttagaagtttctattttaaagtatgatcctcatcttcatgttaattcttacagatactac

SEQ ID NO: 8879 - DNA, 296 bp, Carica papaya
  Intron number 5 from transcript evm.model.supercontig_70.1 10 (locus evm.TU.supercontig_70.110) derived from phytozom e v7.0 (chr-ID supercontig_70; pos 839883 to 840178 revers e strand)
gaagcataaaaccaaatattagtgaatttgctgaggtaggatttcagagtcatcttgtaaattatatttatatttggaattctaactagcatttgtaggttgattttgttcctttcataatgcccccctccctgctcacatgaaaaccatacatataattgttttagaagtttgtcaaattctgaaatccaatacgtattaaggtttggaatatctaaactctcatattgtacaagattctgaaaaattgcaaatttccaggttcttcattttgaatataaggtcttcaaggggaa

SEQ ID NO: 8880 - DNA, 921 bp, Carica papaya
  Intron number 4 from transcript evm.model.supercontig_12.9 0 (locus evm.TU.supercontig_12.90) derived from phytozome v7.0 (chr-ID supercontig_12; pos 781247 to 782167 reverse strand)
gcacggtctgtagttttcctaaccattgtgctgtatttgacactttatatctcctatggtagtgttgttctcattttttttttcattttgtacatctcgttcactttttttttatggttggagtactaaacttgaattacaattttccttcattttgaaaataaaagtaagtatcttatacaggcatcaagaggaggcaacactcaatttaatacttttacaaatctgacaaaatatcaacaaagtcccataaatccttaacagtataaagagtgtgaccttttatggaaaaaaactagggtttagaaccaagaattcttgattctattggaaaaaaattctactcatttgaagccttcgtttctttaattccaaataacctatgggtagctagagggataacgcttaaattcttatttaaacacttatccctattaatgtctctccagacccaaatatcctctcttctgtaactagtcattacctgattaacccccaaaaagctgtgggccatagaccaaagtttatacgagaaagggcaccagagagaagtaggatttccttttttctggggtgaaacatatatgaaatgtgaataaggtaattctggaaggtagctgaagttttaagccagtaagagagcaccagtggcctcttctgatagacattctaccaaggataagcatcaggaaaagacaagatcttgctttgaactttgagcttctggctgatatatttctctggtattcggctaggctgtttccgaaatttagttgcttattttctttaaaaagaaacttattttcttattcatttaatgatttagtttttcttgcacatataaacaagactttatcgtgtatacatatgctgatgtattggttcaattgtttccttccacattctgcaacagataaagat

SEQ ID NO: 8881 - DNA, 1478 bp, Carica papaya
  Intron number 7 from transcript evm.model.supercontig_27.1 68 (locus evm.TU.supercontig_27.168) derived from phytozom e v7.0 (chr-ID supercontig_27; pos 1799646 to 1801123)
ctaacaaagtgaatcaatctgaattatatttaaaggtattttctttcattttgaatgatgatatatcttttatctaagttaaagtttttcaactctttactgtttacagttaaaaactggtgaattttgaaatcattcataacataaatgcttagggttaaatatttaagaataagcataaaaaaaataaagacaaaaaataaaaataaaactaattcttatttaaataaatatgcatactgaagcgtagttatttattaatatggaaataataaaattatctataattagaaatatgaaaaatgagaaaattggcaattgcaagcaacaattcatggagctgaattttgctagttggtaaggtgattcgtgattggcaaataaaatcgaaaccttaagccttttccttttccctcaaccaaaaaaaaaaaaacagataaccaagggttgccctagtctcttgaaatttttatcaaataattgttgcttagaaagttatggcctaagtgcctcaatcaagctgggaaatggttagaataattatgattagtttcaagtatagccaacaaacttataataaaatatagctgccactggtgtactctatttccttgttgaataaaatttctaacctcttgaatctaacttctgcatcctctcttcttttctgtgattttcttttcttctctaaaattatgcagaagatgcaaattaggttgtatcattagtagctaacttaaatggtttggtcgacaagtaagatgaactaaagatgtcaatcttgaaaaacaccaggtcttataggataataagaaagtagaagattccatgaaaccgtgacctccacagttaaggatctaaagaaatgagaacatgtcgtctgagaattgaccaagttgtaagatgtggtgaactttaaaaattatctctttcatttgttcataatcataagcgcctagtgaacaaatctctaaagaaaaatttcgtatagcaatccttaatcatattctaaccgcacatttttcaaataattcaagacttgatataggacaaataagtttgaggtttgtttcaggccttacataattatatggttttctataaatgtgcgatgttgtgacgtgccaatttctgggttgggccattacaactaaactattactgtgatccaaatgatgaacttaataagtgatttgttgaaaatttgaattaaaataatgtactaagcctacatccatttgaaacttttagcgtatattgtacttcgtactctacactgtaccacgattcagatgtatgcattttaggcaagtatatacatttagtttttactagttggttgatgctgcataacgtatttaatagtttaggtgactgagaagacatctgttccacagataattctcatagtaaatagatgttgttggttgtcttgaacaatttctgttttcaaacttcgtaggtacgttggaaaggct

SEQ ID NO: 8882 - DNA, 1638 bp, Carica papaya
  Intron number 1 from transcript evm.model.supercontig_130. 46 (locus evm.TU.supercontig_130.46) derived from phytozom e v7.0 (chr-ID supercontig_130; pos 585386 to 587023)
gcctcaccagattttctctcaacgcgcctaaaaatgtaagctttcctgccagcttcttcttattcttcgatgttcaatactcaagctctctctctctctctctctccacatatatatgtatatgtatatgtatattattggaagtttcttgacttcctctttgagttatgaattggatttgacggtatccgtttgatttaagctctatttgggataaattcaagatattggaaaatttatttgtagatttacatttagtttacacattgaatttatgatatctctaaatttttatagaatttccctaattcagaggaagaaaaatgtattaggatgacaacttccactctgaattgcaattgaaatcgaaacaaagtatttgaaattctattaaaactgagctagtttggaattcattcttctgattccataaaaaaaaaaagaattatagatttgtcccaaacacagtcttgacttcattctgaacgtttgaatttgatttgttagaggtggcaattgtggggcttttgaatctaaattggaggagattgaaacatgagcatatttttggtagagtataaacaaggttacttgttattcaaagaaatctagagcaaaacatgaaggctgtctttttcttctattaattgattgtttgccaaaagaagagatttccttggttacttgggtttatctggttttattcaaagaagtctataattaccaagattttttaagaaagtttagctacagaatgctcttcatcatggagaatgatatatatcgataggttgaagcttccatatctttctcatttgtgacagatgctactttcagaaggcagtaataactttgactatctccttttgtgagtcttcttacctccaagtcttggttctgatagattcgaagttgtgggattaattgggtatacgatggttggtggctgtttattatggagagaatacttctttagctaagcggttatctactcttctgttaatgctcagtcttggttccaatagatttgaagttgtgggattaattgggtatgttatggttggtgactgtttattatggagagaatacttctttagctaagtggttatctattcttctgttaagacgactcagttttggtcctgatagatttgaagttgtgggattaattgggtatattacaggttggtggttgtttattatggagagaatacttctttaccaaagtggttatctattcttctattagtactctcggaagcctttgcgggcataatgtgtagtttattttcttattagtattcttttaccaatcatagataataccataaaattaccaagaaatatgagttgactgactaagtaatattctaaaaggttgtttgcttatgctggcactgttgttgggaatcgatgcatgcttgtcaattccatgtttgaaaagcaaggcttagtatattctttactcttgggactcactatgatgaccagttttcaattttgcttatcattgaaattttcttttgaagccagtttactttctttttggggaggggataagccactttactttatagctttatctgtgatcttatgttttttcttttttgaatattttgtttcaggtagaggtggaat

SEQ ID NO: 8883 - DNA, 553 bp, Citrus sinensis
  Intron number 4 from transcript orange1.1g045994m (locus o range1.1g045994m.g) derived from phytozome v7.0 (chr-ID sc affold00006; pos 59504 to 60056)
gcttcagagtgcttcctgggaccctgcagttcaaggtatctccctagatgtaattattttgtggatgaaaggatttctccgtgtgttgtcttttaggttttagtccttaaagctatctcttagatatatatttttctgaggatgcaaaggcttactctccatatcacctttgaagcgttacataaagcctagttatcagaagggttttatttggtaggatttactcttattttggaaggtgtttggtaagtttttgatattctggaaatgtttatattttcatgctagttatgacacactcacatttagctagctggctgggtagctaattggtagaccgatggttgtacaatatcataaattattgcttgttttgaatttagtaggtgcaccatgacttgggtcacttttccgcggtattgtttactgaggatatctatgtttgatgctctggtgacactgttataagttatgagggtagaagtatttttcttttgatatattttacacataatttcatgggttgatcaaaatttgatctttatttgcagac

SEQ ID NO: 8884 - DNA, 700 bp, Citrus sinensis
  Intron number 1 from transcript orange1.1g041691m (locus o range1.1g041691m.g) derived from phytozome v7.0 (chr-ID sc affold00030; pos 1088316 to 1089015 reverse strand)
ggtaggtgttaatatatattacaagtgaaccatatttcagttaatgaataaaaaaagaaaatatttaactacttaatttccagaaaagaaatagtaaaagtggtctctttgtgatgttgttgtgcctttgtgacttgaaaaatataatgagagtttctgtagctcgctctgctatatttgttggtagtttactgtttgaagtttgtgttagggaattatattattcattacgctatccaagtattcttggttattgcagttgcgcttaaaagtttgcttggttttggatgtggtttggcattttgctgtagaattcttatgttctgtctcagcaacaatttgtcctggtggtaatcaacagcaatagaactagtattctctaagatgcttcatgaatctgtgatcttggttctgcaatagaatataaggctataagccatacttcaaatctttagaactagtattctcttaagactactactgcagctttctgttacgctgtgtgaggcttctatttatgcacaattagaagagtaatttctttggtaatagataatattccatgtgtattgaagcatttgattttattattgtaaattacttctgatttactcaaaagcagaaagcattggaagagttccatcattcttattcttgttcccctttcaggggtggattcaaattttttgatactgctcaa

SEQ ID NO: 8885 - DNA, 2807 bp, Citrus sinensis
  Intron number 1 from transcript orange1.1g000977m (locus o range1.1g000195m.g) derived from phytozome v7.0 (chr-ID sc affold00058; pos 387074 to 389880 reverse strand)
ctttgttggtgagctactgcctttgatgaaaagatattttctacggttcttcaatttaaatctgagggttagacagaggatgctcttgcaaattaagggatatttaccttctgttgaggcaacatcagatatttgtggtcaatgatgtttctattggggtccctctgtcaaagctgtcaagggtgtgaggctgttcacttattcaataaagatgggtagttatttttaattggagacttgaatttttttttttaattttttaatttttaatttttccttgtttttccctctatggtgaattgtcatgtcatgtaagtagtgggtccatagtcttctgcatgtaatgtgtagattgtcaaagagaaagttggtggacaacttgttatttaggaatggactacctgcataggctagtgagctcactccctttgcctacagtatagaggaccctgttcacaaagttggatgtatgaatactgtttgaacttccataggtatgttcatatttatctttgttttaatcctagttcttgactgtctttggtatccattgatatgtagtagtcccatgacgtgaccatgttaactgagactcgctgcatcttgatgttactgagtgctaaattttggatgtttatgttgattgccagcatacaggtgggttttcctctggtattgcacaaacattaaaatgttattgtcatggtatacatgtaaagaatcctttgaaagcctgtgaaaataacataattctggcagtggagaattaattaatgtttattgctgaatttgatgcttggaacagttttggcaatctctttttttaaaaagaaaagattatggtcttgaatctatgtatatgtcttcgaggtggatctccttagcataactgtaataattctaattcacagaacactaacatttaacctggatattatgtgaatacaacttggaaaaagatacaggagagcatgcttaatagtcgattggtagactattcagaatgaccctgaggatgtttgttcttcaaaccacgcccgcccccccctcccccccaacacaagaaaatttggaagctatttaattttcattgaaagttgctgtgcctttacgatgagtttagcctagtagactgctggtccacttttttctggaattcatttttggcatcaataaaattgtgttgtttctaaccagaaaaagaaaacaaaaactgcattagcggttaagtttttccttcttgcaaagaagttaaagctaagtataactcagattaagttcttcttctgccttctgtttgtgcaaatctcccccctgttttttgtgtatgtttgtgcagccttagctccagcccttaccaaatgtgaaccaaattctttcccaatcacagtgtgaatagattgaatctctggacctcttgtacacttggagaaacctaactaatcaaactaagtggtgcatgtgctatctatccaagcttggatactgaaggctgcaactactaaaataaggtaatggaagatcaaaaaataacaagcaagacgaaaagcggatcaaaaggagccagtcatctgctgtcattaacatttcacacccaagtagttttgcatttcatcgccatatttggtgtttcctactctgatttagaataatctgtctctgggttagttgtctattataaaaggctcatttctcaagctttgtaggcaggactgctagtgtttatagtgcctgagttctttggctttcttgtataatggtggtaacagcagatgacagcaaatattgtttctttatgcctaagttcttctcagcttctttgcactatatttgaaaatagtttcatgaagaaaatcaaagccaagtcctgctccctatcgatcaccagctgtaaatagggtgcacaccatgacccagtcatcctattgtcccatgaaaatgcttttctggatcgttgcaatcattttacagatattaaagcctgagaaataatagtgcctgccttcattgaatattatttggttgcagcattaggtctggacataacaaccctacaaaatattagtgccaatgaattttccctttttaggtttcctatcctttttcttcagcttgcctgcactttatctggcaatagtttattactgaacctagaagctccctgttgttcacagttgtgcaaccacgttgcatgtggtacacattgtggaatcttcctcttttttgataggaaacaaggaaactagtattaataagaacaataattacaaaatgtgaacaagaaatccacaaagaaagaaacaccccaaggattataaccaccaccttcagatgctcaaataactgtctgggcattgatggaaaattgtgacttctcagtccttgcttgaacctaaaaaatggtgattttatgcggaagtaatggtgacattgaattttccgcttcaggtcttttaacagtttttggacttcctgtgctgcaaatgagaatagcttcatatagaaatttgaagccaactccttgtagttgatgattatgctattaatgagtctgcatgtggaacggtcatgtttcccatgttttttcatgaaagattgcagggtatatgttgttatggtgataagacaaaaatttcatactcctttttcatttttacatttattcaaacttattgaagatcttctctctctctctctctctctctctctcttcaaacatgaatttgaaatttgcatttgttttatgggatttcttgaaattttactaagttcaatttccatatcacaggtgcaagaagtacccatca

SEQ ID NO: 8886 - DNA, 629 bp, Citrus sinensis
  Intron number 5 from transcript orange1.1g003474m (locus o range1.1g003230m.g) derived from phytozome v7.0 (chr-ID sc affold00056; pos 361194 to 361822 reverse strand)
gcataacttatagagagtgggcgccaggagctaaggtttgttttgattttatgtttttaaggtcttaattgtttggcgtaattaactctcaacaagggtggtattctttagactgcatctctccatgcagttataggtttacattggattctgaccatctagatctcagtacatttattttgagaacatttttttttttaccatgacattgtcctctaattaatgtagattactttgatatattgatacctgagaacgggagaacgaggtcaaggctctttaactttgtttttttgtagcaatgttagattataaatatgatgatttcagtattctgaccacaaaatgagatgacatgctgcaaatatgttttgtctttgtcacgttggaatttaaccaatttgatactttttctagcaaaagttagtgataagttgagcgttaatctggtcttgaataataaaaatgtcccttcccttacctttatgtttcccctaaaggttggtcatattgaatgaaacttttggtagatgtgtaaaacttctttgttttcgttttccttaatatatagtgatagcttactttatctttcagtcagcttctctgattggagacttcaataattggaa

SEQ ID NO: 8887 - DNA, 1697 bp, Citrus sinensis
  Intron number 2 from transcript orange1.1g042236m (locus o range1.1g042236m.g) derived from phytozome v7.0 (chr-ID sc affold03361; pos 5491 to 7187)
gttgaaggtaggtgaagttctctcatgtccaattttctgaattaaaaaaatctcatgcatgtggatgtgggtctcattttatttgtcatttttaattattaacatttaaatctttttagttgtgcattcattgcatactatttcagtaaactatgttcattttattgtatgtttgtaagattttttaattcgaaattatttttttaatattagtgaaaaagacagattaaagtgaaaaaaattattgactatattaattgactaaataaataaataaatgacagtattttattttttaacattaaaaaaaaaccaaatttgatgcatccacttagtcctgcacatttggaacgttaccatgctttttagagctgtacattttggactcagctgtcgttgtcattttaagtaaaagttgaagctgtctcaaaagtacaataataacgtgcatttaagtaactggcctaaacttcagaaatttcaaaagttacagtatacgcagctcatatctacgaccattattagtttaatcattaaatgacaaaattttgccaatcttgatgggggtacttaaaatgcaagcatctcgtcccttgcctgcttcatagatgctcttactcacttccccctcatctcacttgtgcaaaccaaagaaaaaagaaagattattattttccatttattacacaaaaaacaagaattcctttttattgctccatgtttattattttattctatttctccagaatctctctttatcaattaaatttatgatatagatattgaagatttgcttaaattagaaaacttgttcatatttctgattaatataatacatctcctaaaaggtaaaaatagggaaaaaaaaaagaatgatgatttttttttttttggttttgactgttttaggcaataaagaaatattttgaatgggtcggagattacaatgaatctatacgcttgtggaaatttttttaaggcataaataagtgcaacttgagagcattttgtttttttgttccactatatatttttatacaactgccgccttacattgggtgcatcacttcattatataaccagtaaaaattagttatataaatggaattattctctattacaattattcgacttcatgaagtaacaactggtgttttttaccacattgtcaaaagagttcaacttttatttgagaatacaccatataaaagaacaaataaaaataaaacaagagtacaccatagaaaagaaaaaaataaaacaagttttagaattagtagattagaatttttataagaaagagttgtccctataactttaataagttagccatgtttctgaagtttgttttactacccttaccaaactttttctagttgatattaataactttagtttagtaaacaaaagcaagaaggttagaattaataactttatcgtgaataattaatatgattagagtttaataaaattatatgtaaaaacttatttaaagagcgaaaattttatttttttatcattttttagtgcttataattataatttaatctagaagtattttaattgtaaagaatatttaatagaaagaactaaaataataaaagaaaaaacctttgcccggcaattccttgttatttacatttttggcactgtccttgacagaggacttcaccgaggaatctcaggccgtggcacac

SEQ ID NO: 8888 - DNA, 999 bp, Citrus sinensis
  Intron number 4 from transcript orange1.1g033389m (locus o range1.1g029962m.g) derived from phytozome v7.0 (chr-ID sc affold00009; pos 803722 to 804720 reverse strand)
accaaagagtgaaaggcaataatccttctcaatcatatgtgccatagctacttacaccttctcaagtagtaaccgtattgaaatcggatgctttattctgtattctctaccttttatggctacttcatgtaggagtttagtggtagtgactcattatattctcatttgttactaatttgttatatgaaactaactaagaaagccatgagcgtgggaggttggcaaattgaaattactatatatgtgggataaaacaacttaccttttaaatttttgatcttttcaacattacttaggaggtttgaagtactttagttctagtcttgttttctgaacaatcaagctagatgtggtagttacagcccctaattgagctgcaaatagagggaatttgattggatggttgcagttttctggtcttgatagttttttcaagaatttcccttgctgcttgaggaaccatgccttgttgtatttctttgtcaagctggtggaatgtgtatatagctcaagggccagcagtgggagagattattagtttccatgcaagtagattgtaccacctaaccagttggagttcatgaacctcaatggcctaatgcggatgcctaaatcgcaatcatagccattgttttgcagctgtacttccttgttttttctgtgcggctacaaatcttggttctgggatttggagagtgttaggaagacatgattttacaggaagttttttttcattggtccatggcatctgtatttagttggaaaacatagatgccagtgagtatgacctgaaattggaaatccaatgaacttttcttgcatgaggtccaatttgactttgagtattaccatgccattctgaagtaagcttacacagaatgtaaagatgtgtttcacttttgattgattttctgtattcttcaatttgccctacatccttcagtgaagtcattcatttgttgtttgcatgatttgattttccagagttttgtgagaagt

SEQ ID NO: 8889 - DNA, 217 bp, Citrus sinensis
  Intron number 3 from transcript orange1.1g001557m (locus o range1.1g001557m.g) derived from phytozome v7.0 (chr-ID sc affold00051; pos 622336 to 622552 reverse strand)
tacaaggaaaagaaactctacattgtgttgataaggcatgcgatgcatttaattgtgacctcatgatctatgaggatatacggtggtttattctgaattcagttttttattataactataaacagaaatctaggatcttttgattcagagcttatcaattctctggtttttaagatggtttttgtagattttaacatgaaatatttgtgcagtcttc

SEQ ID NO: 8890 - DNA, 3091 bp, Citrus sinensis
  Intron number 3 from transcript orange1.1g028375m (locus o range1.1g028375m.g) derived from phytozome v7.0 (chr-ID sc affold00844; pos 11655 to 14745 reverse strand)
gagaggtgattttctttgtttcttttataatttatcaatttagttgcaatcttcaaatttttttgttcgttatttttttataaggttgtttgcttttggaaatcatagatattattcctcataccttttctcgtagttgatgatgttctcccattgatatttgtttggtgttaattacaatgaaatatttcaaaacagtttcaatatggctgctctttgtaagtctacactgtggaagcaaattatctaacatgttaagggtcttaaaatttagtgattttgggagaagttttgttggacccaaatgcaaggaattgatattgtttcatcaaactcatcctatcatctccatccccatgttttctaaaacagatagaacatgtcagatcaaacatccatatttccatggaaaattttgagttcatagtttttttttatcctttttctgtcagtgcattcttttagcagctgtgtggacattccttggttgataatatccaattctagcgtcaaaccccagagaattagttgattctagtccatggcaatttgcaaacttaagatttcttttcccttaattcagtccctgcaacattacatttttttaaaaataaaatatgttttcgaccttatctgactttgtaattctaaccaaacagcccaagaagtggtgaattggggtttctaaaagtttcttcaataataatcacaaatcaaccattccaaccacccaaaccaacaataatagttacaacaattgatataaagagataggggtagagaaaatgaacacagagagttttacgtggttcagtaaacttgcctacgtctatgcctccaggcgattcaaacttgaggattccacaaaccaagtcctatatcctaaggtttcaaaatgtatacgacttcaatggtgtcattgaacctttataatctagagatgatcccacctctttacctaagtgtttcccacacgtacaactttttaatcttgcaaatagaaatgattcttacaagatcaaactacttgcaagagtgtataagcaagtaatagttcaataatgaatcaatgtatgtaataacaagtgaaagctcaagtatgcttagaatgatcatgtcttagcttggcaaaatttatgaaatcgattttatagatggatcaagaaactagctattgctctctcaaaataggacattctgtgtgcaattggattgccaataactttgaagtggatagttgcttgctgatgtggcatcttactgttgaagcgatttggaagcccaaattgatcactgctaaaaaataagcagatagccatttcaaagatagaatgtaatacgtcgttaatagatggttgctaactgggaggaggatgatcactaattctaatttctcaatttttaagattttacaatttatccttaaaacttcataaaatttgagattggccaaatatcttttccagaatttcagcaatacttgtatgatttcatgatttccgaaactcttgaaattagcccatatagaagacaaacattttgataaaaacattaatttccctttttcttcaagcatagaaactttataattatgaaaacaatgatagatttaaatgccataatcatgataataagttgagcttttaaatatttactcatgctcacatttactcatactagcttattagaaatgtgacaagaaagatcacctaagctactatccttgatggttgtccatgaatgctttgaacttaatctcgcatggatgatttttgtccttcaagagctagttagattgaaagaatatgttttctattttactcgacatgtggtttgttatcatcaaaatcaagatttgtataacctttaggtcaacagacttgttgctactgtcttgcgttgtcaatttagatctagtcttcaatctccctactaggtactatgcacccttatgacccaaccaagacaaagggccataaaatccaccgtagttagattttcttaccaacaacctagatgctaatccatctcaaaatttatgtattccccagacttgaaattgccattgtaattgttccaaattctataaaatttaccagacttctgttgtcagtgactgtatatccaacgctcttccatctatagcaaatttgggttaaaactgattaattttatatttttctttctcgaaaaagactattcttgagattttattttttattctgtctccatccagtgaggaacagaacaaagattattattattatttttttctgtgtaaatatctttctactcatttatcttgttatgggttaaatgtatgttctttgttttttatgttcttgagttaaaatgttcatataaatgctatgtgctcgtaaatctggaattgactgtttatcacattgcaatctcattatctaattgagtatatgagattatcatttcaagtaacaaataaactgtttttcttctacggaagtgtaatttgtgaagctatttttatcatctgccaaactaaaagatacttagcagatagatgctattgtctcatgagaaactgctgctctatgtgaacataattgatcacactatctatatttgtgaatgcatctggtactgttttaatatcaacctggcagcaaagcctttttgactctggagtgacaaatatctgcatgatgtgcactctttgagaagtgttgtctgatatttcagctctataactgctcttctttgataatgcatctccttgagttgtaagagtttgatgtcgtcagaaatgacatgagaaatgggatttttcaagcaaggaaaatgtgaggttgccaaatgtgaaaatatgagcttttctgttttagttttgtgtatgtttataatataccgaataatatgaactaatcacacaagtgcttcatcataatggtgcatgtaattatattaatattgtttattatttaaaaatgagtttattactgaaggagaaacagatttgaaaagaaaaagcttgcttattataataagctataattttttatatcatgtcactgttgtaggcacaccgcgaggcaactggaacagtatcatccag

SEQ ID NO: 8891 - DNA, 1891 bp, Citrus sinensis
  Intron number 9 from transcript orange1.1g004363m (locus o range1.1g004315m.g) derived from phytozome v7.0 (chr-ID sc affold00295; pos 118542 to 120432 reverse strand)
ttgacattcagactggagctgttgagagctggaaggtactctatactaggtcttagactattataaaattagccaaccatttattggactttgtagaggttcaatattactcccagacttgctcctattaacttaaattcatagggttaatgggttcttaacatcatttcaagcctgttttccgcatggtcgaaactatctactacattagttaaaagtgtggtgactagtgcttgagttttttatttgctttgtgtttgtgtatgttccatgtaacaagcttattacagttctcttaaagatcaagtttctaggaattatgtttaacttgattccgtctgtaatgaagaaaacatgcatttcagcattttagagataattagacataattctttgacatctaaaatacaaaatctgacaaatatttctcctttctgaatcaaaggctttaggtgttgaagaatttgtggtacatcacaatgttcatttacacaagtatcatgcatgacaggccttttagtttagcctttgggcgaccaatttcttttaaataattgcggaaaatatgtgtattaaaccattggtgggtccctagattttcattgtagatgaaattctctatgatggatactaggtgttgaattttctgatgtagaagaaaaaagtgtcaggtatttttagaaatagcttaaaacttgtatggatatttgtttatttatggtgattattaactgtttttgaggaataccatagtccgggaactttataaattcttttatctactgctttcaatttttctatactgaatcacaaattaatgtgaaattacgtatgggcttacgtcgttttagatcgtttttggccaaaactataatgaactgaaatatatttggttttcttgtttcaaaacctgttcagaccagccattgggtttctttcagcacatatcaatattttagaagataaaccagacccgattcatagtaggaaatagaaaggtggaaacaactattactattacatccatttatgctattagttacaccaatttatcctcgatttgggatttaatgtcattacaaacaatttatatcgaactacaatcttgtcgaactaaaaatttaaaattaaggtacaataataaaaataataaaaaggattgtgttgaggttggatgcaatgcccagtgaaaaagaaaaatagtagctagcaagtcagcaactagaggtgagttggtaagtgatggccagggaaagcctgaaatataaatgaagacccttttttcctttttcattttttaaaaaaattaactgaaaactgatgatgggagtgtgaatgagaaaggtgacatgatccatggtggctagtgacattgacagtgtgaggcatggctgcgagcaatgggaggagctaacgatgagaggagggggtggctgagtgagacgagaagttgaaatttcttttatttttaaaatattcagagggggtggctgagtgagacgagagaagttgaaatttcttttatttttaaaatattcaatgtttcaatcgtgtgtgggtaagactaagagtaggatgtaaacatcagtcacaatgattagatgccacgtgttttcaattttattaaattgcaatcttgtgtgggtgagcataacatgtaaaatgagatagcactaacaactttgggtgcagatagaaaatttgtagtgtcaatggtttgttgatggtaatgtcaatcttgaaaataatactgaaagccaaatcaaacctgattgcaatgacttgtacaataattacctagaaacttattcttgcattttctttgctaagcactagtgttttcccttttttaaagatgtgtgcaatatggcaggttgagggagtttctgtg

SEQ ID NO: 8892 - DNA, 1214 bp, Citrus sinensis
  Intron number 1 from transcript orange1.1g024089m (locus o range1.1g024089m.g) derived from phytozome v7.0 (chr-ID sc affold00002; pos 3236017 to 3237230 reverse strand)
tcaagagcctctgctttatcaaatttcagttcaaggtaatttctttacacgatggcttgatctcgatttctttatataagtagtgttgttaagctggcttcggcatttcattcggtggatatgacaacaaaaattagcaaacccaggagctttttggctccctcgcctggttattgttgttgtagttttttttttagctctaaaatggtctttttcactaagcaatattgttattggtcaagaattctgaggttttcatcctactccatttactggaaaaatgttgtagcattttgcctctatttttgggaccgtcttatttcttttatcaaaatttatcagtatctattaccttagattaagtttatgaataaacaattattgatttatggagtatgaccgatcactcttctgattaacttcttttttcttaatcaattgaaagatttgagaatttaagggccttgtaattgattttagctcaatcatgaatgctgcggacaagattttttttttaagaaggaaggtagaggttcatctgtaagaagggagttccgagatatggtctatcttgcaattttgtcacctttttttttctggtgataaatttatttaatgctgttagctccgttgcttcgtgctagtatgtaggcagtttgttaaatcactgtacaatattaattttttctcagagtggagacccttctctcacactatccattgtggatacagcatgtttggttgctgaccttctcaactagcatgtgtaaaactgcttaatgaaatgttgggtgcattatctactaatcttatgtttatgttgtgttgaagcgcgtccttgattgcatttactacttccacactttaggaccctagtgagtctaccatttacccgtcatttttgcctccaaatgattggaaagttcatctcagcaagagcataggaactgttcccaattcgttattagtctatgttgaggtatgggacggatataattatattcccttaaaaggaacaaaatttataaaaaaagggtttacatttggaatgtacatatcataatgacagcattctaactgaagaaattttgcagggttgcttctgtaatctaattgtttttttcttttgggggtgctctttccattttgcacttattatgctcacattttttcttgcgttctcctttcagtggtctttcatctaggtttaggca

SEQ ID NO: 8893 - DNA, 1316 bp, Citrus sinensis
  Intron number 20 from transcript orange1.1g045469m (locus orange1.1g045469m.g) derived from phytozome v7.0 (chr-ID s caffold00032; pos 78749 to 80064 reverse strand)
ggtttctgcatttgttcagtcagcagcaattgcaggtaaacttgttgtaaactttttgtttattattgttatttttttaaaaaaaaaattttgggggtaggaactcaaaaaatgtatcaatgaagaagatttaaaagcagatagtggaccagctgtccactcagaaaacaaagactagcactatttgtgctatacaaaagtatatccaatcaccctatacaaggctagaatcagctacaaccccctagctcaaaaccccagcccagtttagatgtatgaagaagaaggatgaatcctgaaactccttagaaactgaggcccaaagtgaagcaagaagacgagctctatcctacagtttagcattatctgaactactcccctcaaaaaatacaaacatttcttccccctatattaccgaaaatagtgctgccactgtgcattcccaaagagttttagcctttgttcttctaccaaaagcaaaggaatactccataagaagagaatcactagaacccggaacgacccacaaaaaattagcttctttgttcaatttgtaccataactttgaagccacaaaacagtgaagaaaaagatgatttgaagtttctgcacttatcttacacatcacacaccaagaagaagagagacaaaaatttaggaaactttctttgcatcacttctccagaatttaattttcctggtgccaagcccacaagaaggcttgaattttagaggggatactagccttccaaatcattttgaaggtccagcagaaatgcagaatcaccattgcactaaaatcatctttggaaggctagcatccaaatcatcattagtttcttcgttattatctgcacacctgggggggggttgttttgtggggggaggagggaagacttcgtagcttgaaatttttgattttgactatcgtagaatttcctctccagatttccccttgttatcttccaaatatttcacaactttgtttgataaaactgatttgctatcttcctgctttatgttggtgattctttggggatagcaatgctgttgctccttacatcttgaaaaggaactcgaattgacttatgagataattccttcatttttatttacttatcatatttttttatcctggtactgatgaatcttcaagccattaaaccaggataggagtatcatccttggggtagttcccctcttgcacgatcatttagatgcatgattgacttttccttcactgaaagttagattcagctgacattgttctgttttctgtctcaattcttaggagttcttattgtttgagagagaat

SEQ ID NO: 8894 - DNA, 1203 bp, Citrus sinensis
  Intron number 5 from transcript orange1.1g046616m (locus o range1.1g046616m.g) derived from phytozome v7.0 (chr-ID sc affold00481; pos 59157 to 60359)
agttttgcttccgttgtctttgctcttggtaagtcatgaattcctttagcttgatttgcttaatataatatctttctatgttggagtctctgttttctggtattctttttcgagaggattactagaaattctctagtttgtgtctaaccatatgtgtttggaaagaggatagtcaattgtgtcactgcacacaaatcttatatgtcttgctgctaaccctacaactgtttttaaatagtaaaagctgcttagtttgattctgttatgaggatttgatctcgattattatttttcagaagagcattaggtgcaagattgactatcagttgatcaatcatgtagatttaattaagtaaagttctagagggaagatattatgattatttttgtattcttttattttaaaaataagtcgcctcttgacctaaaagcttaagttgattgttaagggcctaacaatcgtacttaagctctaacagtttgtagcttccttttcaaagaccttgtgtgagacatcgactggtatcttaatgacatttctgaaatattcttactataagcaggtgattggacattgctttagaataaagtcatttatggaggctttctcgtgaaactttatctcattttttgatatagtatatgatggttatcatttaagttcacattgtgttgacatcaaactgtgtggcctgcatatgtcctaacattgattatgagatgaaatttttaagttgaagaatggaaaaattaatctctatttatcccttgtcttcaagtctttttagttgttgttttcctttttagtcatttttccaacaatatgaagtgggtctccagcttttcccattcctattatttttctcgttccttttactaaatggtctagtgctctaaatctttcttcccgttgatgtaattgtgaaattcaggagtttgtgatttaagtctcaaatgtgataatttttgcgatgcgcttttcatctctgatccttgaatgggcttaagaacttccttacattcaatagtttctgtcttttgcatggattgatagttataataagtgcatgctacttttgcttctccttctgaatttgttaagcccttaaattttagtaattactagttttttggttatcctgctattagtttatgaccctatataattcatattgaagttgcttctgttttattgaagaggga

SEQ ID NO: 8895 - DNA, 1746 bp, Citrus sinensis
  Intron number 6 from transcript orange1.1g012141m (locus o range1.1g010814m.g) derived from phytozome v7.0 (chr-ID sc affold00035; pos 681653 to 683398)
ggcagctacagtcttcacccttcttaagctttgtggtaatttctttaattcccactaagttttaaataggattgcatattatgctttctcttgagcttcattttgtagttgtatggttcattaaactgttgtgtccttcacttcaaatttatcttttaagcttacttgtgattgaaaagtgatttatagatttgcagaatactacttatcaaactcataatatgatgcaaaaaaatacttatcttttttggaagttggccaagtgaatgagagtgaactatcaaaaaaatatttctttaatcaactattggtcaaaaaagttacttgaagatttgctattggctgtgaaagtagttgtttctttattgagcaactgctctgtgcttctaggagtttgttccttctgtgatgaaatgttctaatttatttgggctattggcttaggatattatgttagaagaacaattgctaaagtgttcatacctttggttagtgatttcttgggcccttttctgttgtggctcaaagagatgagattgtgaaggatgaattcttatcaaatctgatgtggtttaggcccaattatctctgaagttggcatgtaaatcactttgtgctcaattggttcatttttcattactctatgttgctgcaagtcagcaagatcctttgtgtgatggctagattgtcatttttcttaataagtatcatcaagcaggaagccaataaatgtatctgtgaagtttcatgtgggctctcaagtgcaaacctttattactgaagataaatttttatcctgttttatcactactgctgttgcatagtcagcaacattgaaaagaaaattctccattttaaatgcactttacgatggtgtcaaaccagaagtcatttggtcctttaattgaaggaggcaaggagctccatgcgatttggaacaaattcatccttgaattgcacatgcctactggagaactccttacttagatcctaacccttatttgtgcttgtccttgtttatattttcgatgtttctttggcttagtttgagttaaatcttgcccacaggattgtgttcattctcaggggtgatttcgtaggatcctgaaattgatcctgctattgttttcccttggaactttttgctagtcagacctatttgtatttgggttatccctgtagtaacacttaactcttctgtcttaatcagcgtgatttcatgtcaaattagatgctatctgataggatcctgaaattgatcctgcttttgttttcctttggaagtttttgctagtcagacctatttggttttggttattccagtagtaacacctaaaacttaaagtcaattggggtgatttcatatcaaagtagatgttatatttgattccatggaggagacacattcctaaacatgaattttctgattctttttggagataatggagagctactgtctttttctttctttgggaattttctggggtttcagctttgctattcatgcttcattagtgatattctagagggtctctaggtgcgtccttggtacatgcatgtgttacttttatatcactataactgccaaattgactttggatcacttgattgatccactgtttactaatacctatactcctaaatttttttcattttataatttctgccattgtaactggtttatgttcttttattgtataaccttacacaggttacgtgggtgctcttggctggtgggatctattt

SEQ ID NO: 8896 - DNA, 1323 bp, Citrus sinensis
  Intron number 1 from transcript orange1.1g014674m (locus o range1.1g011420m.g) derived from phytozome v7.0 (chr-ID sc affold00283; pos 78035 to 79357 reverse strand)
acaagtcaaagggtgagatcaattttctcttgcaaattgtgttttgctatgataccatcatccactcagatgctttgaactatatcatgtgtttgcaatgacttttttgtccatttatctgtgtgaaatatgaggatgcagacaacttcttgcttttattaattttatctttgcttcagtagttgaataaaatttgtcaccatctgaaccatccatatcatgcacttatgtgaggaaagtagttgtaaacttctttttaatccatatcccctctcttttttaggtttaatcccaacattaatattatttaaagcttatgccattttaatctgttacttcgttaatcaaagaaagctattttcttttcttcttggcatttcatcaattattgccaagatatattacttggttaattgaacaaagttattttcttttcttcttggtctttcatcaattattgccaggatcgagaaactttaaggctgagttggtagatgaagcaaaaacctgcatcttttgaacatgtcaaccagaaggctttgctctgaatttagctagttgcaacttgcatttataaaatttagatgccaagaatatggtgagagatttctagttttatctagaagtgaaaacatgtgtagtttactgatctttgcagaattgggtgaattttcattaattgtcgcataacaaacttactgcaataagtttaggagttcgcatattctcttttctttcctgccttggttttagaaatttgatttatgttttatttcttcttgtttatgaacaaatgattcatctatttcattttcgttgtgattatatttaatggaaatcgatgcttgttcctcatgatttaagagtttcattatgggcatttacattcacctttgttttatatctattgcaatagcttgtcttgcgtactaaatgtatccttgttttatattttttgtaataacttatgttgtgtaccaagtgtgcctacctaagcagacgtcttggagttcagttttcatttaatttgtcattaagttttcttcataagatgaaatgttctttgaagttattgtggttgtttaattatgcaattgtgaaattaaattagtattacaattttttgtaaatttcccattttttcttagatattcttgtagtatcttaattattttattattgtatttatttagctatttatttctttggtcattgctttccctcaggtaaaggtagaagaatcctttgttcctgcttttaaagataaagcagctgaagtttccaatttacttgctgaaccaaaatgtgatcatgcttcagttg

SEQ ID NO: 8897 - DNA, 1408 bp, Citrus sinensis
  Intron number 2 from transcript orange1.1g032413m (locus o range1.1g032413m.g) derived from phytozome v7.0 (chr-ID sc affold00071; pos 196705 to 198112 reverse strand)
gattttgataggcaaattctttctcggtatggtttttgagtgatttaatttctgatgatgcttagccttttcgtggatgttgaattttttctactctaatttctccaatgaaacggagaaactatttttctagttggggttttattaacaactgtgttaccatgttgttgttgttgattgactctgctactttcccttgaacttctcctgtattttggattggggtttcaagttataagcatggcacattggtgaaattgataaccaagagctcataaactttcacagttgtttgacaactctagctatcccaaccaacctagtaacccctgtttccaactgtgaacagcacctattcctgtaccatttagtattcaaatcattaaatgaatattgtttggatgtgtttctgtagataagtggattgcaaagcttgattaataatgatatagaagttgacgttggggagagtggtgtctttcgttgttttctactgcaatcttaggcttggatctgttccatatactccttttgccaccttttactgtttatagctctcttgtgtatagactttctctctttgtcaatttctaggtcctcagaattatatatcagtttgaagttcatattatttctttaattatggctatcaaaaattaattgattgatttggggaagagaaaaccatttagatgggggaagaagctttatgaaaggatccatggccatttggacatggagttccagtcatcttattcttactagtctttttgtatgagaatgatgtgaaattagatttgcaaaagccctgagttgccttgttacatagaacactcaaactccttggatctgtggaggtcttttcaagcaattcatgtctctttttgcaatttcaagtgcaatggactagctcttaaatgggggctgtgttaagcttacataagagagagtgttttgcactaaaaataaaaatgcacatgggtttcttttcctttagaacctcttgttcctgcagtgatgattgtatgaaatttgcagaatgcaggctttatgtttgaaagatgtacaaattatttagaaatagaaaagactgtaattacaaaaggaagtggaaaggatttttatctgtagcctgcttagtggggatatccatttccccttttggttctttaatgattctgatggctgtatccataatggtttccatccaggttttctttggaaaaagttattgtattagttcttagcaagttttttaacaaaactgttagtaactaccaatttcagacacatccacaaatgtggctgtttttattaggatttcagaatatgctctacatgccatcattcgtatttctttgtaatttttgcagatttcagaggccaacaggtgcaattccatcttcaa

SEQ ID NO: 8898 - DNA, 644 bp, Citrus sinensis
  Intron number 1 from transcript orange1.1g012625m (locus o range1.1g012625m.g) derived from phytozome v7.0 (chr-ID sc affold00091; pos 129560 to 130203 reverse strand)
gctgttcaagtatgtatacaatcttattaattgtagatcaatttaattctttatgagttttttttttccatttattttgataagattctcattgacctccaatgctactgtgcttagtcatcattaattttgcttcttttttgccatgcttcagtttttttttttttaatttattttaatctatgtcggaataaggaaaatatattattatgatttgaggttttgtggtgaaatgaaaatgaagtattttaaataattgaaggcaattaaagtgtatcatctaaattctagatcttatacgagtctgtctttagtagctcaggtctgttaccttgttcatgcgcatcaaatacccaacacaacgttgaaatgactgaaaattgaaaatcagttgtgattcaagtggcgggacattgatcacacatgtattacttaacgctttgattctatgaatatgaaattattaacgtgtttatttacctaatgatatcatgctatctggatttgtaggaacgtgtgaactgagaaggaacttttgtgtgtgatctgagaaagaatattgttattctgatgaagaaaacttttatcattaacttttgaaatgggctaatttttttatgccccttttgttttctataggacga

SEQ ID NO: 8899 - DNA, 2467 bp, Citrus sinensis
  Intron number 1 from transcript orange1.1g004259m (locus o range1.1g001896m.g) derived from phytozome v7.0 (chr-ID sc affold00008; pos 1384285 to 1386751 reverse strand)
tcgtttttgatccggatttggtcaaagtaagtcctcttttggttttgtgaacaatcaccccaaaaaaaaaagagtctgtaatttgtgctttgattgattgtatgtgatgtgctgcgtgatgggttagctttaatttaataacaagtgtcttgattggatttgtttttgtttgactttagcttttatttttagaaaagttgaagtttttcgtattgttcaaggattatttgaatgatgttttagtgtctgttttgtaaaagatggagcataagctatgatcaaatgaatgtttgttttggttttggtgaaaagtactgcagacttaatgcagtttagtgtgatttgatttgctctagtgtttacgaactgcttcgtggtgatctgttggataatgaactcgtgttggcattaggaagaaaactatgtcaatgttttgaggtgtggccaagtttatttaatctggttatactgtgttttggattgattttggttggattaccatttgataatggcctagtgttagttttatttctatgctgcaatggtggtttcatttgagtgtcatcttcactgctatgaaaatataattagctggatgttcatatctggtggacttggataatgatcagatttacattatgagagttggagcttctggggtttattgaatgtggttaagactccttttcaagtattaggactttttttttctcttagtaggttaatttgttcttgtgtttgttataggctggattgacatatcgtaattaatctactaatacaaaagctaagctatttaagtcacaacttcaagtatttggtaattactgttaaaatttgggttaaataggtggattctggtgttgtttaaatgtggtggatagtccctcatgagatgtttctgctttcctatgcttaggctagccttaacggcagttttttttgtgatgtatgtcttgtaatcatgttttaagttggtctaattctgtgcttactcatatttttatggtacattggatcaatttaagatttaaactgtaaattgttgataattggggtttcattttttttttaaaattttttgtttcgaactttatttatttaagttatgttttaactgtttatttatcttgcagtttctggtcaaggtttaatatgatctctatatcttaaagttgtatatgctgcttggaattttgatctgttattggtcgtgattattctgaatttctagctaatgtatctgctctgaatgcctcaactcttgttttttttttattttggaccattttgtggatcatagttcttggagtgggttcaataattgagtttccttggttcaaaatcctatttcttgtcttggtgcattagaatctttgggttaaagtctttttcttgtgatcatgtagttttaatcttaatcagagttgtgtggggtttcattgctggaagaacgattatgctctggaaatttttagaatcttactttggcatcctgcatccatttgaaagggtaaatgatagttgttgactttcaattgactggaaaggacttttgtatgattagagactgctcatttctgaatctttctctctttgcttttatgtgtgtgcttacctttcataaaagctgcaattatgattagtattgggattaaattttatatcaattatctacacttgcttttaagagttcattactgcacttgatggtgttttctctctgttgtgggtgtatgtctgtgctttaattttgggggtgtaataatgattagcattaggctaaaagtgatttatagaccctctactttccctttcctaaaagagtttattattgcacttgatggtgttttccttgagcaactaacccaaaacaaatgacataagatcctgattttctattgaatttagcaagttttgactgacctgttagtctttgtctaatatcttctgttcaaccaccttttcttttttttataatttagtttaaattattctttatagttgttcctgttgtatgcatggtctctactgcagtctttacctgcttttatacgaactcccttttagatacaaatttcagatcttaaatcataagaaaggatcttatagatattcttataaaaaaagaaagaatctcatagatattaatttggaagcttttattttatactgtatttggtagtatttttctttggtcaaagaggacatgaatgaatcttttaaattaccttgttgtaaggacgggagtgtgcgtcagtgtttttgaattttttattcatccttttagtaccccccgaggccctgagtaatctagttagcatcccgggtcctgcccacactttctggccatgacaagattctttttatttttccgcttctcttctctcctttgctgtttgtatttggaaactatgaatctggctttctgtgcaaactcaattatttgtgactcatatgatttagg

SEQ ID NO: 8900 - DNA, 341 bp, Citrus sinensis
  Intron number 1 from transcript orange1.1g039995m (locus o range1.1g039995m.g) derived from phytozome v7.0 (chr-ID sc affold07350; pos 1671 to 2011)
acacgtcagccacgattggtatttccggaattatccttgcgccttgcatatgtgaaacgcacttgtggcctaacaatttcaccggcaacttgagaacatatgttgcttagcatgtaaaattttgcctgtgtaattgtaactgagtttggtaggtctcctgctttttaactttacagaaaaggtaggacagcttttcttcttgtgcgtatctaaacagacggtgtgatatttttcccttttaatggttcctccattgacagattgattctttgaatgtgaaataacaagatttctttttttcctcctgtgttcctgtttttctcagtctaaaggtctaggct

SEQ ID NO: 8901 - DNA, 1715 bp, Citrus sinensis
  Intron number 1 from transcript orange1.1g008573m (locus o range1.1g005668m.g) derived from phytozome v7.0 (chr-ID sc affold00101; pos 184344 to 186058)
tcagctcgcactttgagcggcggcttcggagccaggtatgttaacttttttattttttaaacgaatattctttatgagaaaaaaattgaaatttaatttaattaatccggttgatcaaataaggtaagtaaagttcaaacatgcactctgttcatgaatagtaggcaactcaatccggagcaatgatagctttccacgtaatatccaataggaacttatcggtaaaaatgaaaaaattgcggtggttgtttggtcctcgaaaaaaaaaaaataaagaattgtttcatcgcattatcacattaggcatctaatctaagcatcgttttgaagaaacgacggtatggatgtattcaacgtattgacgtgggtcccaactactggaattttggactccatgcgatttggagcacgagtaaaattgtcgagaataaaaaaaaaaaaaatcctagaatatttttttggattgaggttgtgaccatggtatcctacaatatagatttcacaattttaacattcataaatgattaaattttatttatttatagtaattttgtttattatctcccggtgcttagattgaaggatgctcttaaagttgtagttgattgaacatttcacctatttgtctcctttctttttcactttaaaatttttttatgtctagtatgagccagaatcatgcaagcccaaaataattggtgtttatctttgaggagagaaacatgactcgtggcccatgcttttgcgaatttcttttcccctaagatgataattttttcaacccttcaaatgatgacagttttttacacccaaaaacaaggaagagtacaagaccatgcgtaaattttaacttattaaggaatccgataatatttataacattaaccaaataatttttgaaacaatagctaaatggccttgagtgacttgggtgatgccatgccacgtcggttttcgattgattgcttagctttaaggtgcgagttatgagtgagtggtttttttttttttttatctgttgcacgtaggacttttcatgggccaagttttttgctcgtttacgagtgttttgcttggaataattttttcttgggtcttggtctttgctccatttggaacgcgataggaaagagggagggtaacttcggctttaaaacgggttaacccacgttcgcgttggtttcttttcgattcattttgcccattttgcccttctcgggagtcttctgtaattttccttcttttttttatagtttttgtagttttgtcatgggctggataataacattcaggcccccgagctctttttctatattgggaaggaaatagtttatttgtgatttcagtaaaattaggagatccggatgtcatttcctctttactgcctggtgcctcttggctattggtagttatggtctgtagtccatcgttgtgtgtatgggaagccgtgccaacagttgaccctctgacttggcttgaattgaggagaatccaacggtgattaggatctcgtcagtggggcccattacttgatcgcacgactacggctgtttcttgtttttacgacattttatgcttgcgtgtagtatttttattttaacaaaaaattgtattttaattctctggcacaacagagagcgttattgaactgatcaataatggtatagtgtttttctgcaggaatctgagaggtacaagaagttggtaaggcagca

SEQ ID NO: 8902 - DNA, 433 bp, Citrus sinensis
  Intron number 1 from transcript orange1.1g032942m (locus o range1.1g032942m.g) derived from phytozome v7.0 (chr-ID sc affold00005; pos 2334449 to 2334881 reverse strand)
agaagcccttgtttttctacgtcaatctcgcgaaggtatctttttttttatttatttttagatttgttttactgcctttggatgctcagaaaccgtatgaaacgaaatagaagcaattcttggcatttttggctttaggctatcgtgtccaattcgtttgattggccttgttaactaagttttttttttctttcttgtttttgaaacatattgaatatatatatataagaaatatgtcttactaggtttctgttgagacctatttgtagtttagggttttactctcttttttatcttgggatctgggttttatgttcttgatgatgtgtgggtgcatctaatttaggtttgtgtgctatgcttcagaaaaatttaacattttattcagttcataattcctttggttctgtgttatttctggttgcagaggtat

SEQ ID NO: 8903 - DNA, 1499 bp, Citrus sinensis
  Intron number 5 from transcript orange1.1g008506m (locus o range1.1g008506m.g) derived from phytozome v7.0 (chr-ID sc affold00028; pos 893270 to 894768)
ccctgcaaaattctagcactgtagaagctcaggttagatttccttgcagtgagatatgtgctcttaggtatttcttttcatgctctatgtgtgatggtggctgctcggtattttttgacgcggactatttgtgattacttaaggagttgatcttttactgtttttaattatttttatatcgcccgtattccagagtgttagtctgcaaccctcatttttcagacaaatttgtttaatgcacagcagataaccttcttgaaaatttcaaattaggtaactttgtttgtctaagctaaccatggagtactcattcagtgtcctatacaaattatatcttttcgaattctgtgttcaagattttgatgaaaaactcttttcacctattgtgtttcatcttagaaagttatgtaataatgaactttacatgtcaaggagatttgggtaattcatttaattacgtgattgagtgtttattttgtcattgtattttcatcagattatagaatgcttggagctttattgtttactcttttctccaacttgttttttttttttattggttctccaattgttaattgaccaaagatttgaatggtttttcctgagactatcttataattctttcctattattttatttttatttaaatatcattattattgtttttttgttacagttgcttgagggtttgttagtccaaaattctgagtttacagcatagagctatttacttatctgttttactgtaataatgatcaggtttacattctgattgttctctctaagcataaactaggtcttattcttaaatgtttcgtttcttagcaagaaaaaaactaggtcttattcttttaaattgattatatttaatggtttttcctcacattcgtctgctttggttcaaattttcaattttatcatggatttttttatcaacattattttactatttacccttactaaagcgttatgaatttaattttattaatagtacagttttctttattattaaacttaatgaggtgtttaattcaaaaaaaaaagagaatactttaattaggtgttttctctagaaatcttttgtcgtttccttatggggcacacaaaacttgaagttatgattgtagttgccttgttagtttcaaaatagtgtacatgggacatataatatggaactttaaatgattggtttagctgatggcaggtcgaatttccctttctataacctaggagcctatgagctactttgtgaatttagtaacctataagaggctgtctttatgtttgtatgaggactaaaattgccatacccaagttaagacattatactctttcaaagacaaaaaacattgcttctcaaagaaaaaaaaagacaaaacattgggggatatacagactattgaatgacattgccagtttttgcttcttttcttaatagccttttactgaatctacttgtattttgttattgatctagggtgacaaggtacgtagacgtg

SEQ ID NO: 8904 - DNA, 1449 bp, Citrus sinensis
  Intron number 1 from transcript orange1.1g004200m (locus o range1.1g004200m.g) derived from phytozome v7.0 (chr-ID sc affold00040; pos 800468 to 801916)
agagaaggacgcagagctttttgccttggcaagtgaggatgatgtgctaaatgaggttcttgttgatacatcctcagtgtaacttctgttttaattcaatcatttagaaattaaaatttgtaggatttatttaattcttttcactattttttctttcatttttgtacttcttttacttactctttagaagattttggggcagtcaggtcggagaaagagggacatggttagggaattgaatttgtattcctgccactgctcgtggtcatctcttgagcaattagtcatccttcatcctagcatgatttttggagcttctcgatatgctgaaaagaaaatcttcttgtttgtaaagatagaaagtggtgcatgaacagaatttacagaacaggaagaacgttgtacaatttttgtttctcaagtaatttggaaaattaatagtatttacaaaggggaaagttttatgatttctctgctgggttttagatgatacccttcatcttttcatgtctctgaacacaaaaaatgtttgtcatttatcttcaagagagtccaaatacttgtgtcagttaacgtggctatgttttaacttctattcattattcttcttgcttggacttccagtgggcttttgcaggcaatatttgcattcttaggcaatctaagagttttatttaatttggtttatgtgctgctaagcttggccattatagtcatgactgacgattgagttcattctgaaaggcacttagctttctgtctgcatagttattctgaatcagctgataattccccaaaacaagcttgtagaagtttatatgtgtgttgtttggatcatatgcagccccttcaagagaatgatgagaggtgtttgctggaaaatcatgctcaagattttcttttctactagaatttgatgtcttatgctagttcatattcctatttagaggatctgagctgctaaagtatcattcagttccaattatagattctgtgttctccattccagaacaagtaaagcttccatgaactttgctgtctctgcttctagcaaaaccaggttaagtgttttgtcccttgtgtgtgtactttagtttcatgttttatcaatgattatcctttaaactctcttctaagttaggaaccaaaccaaactcaaagtgaaccttcccctttttagtgtttaattatttattactttgcatgatctatagttaaatcgatatttcagttttcacgctggagttttgtgtttgacctcaaacttttagttccctaaaagaagataaatttgtgtttgactaagatcttggtctagatgtggcttaaaatcaattatggtcagtgaagttgaggaatgagatgaatatatataattactctatttaatcttttctatgacagaaagatatgacaatgatattgttggctcaggaaggccaccataac

SEQ ID NO: 8905 - DNA, 522 bp, Citrus sinensis
  Intron number 3 from transcript orange1.1g001319m (locus o range1.1g001190m.g) derived from phytozome v7.0 (chr-ID sc affold00004; pos 4061454 to 4061975 reverse strand)
gaaatcacacagcttttaactctcagcaatttcaggtatttttttttaattttacctccttccaacatatattgtcacgtttatctcctagatagcaaggtctagttgataatataaatttgtttatgatgaattggattgctgacaaattttttttttttaatattctgagtttgagaaaatagaatctttgtttaattgagctcaagtaaaagctctgcttttcaacgaaaaagagctagaaacttagcttaggtgaagagtgttgatgtgtgtttaatttcatataaagattaagcaatgtttatgacagtattatgatttttattgcttgatctttcctctactttctcattagcttatcagaagattgtgtccttataaatccatgtgcttttaagtgttattagtagggaggtatttatgatgttgcttgttttagattttttgacttaatgacacactgataccacctaattacattttgtgtggttgtatattcctttttttaatacagggaaa

SEQ ID NO: 8906 - DNA, 1723 bp, Citrus sinensis
  Intron number 2 from transcript orange1.1g007303m (locus o range1.1g007303m.g) derived from phytozome v7.0 (chr-ID sc affold00072; pos 495211 to 496933 reverse strand)
tctggtgcagtacggataaacctatctggaattctgtgagtactctgtctcaaatcttaatttgcagtttatgcagtgacttgggtagaatagtttgactttgtctcatcttttgaagccaagtgaatgcatgatttaatttgaatgcaagtgtgcagctgttcttgtggttattttttcctatttggtatatagctatatctattaattacatctcgttaatattttggcatataattttgcatgtggcggatattttcatctaccaacaaacttctccaataagaacttttaaaaattttaatatcattgaggaaaacccttaactccaatttttatactgctaataaaatgtttggaaaatatgacacttttgtaaacttgttttattttattttttaagtttttggtataagaaaggagtcttttcccttaagttatatggttttgtctagtttcttatcttgcaaatgcatgatttttctcttgccatactatcctcgacattgctaaacacagcacctttcgcagcattttggctttctttcctttaccaaaagcgtacaaattctgcttaagaaaatctttcgtaagatcttgaaacagcctagcaaattttggcttccttacaaatagtaactctcataaaaagattaaatatggcaatgcatgaaaatatgagctgtgtctcatcattttcctacaaattacatacaaacatggaaaaagactttatcttgggtggcgtggtaagtaggcttataagcactttggctccgtctccttacaagccagtttttaaagctgagttctaccttgtgtctgcgtaacaattggtataaaagcacgcaccaccttgagtgttggatcggacatgccatgccaagttgggtgtggctttgtgactgttgttgtggataggctgacttggggagtgctgctacctagaagaagacaaggtctgcaaagtcacccagctaggtatgcgtgatgggctgctgtgggcgtcggttgtgaaccgtggtggaattttaggatcctatctcctatattgctaagttaaggctaggcaattgggcttataagcacttggccttcctctccttacaagccagtttttaaggataagttttacgcaatgtgtttctttgcaattaattggctgtcttatccctgaataggatcttaaaacattgaagatttggagagcctttgggcttccatcacattgacttggtgttagatctcattggaattctcacaacttgcaaaataagaaataccagaattcttgaaacctcagtcctttaatcttttgtgctaatcatgtacatgggctaaacagctaccacatcaactcatttgttgcattgtgcctttggatctcttttttcaagttaatttatgttgcattcttgcagatgatggtcaaaacattattcttcttttattactttctttgtataaactgcattttaaatactgctcgagtatccctattgtatgcagctatactgcctgtactatgtcgttctgaagatgctatacttattaaatttgatttcatgttttctggattctttatgctaaattgaaagttgattttatcgacatgcacatgtactgtcaagttgcaggttctgtatcttactgattgaatgaacactatgtgaatctagaattatgctttaactacaggaaaagaaacttctcttggaaacga

SEQ ID NO: 8907 - DNA, 1686 bp, Citrus sinensis
  Intron number 1 from transcript orange1.1g002912m (locus o range1.1g002882m.g) derived from phytozome v7.0 (chr-ID sc affold00016; pos 823628 to 825313)
caggttggtgatttttccctagaattgaagtttgtcacctgctagttttgttttagtgggtttgaactctcaatttcaagtttttgattttgttgactgttgtgtagtaagtttacttgttatcattcaatcgacttgggtgtttaactgaatttagtttattatgtttcgattgattgtttttatttatgtatgagttacttgttgctgttcaaggtgtactgaggtgctaatgagttaatgtaagagctatgtttggtgtcaatcttttgtcttttttttacatagggtttgcggttgtggcgtgttggattttgattagcatttttgtggttggtagtttttggttctcagtataatcaatgcagttgctgcttgtaatggaagtaaaagcagggaatggtgcagtttaggtgtttagagatggtcaatcgctatgggttagtgtgagcccattacattctgcaagacaattggaggataagtttgatatctttggaagtgccaaacatattcggaagagtacccatggcttgttttagttgaagcaagtttttagattcatcttttggctgaattttagttagggtttggactctatggcatgtcctttgtacggatcgatttctattggtggcttggagattcacagtttgtctctaccttagcattttgagaaagttggattttttttttcttgttggggtgtatatgtggttagtacacgtgcgatggagtattttttaagtttttaatacaaaaggacaattgctgatgcataccaataaggtttagccattatttacctgctttgcattcctatttggtggttcttgcgagtgcccatctagttgcgcgataattagtaattcttactgagtggtcttaataattttcacggaataggcgattattttcagagagcagtgatgtgactcatggatttacaagattggtaaatttgcaatacaaaattgaataaacatcacatgttgctaagatggattaaatattgttttttgtggtggtatttactacaaaaagcacttactgtaaataactttccttttttgaattataaatataattataatttcaaactgaaaaaaaaaggtcaatgtaaagctagtgagtggactatcattgtttatttattatttatttttattttctgcatttggaaagtttattggaatttagttttgattgtgtatttgatatgtgtagtctaattgtcaaatcatctttcaatcacataggggtgtttgctttgctgtatcagatgataaggtaataaccaagaaagttgcctttgaaaacaaacgaatatatcataaagttactcttgggagcataatctgttgacttaatccattgggaggattaccctgtagttaaaatgctcatgcttcattaccttgatttttattgagccatgctttcatcattatattcaatttaatttctttatctctaggtgtgtttttccttgtacaagttgaaatttctgagaatgattttatgttttgttgttttgagctgaagcatactcttttattatttttatttcttctttgaaattaactggcaaaagttgcatataagtgacacagttttgcatcactatcattttcctctttattttttctttcttgacttttcagcgcgtgaaggtttatcgcttga

SEQ ID NO: 8908 - DNA, 561 bp, Citrus sinensis
  Intron number 3 from transcript orange1.1g034596m (locus o range1.1g034596m.g) derived from phytozome v7.0 (chr-ID sc affold00151; pos 178981 to 179541 reverse strand)
gcaattgttattgtaacagtcaaggtatgtgcttcctctgttttagaactttcatgcactggtgggactttctaattgatcaacactatgatctgctatttatttggaaaaacaaagccatgtcgacacaaattgagtcccagaatttggtccagtacttctcatctagattgaatatttgaagaaaaactctaaagatgttcaggccttctgaactctgtttccagaatgcaagttctctcatattgcattctggttgagcttttgtgtctttttttgttctgagagattatgtgcctccttcttatgcttttcatgtacttgtgaaaagaacgcaagcttaaggtgaaaagaatgcaagcacaaggtgcttaattatgggaacttgaaaataatacatgcatttgtagatgaaaagattgacatttacatgccattgcacttacaacacacactcaggcatatctttgcatcagggaatttttctatctaagctcctaatgttagtttcaaatctaaaacgaaccatggcatttaaattgtgtttttgttgacaggagc

SEQ ID NO: 8909 - DNA, 692 bp, Citrus sinensis
  Intron number 9 from transcript orange1.1g019385m (locus o range1.1g019385m.g) derived from phytozome v7.0 (chr-ID sc affold00221; pos 25062 to 25753)
ttattgttaacaaagccaggggaaaaagtggaccggtaaagctctctattctttgcagttgcacatgacagtgccagtgactttgttgctgttatttttcttttctaagttgccatatagctgtcaagataaccaaggaaaagtaggattgtttttttgcaatgttaatgcttgagcatttgagaaagataaaatcaattcgaaaatcctaatttgattccctttattgtctgattgatagtctgattgatgtgttcctattccattttcatttagatttttgtccgtagttgtgaacaaaagatttatttttattttattttcctgttttggagattgtttccatttgggaaaatatatttgacttactgcatattacaatggaacatgcttcgattgtgttgtgacattcattttttgttatcagtgtgtcttgtcttgtgtactagtattggctagccaggctcaattgacttgtaaatgatctagaaactgggttgtttctactgaagtgatgaatacttttccttctctctttccatccttctctctgttttggtgtggaaatatatcagctcttgcaaacttgctgcaatgcagtctaagtgattcattttctttaaatatacatcatattaggttactcaatcattttatgttgtctctttactcttcacagctttttcactttg

SEQ ID NO: 8910 - DNA, 1428 bp, Citrus sinensis
  Intron number 1 from transcript orange1.1g019076m (locus o range1.1g019076m.g) derived from phytozome v7.0 (chr-ID sc affold00236; pos 78620 to 80047 reverse strand)
cttgaaattttagctcggtatatattaacacacacgtaaaaatatccattctagtcattttgtttgtactgttgtgtaatgtactagatactatgtttattgttaattatgatttttgagtttcgtgggttttgttgtgatattttttcatgcgggttgctctataactagtgaaatctctgtgatttgacaagtttatgggttgccaaagagtttaagaattatttttcgtgtcatttttattattatgaattataatttatttggtgtttctgatttatttatttatttcttttcagttatgtatgtttatggttatctgaatataaggattgctatatatttcgtagtgtcttttggtttgagctgtgtttgatatggtcatggcaaaactactttttgcaaaggtgatttggtgtccttttctttagttgtgaaattgtagtgcatatttaaaaaattagtgattgattccacaaataaatctttggcaactgtttttgctggacttatcagttatgctttgcttaggggtatcaagaatcttcaatatttttcctcatttttatatgggaatattccaccatatataccctttggattagtcttagtgaagattataaagtcagtgcctgatgctttgttctttagttgaaaatcatattttacttaatagttttgtatttccttgtaactaagaatagttcttttgtcaatgtgtccctaaattcaatgtaaatgatgttttctagaatatgaaaatcaacctgacctttagttcagatcctcactcggttttgtagtatatgaattttctatttctcttgcaatttttgttatggatcttttgtgtctgaatatagtcataaatagtgatgattttgtatcaccagagtattaaattgttacaagttctcaattaatgtataccatgtgtttgaatgatggtgagacctaaactggtgcaaatcatagtcacatgatataaattttgaccttgtactatgtagcgttataacgttcaatcatggcgacggaggtgatggatcttcctcgaagaacttgacatgtttaaatgttgcattaaagttctttaagattttcttgatttacataagacaaaggattttagttaactagttttatgcttttaactttggagcagtaattactaggaagtcttttctgctgttttgttgataaacattttcttgcacttggtttttactacgttcttttgagttttgagaaagagaaaaaatttagtgagttgtttattctgagtgtgaagttagataaagttaattactttgattgattaacttcacagaatgttgcctattaatttagacagtcaataacaatcaatgatttatatttttgcttggtgcagaaataagggaataagttttgttgccattgatcaga

SEQ ID NO: 8911 - DNA, 3568 bp, Citrus sinensis
  Intron number 1 from transcript orange1.1g032951m (locus o range1.1g032924m.g) derived from phytozome v7.0 (chr-ID sc affold00005; pos 1444730 to 1448297 reverse strand)
gggtagctgaggaacatttgggctctgttacgaaggtggcattcatgactttttcttagtttactgtccgtattgttgagcaaatcttttcagttttgcaatgttctgtggcagcaatagggaaacattccaagttccaagtaacgctgggagcaagttttgaaagaatactaggactattctactcagggggttttctattgtcctattttagtaatttttgcagtttaattcttctgtctttacctaactgaatccttgaggttcgtattaactctgtcttcattttttgcaaatttcttgagagtgatgaataagtgttttagcttgccaactctccaccttaggagtttctgacaactcccttgttctttcttgttggtagcttccatctatgcctgtttgaatactataagttcagctttcatttttgtgaacttctttcctatgatgtgggttttttccccctttttcaaaggtttgggtaggatttggggatgtcattcgtccctttcttagctgatcgcatctacaaatttatctatgaaaaacccaattgtattttggtcatttgatttttgtaagtgttatgttgcagttcttgagaaatggtctgggtatttgaccacttctaggggctgatctaatgaattttttcgaactttttttaatcacttctattcatgaatattttagagcatattgtaatctggctgtttcattttttgcaatgtttaatgttgcagagtttcagaaatggatttagtagttgaggaatatctggactgctgcaaagggagcttctatgattgaggaattttctgagttttcgaagaatcaattgaccatttcacttgaggagttgtctattgtgttgttcagtcatttttccagttggtttcttttatctctgcctaactgaatgctctgaagtgtaactatgtttgttgcaaatttcttgagcagcgatggcaaagtgtgttcagtttttttggagtattaaggctttctctccactgcaggggcttctgatgactctaattctttcttcttgcttctagcttctagcttccacatggctacctgaatactatgaggtttatctcatattttggtctttcatttgtgcatctctgttggagtgaggtgaatatgtttgaattgcttgtggatcgtttttaaatagattgaaattttgagtgttatggatttatgagtacatcttcgtgtttttgagaagtgttgcagaacgctattcaaggggcttctagtaaatgatttagcttctcaatgccttgctttagagtgtaatttgatcagtcatattgccaaattgttgttgcagcttgccagtagagaattgtttgtggacatctgcgaataaagagttttgttagtgttttgcggtttgcttgttatcttatttgtttaatttgttgatgagattacatcctgcaggtttgtgttggaatcttgtttgtttgatttcaatgaggttatatgcttcaggtttctgttggaaaatactctggccaatggtcaatatagtgagtggtttgtcttccgggttgtgattggctacagcaaggcttctgcaagtttgtagggcacaaaattccttgccatttgttgattatcacttttgaagcagctgctggaatcaactatttggcaacaataaatgggggtgtaagggaaacattctaccactagttattgagcctttatggattatccatataccaagtaaatatacttctgatgtttgtcaatattttgccctatcatcagattattcagtgtgttgaactttttagcaaatattctacatggaagggtgtccacgtgtggggatcataatgctggcacgcttatcttgcgtacttattttcccctttttttctctttgatgcatcgctctgttttttgagttgatcctgtgatccgttctatgatttgtttggttacagagaattgttatagctgttccattgccccccttttctctagttgaaagagagttttggtgtggtcgaattccgagtgttgttgggcagatattgcctattggttctatacctcctggactttgttttccctttttagcttgtcttggttgctagttagccctgtgctcattttttttttttggtttgattacagagaatgatgcttcagaatgatgttgctcggttgatgtttgtagtttttatggaataccaggacttttgtctcgtggtgtctatgaacattgagaacatattcgtgctttggtaatgccattttacaaatttttttgttgcagtgttacttaaatggtcagtgttttgaggagtattgggactgctactgctgtgtctttaatgggctttttctgacctttttttagcttatcacttctactcgtaatctgtaagagaggattgtatttggtttgttttctctcttaacaaatttttgagaagtatcgtggagcattttttagacattttacttagtttttaccactttatctttgaatactttaccttcattgtgcccctttagtttggcaattttttgttgcagtgagagaaaaaaatgttccaagttttcaaggagtataaggactattctacttgggtgattttctgacagatttttagtcctttcctaagtttatttgttctattctaacagtccagtttttaattatgttttccatctgttgcaaaattttggagcagtgatggttgaatgttacaaattttgagtgttggggctagctatcatctaagggggtgtttgatggcttttaaaaattttcctctaattccttcacaattttttgttgcataggtatggggaacttagttttcaggaacattgggactgttgacgtgggggtacctatgaacttagttttcaggaacattgggactgttgacgtgggggtatcttccgtgatttttagtcttttctctaatttattatatctatattcttatcttactctgttaaaatttaagatacattggggctagatattgactacctatgtcttgctattttggaaaattgtgttgcagtgatggcagtatgcactgagtttttgaggaatttgaggctatacattgaggagtgccccgatgagtgttttgtctcttatagtttctcacttctgtctatgtttatcctgagtacttgaagaatatatctcttatcatttatttggcacaattgtgttgcagtgttacagagttgccaatttttttgaggaactttggaacttgtacgtgtgaaatccataactaaaattttctctttctcttctgcaaacatatgttgcagtgatatcattcctgtgttttcaaggaatagtgggactatgctgcttgtagtgaccaatgggtttttcttccttcactaatttattattggtgtctcagactatctttcatttcttcatgaggttcaatttgtaattttgtctttcataattgtagtattccatttttgcaaatttatattgcagtgatggtgaatgttttgaggtatttcgggattatctgctgcttggggttttttg

SEQ ID NO: 8912 - DNA, 994 bp, Citrus sinensis
  Intron number 2 from transcript orange1.1g019131m (locus o range1.1g012506m.g) derived from phytozome v7.0 (chr-ID sc affold00496; pos 39400 to 40393)
tggtgattgtggcgtaagtgacgaccaagatgtgatgatttgtatcttttttttattatattatgttatactaattatgactcaattggattggattggattttaatgattcagtgttgagctaatcttttttgttaatttttttgaaagatataattggtagttattgaataagaaaataataatgtaaaattgattaaattttaatgtatattgctatacttgcacgtatggtaaaagattatggggagttgaggacaagccagctcagtactagattcaagtctagattttaattagataggtttttgtgatacagagcttataggactgcactttgcaaatcaaaacgcggtggtttcaaggatacttatcctgatgatttgcttgcacctgttttgaaggtatgcattgttaaattacttcaaagattcaaacaatttcgttgttgctcttgttttgtttgtaagttgtaattgttctatgttgttacgactgttacatgtttcgtgttcgattcaaatctgaattcttctagagtcagaatatttaagtttcaaatcctagtaccgctacatttccttgatttttattcgctaaacctaacattgtaagaatgtaagagttgtaacataagtgaatctggcaacatgtttatgctgtggtttgcagtgttattggaccggtagtgtagtttaatcccgatggtctgcttgcacctgtgttgtgcatatgtgtttttaattacctaatgattgatatgtatatcattcttgcgctttgtttgtaatcctagttaacctaattctgcaagttggaatatagaatgtaaggcatgtatgtaacgtgagtgaatctggtaacatgttagaagttgatttatagtgataatggttggactggtagtttagttaatcctaaacctgaagctgaaaggatttatctatgtatatttatggacttgggtggctgcaggcagtgatagaaaaaacaa

SEQ ID NO: 8913 - DNA, 1402 bp, Citrus sinensis
  Intron number 3 from transcript orange1.1g031618m (locus o range1.1g031618m.g) derived from phytozome v7.0 (chr-ID sc affold05138; pos 1777 to 3178 reverse strand)
gttggggtttttttcaggtaagctgatcattttatatttcatttatttatatatagtgttttttgatagaaaacatagaaacttgtattaagaagaaaaaagtgtacagaaagtgaacgagtccacaaataaagaaccccaaaagatcaaaaaaagtctatgcagttcaatgctgatcagatgacaaaaaaagtataggatctatatgactaaatgatctcacaacaaaaacaagctcaaaagcacagaattaagccaacaccccttacaatttagatgaatgaagaataaagaagaatcttgaaattcctttgtaatgatgcccaaagaaaagccagtaatcccactctctaccacaaaaagatgatgtcttcctcagaatcttaaaaacaatctttaatttctttaaagccaaatcacccaaaaagtggccagaactgaacatttccataacactctagttttttacctttcccaaaagcatcaataatctctgaaagctgagaaatgctagaagctggaatcactcaagaaattctagctgcctgaagcaatgaacggcattgtgacaatgcaaaaacaaatgatctgcactttgctatttctcttgcatatgacacaccaagaaggacaagcacacattatgattccatctctgaatagcatagtttacctagagccaaggaccaaacaaaaagtggaactttactagggtctttagcattccaaatcactggataagttgatctattttcactaaggttaatatttgttaaattaaaaccttgatgagccagttttcaaactctaatctcagtgctacgactcaaaaggaaggtttatgaataataacaatactaggcactgcgatcagttgtcaaaaagaatggtagattctgctgtttcagttactttgataggaaacttttttatccaaatttttacctgccaataatgtaaaaataagtgtataacgatattataatgcaaggaaaccatgataatgtgagatgcaaagtttccataaaaaattactgttagtcatccacaggaatttttggcctaaaaaatcaatagctggagaaatggcccatgtggttgatatcttctatcaaatattcttgacttagtgaactcccttgaatgttttctctgtggaggaattatctttgtttggtctaattggtactccaaagatctcagagaatttaacatatcgctcattttctagtttagggaagtgaaaaagagtagtgcttttagcacttttatttgatagaaaactgaaaaaaggtttagtaacagcaggagaccatctgttcttgttactgatcctaattctggtagtttaacaaacatcttttccagtgcagttgcttgtaccttcggctcttataccaac

SEQ ID NO: 8914 - DNA, 2313 bp, Citrus sinensis
  Intron number 2 from transcript orange1.1g035778m (locus o range1.1g035778m.g) derived from phytozome v7.0 (chr-ID sc affold00021; pos 838945 to 841257)
cccatctactgcaaggtaactggatttatagcgacatctatgtgtctatgtctctacttgcgtgtgatcacattaatgatgcatgattgttgaattgggttttgaatattttgataatttcctgtctagctttcggtgaaattcactagattatctttcttcacccccccaaaaaaaagagggtagagttgatgatatatttggtagtatgataatctttggaaagtttgttcttgtcaaacaaatcaaggaggggggaaaatatcatttcaagtgtatgttagatcatttgatggaaatggttaacatctttggcttccctttacagatagtgagatatctggatgaggttgaaggttgattgtattatagtacttcgtattgtagcgttgtgccatttccatgagtcaaaccccttcccaaccccttttctaatttttaaattcttggtctgcttttcatttagttaactgatttagttatggtgcatgcaaatttgtctttatggatgtgctggtgccttttgcagctctgttgaaagttaatttgctctatattatgcagtaatgcttctatatctcatgcaggcagctggtttaaaatatgcattatttaaaatgttctgatgttttgtagttttgtagtttgtcaagagtgttagcatgcctgtaagtttgtatgttaatatataatatgagcatgtattcatttcttgagaccattatggctttttctgctggctattaaaattgtgtaattaacattttcttgttaaaacaattgtggggtcttttattctctttaatctttgacatgactttttaaagaaaatgtatgataaatatttaatatgactgtagtttctctttgacttgttgaattttttctagataagtaatttatttaatataactgtagttcattactgctcgcatttgatgggggaagaagttttggaggtttatttgatgttatggcatgttgacgtaacggtttaagtagaacttgcactagtataatatatagttccaattttctccttgtgtcccttagattcttaggagtgtatttattggtacaaatcctctagcattgacaactgtttttgtcttacaaatatcgtgaggtggtggattatggtagatataataggattctgtgtttagtttattgatggtgttcatccttccaaataaatatatcttttgacttgtaggtaaagtgggcgtgttctataatgatctctgaattaaggggaagtaaaggtagtttcatctcctatattatacgatttgctgctgctttttgtatatataggatcaatattttaattacggtaaaattgagcgtaatgtctttgactttaatatgattgtgatgctatgttcatgttaatattttctattttttgatgaataaatttgttgggctttgatatgttcagtttcttttacagatcttatttacatctttgcacttattctttgttattcaatattatttgtccgtttgaataagtttgcttttcaagctgaaaacctgattctttgttattcacacatcctgtggatgtgtaaatattgctattagatatatctgctaaatgaatgattgacctttttttttagttaaatgaaaaattaggttattgtaaccaacaatttgtgtagtatgtgtaataaagagttaataaacaaaaattagaactgcagctgccccataggagtttggatttcctcattttgaccttatctaaaactttaagccactactgttcgggcagatggtaatcaattaatcatgaatgagttggagggtacatatttgcatttccctcctgatgtcattttgtaggttattgagggatcacatgcctgtaactctgtcattatgttcaatgaagttagctttgtcttgggcagctgtaattgggttttttattgtgcctcctttggatttgtagttacaattaggtagtatagtgataacttttgtaaaccttactttaggctggaaaggaacgggggtctattatgttttagtggttaagatatctcaatccttcagatttgtgtaaacttaaatatgacttatgatatattaggtggagaagctcttttaagttttattagtatcctttctgcttttgataggctcttgaatttatatagtgtgtaaccctgttagcagtttcctgcctttctttgtttgtgtttatattattttattttcctgtttacctctttctcaattctctctcttttgcattttggaacagagggaatttaagccttacaatcttgccaacatccg

SEQ ID NO: 8915 - DNA, 567 bp, Citrus sinensis
  Intron number 4 from transcript orange1.1g037358m (locus o range1.1g037358m.g) derived from phytozome v7.0 (chr-ID sc affold00071; pos 82698 to 83264 reverse strand)
cattaaaagatttgctgattggagtgaactctgtggtatgattagttctgttaccataggtcattataagcctacaaccacaaaacaaaatccaggagaaaaatgaagggtagagattttatgaggtcattcatactatcaccgtggtgcagatcagtgcttctttaatttttttgtcaaagcacaataggtcaattggtaatagtccgtagtttgttttcaacagaatattcctgtctccatccaatgatttggcatgctttgattggtagttagttggaaactagagaatataaaggcacaattctgaagaaggcatatcaaagttggacaatatcttttggaggattgtagagcttcctattgtgttatgaacttaatatctagtttgcttattgactgccattggtcttctttatgttagtgcaacaagattctcatattttcataaacatctgaaaactctctccctcttctcctatgtttaacatactgaaatctttatgttgatgaactcttaatatgtaactggatgcttagctttttgatttggaacttatagatctc

SEQ ID NO: 8916 - DNA, 2310 bp, Citrus sinensis
  Intron number 1 from transcript orange1.1g006864m (locus o range1.1g006212m.g) derived from phytozome v7.0 (chr-ID sc affold00729; pos 63098 to 65407)
cttccattaaagctggtaataacggcatccattataacaaaatacttacctttaaaagtatcttttattatattatacaatacatataattattatttacagcaaactggccctcacaggccccatatagaagaatctagttccaccaccgtcaagggacccttaccccacaatagccattagaaagaagattagaatctagttccctttagttatgtaatttttattctggcctttttaagttttagtttctttgttttgtcgcttgttaaacatgttaagaaaaattttaaccttgtcatataaaattcagacaattttttgactgcttgcaagtttttagttgcttaaatttgttactcgaattaagatttttctttttgcctattttattttcaatctaatttcgtttgtagaaggaaatgttcaatgaaaagaagttaatatctcttctttcttttttttggatttaatctaacggcaatccagtcttgtcccggcacacatgtaaacaaaattcaaacctcaaatctttgttttcaacacaaaattttttattatctcaattaaatgacttccacaagaaattaatatgctttttttattatttttatgctccagagagcatagttttggctagaaatatttttgttaatacctaactatttaaaatctttttttggttcttttgtaattttgatagtaatttattttacacgtttttataaatcaattgaatgccaaaaattgtctttttgtatagttattagatctggcggggggcgatttgccactttcatacatactaaattattttctctttgtttttggtagttggtaatgctttgaattttattcgatctgttgttcttggagaaaaaaataaataaataaaataatatatcacccaaggtgcttttgtacccagccggtggtgggttcgctggtgggtcatcattttatttcacatgaaaaagacgaaagatatttttgttttatgaaattttccatcattttctatctaagttgtcagtagaagtaacaggtgttgtccactcttggaggtgttgtccattcatgcgatagaaaattttctcaattattggtagaggaaggtgactggacactacccaccaaataaagtaatttcaagtttagggtccactaaaatttctagcatgtgttttatatatgttgatcaattattaatccaaatgaaactttgatttattacatttttacatttattttttgaattgagcggaagttagaattggaatcattgtttttgtttattccataaaattaggatgggaaagggaattttttaagtggggttcataataaagtgaaattagaaaatgggagtttaatttccaaaggggttgggaatcagactcccatttgcagaattgacatttttattctccaaataaatttataaacccaatttcatcctcaattaaaaaagaaaaaactaaaccaaaacagtagccatgatcagaaccagcagcattatcacatgtcggtcgttgaacacagtagagctagttgttgcacatcatcgttgtacgcagatcttgtcaaatgcatgccacgaactgctacagatcgttagcctcatgccattgatcgtcacccattgtacgcaatacccatcagttgtcgttgcggctcgtagattgtccaactgactatgctcatgcattagttaaaaatgtcataatcgtcgtcatcatcatgaatattagtaatattattaatactattattagtaacaataattagtactaacaatagaaataataataataatcataattataataaataataatgacaacaattaactaagggcattgtaataatttataataatctattctaattctaagacaaagtaaacaatcaatagaaatacaattcatttcgattataattctagcaacccaaagtaaataatttattttgatttctgttcttcatttccaattttcattctaatccattccgattctaccccatttatattaccactagataaatgcactactagaacaatctcatttcttattcgttagacagcataataatgtgacaaacgacatatatatgtgctctatatcagtttcacataatttgagatgcacagattgtgatacaaaattgataatcatcatattactttttctgaataacttggagttagaaaaaattttcgttgatgatcttcaagcattcaaatttgcttcatttgttataaacctatgctaagaacgcattggctaacattaaattgatggcaggaaa

SEQ ID NO: 8917 - DNA, 1462 bp, Citrus sinensis
  Intron number 2 from transcript orange1.1g029001m (locus o range1.1g028427m.g) derived from phytozome v7.0 (chr-ID sc affold00059; pos 294916 to 296377 reverse strand)
aacttttggacaaccttaaaataaaggtttgtttaaatctcaagagttcgtgttatggtatttagaagccttattatgtatatatatatgcttgtgagtaaggatattacacataacatctattttcgctacaaagtgatgaaagattttttgttctctaagcaatttccttctagccctcagataaatactttaaaactgcattattgggtgccctttaaggcatagttagctctcacctggttttattcgatctatcgatgtaatttttttagttactgcataaagaagcaaaagcttttgctgtgatgatgcagtcaactggttgaaagtatttttggaccattatgtccatcctgagtggttacccgagcaatggtagattttgaagcattggtatgcaatggtgccccctttatgttcgttgtatgttgcttttattctgatttcctgatgactacgcttatacctctctctctccctttgttatccttcctttttttttcgggggaaaaaatggtcatcaatggtgaagctgagacattttttgtttcaattttttttttccctttggtggtttcatttttggggtttagatttttttatctctcatttaaatgcaaaatggttgctatgatgataactttattctttttgaaagtgttcttgatgaaacgtcgacaatcatgtcgatctgagcggttacctgagcaacatgttttaccagttgtttaatttgttccttcaataaaagtattaccttcctttcttttgtagttccatttttccgcttcttttttgtttctaatggcctctaatggtctctgttagttttatcctgttgagttttatttctgaaatgtctatgctggatcccttcttgaaatgcaaatcagttgctatgatgattactagaagttatagaaagtcttgttgaattcttaatgaaatgtcgacaaaaattgtcgatctgagcggttacctgagcaacgtattctgttaattttccccttatgccttcaaaaaggttactttcataaaaataatttttttttgataactgtgttgaagactttgtcgatagcatgtttctctcatgccggtggctttaacttcactaggttagatgatatttttcctctgttttaagaggtgctgatgtcgtaaagattaagaaagtaaccacacgacgccttgagtatctcaacttggatttacaatttgacaactttgttttgatgaacgtagtaagttaatttgtaaatacagaagggctggatggagcactttggtttatggttttgataggctgcattattctttctgttgtgtatctaccagtttgttgaattgcatttattttgttttaacatacttttggcttgatatattttttactgtattgaggacttcttgaatatttgcagtttgactctgaagataaatattcacttgttctata

SEQ ID NO: 8918 - DNA, 651 bp, Citrus sinensis
  Intron number 4 from transcript orange1.1g037318m (locus o range1.1g037318m.g) derived from phytozome v7.0 (chr-ID sc affold00004; pos 3791233 to 3791883)
catctcctgcggacagttactcggcacttgagaaagtaagcattttcacatacataagctctggtaaattcccagtactccagataactggtagtcattgaaagcaaactaatggactcaacatatatctacttaatgcagataatcagcgatgagcctggtgaaggatctgtgatgccacagaatgcatgcaccgcaatgaagctacctcctgtaagcccttttgacaacttcctcaaagcagctggatgttaaaagaagagaagccgctacgcatattcagtgtctacttaatgttgtaaaatcttaggcagtgctttagaagttgtaggctgtaatcgttttgattttgaacttgaaacgtgtcaaggcttgcatgccgtgacatgctcccattatcccctgtagtgtattctatgcaccagcatatgaacttttaggcctaatgccagaattagcatagccactggcacaaatgatattcctcctctctccctctctctttttaaatctttttttattaaaacattaaaaaaaagtgaaaaaaagtctcaattcaagtggatgggttggaattgaaccttaataacaacaattacgtgtgtttatttcgcagattggagaattggaatttgaagttcgaattatttg

SEQ ID NO: 8919 - DNA, 3043 bp, Citrus sinensis
  Intron number 6 from transcript orange1.1g020506m (locus o range1.1g020485m.g) derived from phytozome v7.0 (chr-ID sc affold00264; pos 21985 to 25027 reverse strand)
atctctggatcgtaattttagaccattggtaactggtattctctctctctctttctaagatttttttgtttcctgctgtagcggatttgttgtcatattgtgagctcaaattagtgaaacgcttctctactttatttttaatgggtcaagaattgtttattcattcagtgatcagctaagctaactttcctgtctactgcctgttttggatatattgaactgcttttaatcttacaatgaccttgcctctgatggatttctgtgtcctgtcaattatccgctgctgccttctgtacatgtttcttgtagtttcatgctcagcatgtgctttataggttgggacaatggactgcataataagaggcaaagattgttctaccttagtactatttcttatcttaaaatgtgtttcttttttttttttttggtggttgggggggtttaaaaaaaagaaaaagaaaaagagaacaggtacagatgcttctctctggttaagccaagtcaattactatatcctttgttacagtgaagacctataactttggccgcaggtaggggatgggtatgctgtacaccatgaaccccgtacctaattttagctgcggttttgttaaacagtcaaaatactgttgtatccatagttaatcatacaattggttgattacattgaaattgtttgtcactctgcactttctatatgattcgtgagttgcatgcaaaaaaaagttaaagataagactaagaatgactgaggaaaagaagagagaaacataggaaatttagcagctaaagaaagaggagcattggtgtcctgtcttgtgcaattatatatgtaagcatctataaaataaaatatagaaagatagccccggaataataaccaatactcatgtatttatatcttggaatttcgaaaatatctctccctttttttaacaataagcaaaccttattctattaaatggttattgattaaagtgggaattaggatactggcataaagagaagttgaaaacctaagtgtcttctaagatctcattagactaagtgccttaccttataggaagcatggtgtcatggatttttcttctattgcgctcatctgtctgtgtgtatcattctgtttctagtgtttcccaattctactcactttttagctggttttagtaaatatcaatcataaaagtagccttataagacattgattatcttcccaatattctattccaatagttttacatcacctctgatgaattcacaccactgccaagacatcacttcattcctatatatttcttcttaattcattctttgactctcaactgatgtgtaatgctctatgagctctgtttttgaactcctaataatgctcccgtcctgctaattctgtactttgatttgtgacattttggcaaatatatctctatatttgtcatggatgagagtaaaagagcgctggtatcggagctttatccttaaaatttcaaattgctttttcagatttgtgcataagagccatgtgtgttccattgaaattctttggatagaattgggtatgtctcttctttgctttataggttgtcttcacagattttctgccctgctgtctctggtttactacatcagaccaagtccaatgccagttttatgtcttatgtcttaagtccttgcactccgatttctatgtcagagggtctaatttcagagaatctagaggtcttggtaagattttgataagtatttgtagttggcttgtcatgatctgggaagtagtgtcagcatttgatgtggtgaatgatctggtagctgatagtgtaccgcacgctgatggtctgttagatttgacataagaaatggactgaatggcatcaacagctgggaagatctgaaagatacattaatttctgtctcaatgccaatacaaagctagacgacaatagaaaaaaccctatcaggtcactgtagccatattcatgcttgccttatacatggttgaggaaggataggcactgaataatttgcgaattcaatttgtgcaccaattatccttcttcttcttattttactctttaattttaaagcttccatttaggtttacgctagacctaggatatagaagatcatgaattgaaaaattacaacaacataacagtttgttaatgatcagttgctttaacaatgtggtagaaaatgagtagacatgtatgatttttacatgctaaaggtggttgcattgagttggattcaagcgttcatttattaagcaatccatgttccagttttacctgcttccgaattgaactgttaattccatcaagtgaggcaaaatgccatgtgattagtggaactgatagtagattagtagctatgctacaatcacaaagtttaatcccaagtatttgaggcaaattgacacagcattcattcatgaccattacgtaggtgattggataatgaaattactgtactgaaatggcagtctgaatgcagcaccacatcactatgatccaagactttggggtacaaacattgcaagtatttatcattattccatagattagttgtagctctcctgcttggaaaaggttacacctgaaaatctgttcttccacaaggagttagttgactattgaatcatatgagaagagctttgttttaaggccttcattatttttatcattttcttactacccatgccatctgctagttgcacttgcacaaatcaatggaaaaaacactgtaagtttgtagtgttagcaaatcctctaaatttggggagctgtcattttctgcagtccatgtttcctccattcattgggggatattttagtgttgtctgttagaagaattttccatgtagcttgttatggttagaattttgtgcctcagatccgtgaacaaatgtgtatatatttgcagtgtaaatattctgttgtaagcactatactggttttattgtccttttgtatgaatcttattggtacctctttcagcagtttttcagcaattaagcagtaatgtcttcaggacctgggaatatttt

SEQ ID NO: 8920 - DNA, 1235 bp, Citrus sinensis
  Intron number 1 from transcript orange1.1g012689m (locus o range1.1g012689m.g) derived from phytozome v7.0 (chr-ID sc affold00393; pos 135312 to 136546)
catattccaggtaagtaatcctctacattttcaattattaatgattacgtggccaaagattcttaaatttttacgagaaatcaaatcaggcaaccatcggaaaatttaaaaatgaaatcactgtaaaatggattgcttttcacgctcaaaattagtcagtgtagaagtacaaaatttcattgtgaaaatttcacagtagaccactgatattcataccaaaaatttatgtaaaatgttgacaaaaacaatattaaacccagctgaatttacgtacttgatacagtaaactcaactcagtgtatacactctttttatcaacatttttttctctttattatttttatttgttggattatatatatcattatttttaattctcttaaaaaatttattttaaagtgtagatatctatatctgagaacttttatttacattcatttttctccttctctcgtttaaaaaaaaaaattgcattccatcttaattcatgtggagtgcaagcaaaagttaatttcttttaaaaatcaccaataaaaaaccttaacaataactgcagtttccctttcatagcaacgacgtcattacagttgcatgttatcgtggacttctgtgacgtttatataaacctaaacagctatatatcattgtgcaacattaatttcatctcctccttgacaaaaagggaaaaaaaagagtcataatttgctttcgttttcttcataaaaatttcagcacgggtggtagttagtaggaactacaaaaagacaagaaaaataagtggtgtagggctggaccttaattcaagttacggcacaatttgtgggaagctctgtttaattacttttttctttttcggtgagagtatctaattttataatcaagattgaaaaattctttaataataaaccaggcgcaatatgtttcttataaaatatgtaacgagtccgttcatttttttttattaaaaatactcatattcaacatattaaatttacagaatctagatttttcaatataagaattttaccctgtataatatattaattatgtgcaatcacaaagaaaagaaaaaaattaataaaaagatattaaagtacggttgagatatctagctatagatgtggcaataaataagacatccattaaagtccttaaagaagaggattgttttttctttttaattttttattttcagcatatgaattgaatattgttttacaggtgacatcatttaa

SEQ ID NO: 8921 - DNA, 1078 bp, Citrus sinensis
  Intron number 3 from transcript orange1.1g045662m (locus o range1.1g045662m.g) derived from phytozome v7.0 (chr-ID sc affold00825; pos 40325 to 41402 reverse strand)
cataggtccctggtacctggcttgtttttatgtttctgggcatttttactgctattttttattattttttattggttatatctgctgtagtaagaagaagttacacaacttttttttttaatttccaattaagttgttgattgaaattttgtatacccgtaagtgttgtcttgtttgttcggttgatgtgcatgagcaacagctaatactctatttcaatgatgtggtaactccagaaatagaaaaagaatcaggaaaatcttattagtagatgggtttcttgtttatctatttgtctctttttatttaaattatcaagaggagttgcttaaaagcctggtttactgtttggtcagtggggaagtaaaagaaaattgtttaaaaaaataaaagaaacattcttactaaagcgagtgaactgaatatcaaagtgtgtgctttcagtttctttatttcctcctaattttgttttaaggtttggcatttgtgtttctcttatttgttaaaaacagaaattaaaaaaaaaatcccaaaaaagctcgtaaatttccataatgtttgaagttgcgcttttttcttttgctataaagtttcaattttgctgaatgaatgtgctatgataatgaattatttgtgctcatccaatcaggttggagttgacattaggtctttttacatccactttgaggtattttgatttagtgttaaatcctttttagttgaattattctttttggtactaaactggaactatgtccttgttacatggtctaaaatagtcccaaaggttcctgcaggtttttatgatttttatttgtacatcatttgttattcaattgatgaaattatatcttatgaattggagatttcattgttttggcttgattgcaaacttaatggattcttcagattgattgttatatgtttaaatgtcatttttttttttttgtgggggggggaatctttgagcatgttttcatggcctcttggataaatgaaatgtaatgagaatcattatgctcacaagtgtatggactagtaggtcatgccttgtttttcaggtattttgtcaagggag

SEQ ID NO: 8922 - DNA, 1603 bp, Citrus sinensis
  Intron number 2 from transcript orange1.1g040649m (locus o range1.1g040649m.g) derived from phytozome v7.0 (chr-ID sc affold02426; pos 10711 to 12313 reverse strand)
attacttgggtcttgagtgtccaaagcctttaaaggtttgtttctgaacgacaatagttttcgataatttcattagtcattttgatcaagttgtctttctttggttcttttgtgaagttttagactcctttactgttggactatgggaagtttaatatgaatatatgcaagctgaaaaatactagatacgtttatagtaggccagccgtcttaaagttccattttcaatagtgcttcatttcctgaatggttttattctgccaagcgggattggccggagaggtgattgtttggtaatgttctgctggcattacttaattttagtcatattttaatgtcttcgaatgagatgtcattaattcatttgctaaacatttatgcttttcttatttgtattctttgatttcgagtgtgtttggaattgaggttggacaattgtagcttaaaagctagagtagtaaagtgtttggtaaaaactatattaatatgattttttatttgtataatggagattctattatatttttaacaattttgttaaaattattatttataatttatatttactacatattattaacttttgtttcatagttacagctttttccccacagcagctgtagcttaaaaactacagcatctcaatcccaaacgcaccctctatctgctatttaatcttggttcttatttgattaatttgtgttcatttgtttgtttcttaaaatatatgcctctttgatttaaacgcttaaaattaacctaattgtaagattttaaaagggtgccaaggaggatatgacttcctatacaagtccattttattaggcgttgttagaataaaatatcaagtctaagcctcagaattggtgcctaaaatttcaatgtgagatcttttttcagtttcaacacgcaaatctctttttctcataacttacttgaagaatttggttcctaaaactttttaagttgagaaagatttatatcaagttcctctattttactgcatacttgatttaacctatgagaagtaggaagaaaaataagaaaaatgaagataaagacccattcaagttgtagctctgcaattaaaaaaaaaggagttgttttacagttaaagtgaactttttttttattgcactaatttttgtagttttaaggaatcaaatttttttaattataatgccgcaaaattaggtcaactatgtagatgccacagaaaatattatcatgccttttggcagttttgaggtttggtcacttgagtttgtttatgacaatagtacagtcttttgcctattgaagaggcaggtactaatttgtagccactaattttgattgggtcaatgcttttcactagaatatatgcaaatgatgatgatgattgttattttttttttttgttattgcttgcccttaaatagtttttgcgcagatgcatgatattaaataccaatgatcacaataaaaacaaattttgttagctcaatatctggaaacttttagaaactacaagtgtttgattggttcattagtgcttacgaaaggagctaacatttgctttatttcttatcatttttccatcattttaggaaatccttcaact

SEQ ID NO: 8923 - DNA, 673 bp, Citrus sinensis
  Intron number 2 from transcript orange1.1g045329m (locus o range1.1g045329m.g) derived from phytozome v7.0 (chr-ID sc affold00244; pos 169468 to 170140 reverse strand)
gcgaattgttgatccttccttacaatcaacaaacggtaaatcaactaattagttaattaattaacttttaatttttgtcaagttaaattatcgtcttttatgtgccttcaattatttagtttgtactagagattttgtagattttagttagttgtaatggtgcacatgcttgtgtggaagaagggtttatggggaaataaagccagagtattttgtttagtcaaatattttttttcaacagaagttgtcatttttactagtttttgatgaaggaattctgtgctttttaaatcctttttttcatctcaaacacagtgctaaatctcatttgctaattgctactcgtacattgggacacagaaaagtctgtagatgcaattatcctagaggggttgaatatgtgagacatatgatacatttcgagtgtatcttttaaatgttgacctaatacttagttttgaaagtgctgcagccaaattgtttaataaatgtccgcttttacttagcagctaatgtttgtcagtcgcacccctgcacatgcttgacaataagtgatttcatcccacattatctgtgagttaatagaaagccacaacacctcaaatcccaaacatatccttactttggttttcagttttttcaggaccaaaaattaggaagcaaattgtcttgg

SEQ ID NO: 8924 - DNA, 1573 bp, Citrus sinensis
  Intron number 8 from transcript orange1.1g018240m (locus o range1.1g018243m.g) derived from phytozome v7.0 (chr-ID sc affold00424; pos 26745 to 28317)
cagtggagaccaacattgtgagtattttgctttcataatcataacatgatactagtttgatgtgtactcatgattggaaaatcccaatagaaattgttatctaatctagcaggacaaacaaaaaacaaaaaaacaaacagaattactactcaattttgctgtagtcaaggcagttttgacttatctttcttggagcaagcaaacaacttgttatattcacttaggactttgatcgaacgcctttgtaggcacatataaaatccacccaagcaccttccaagaccttgttgcaatgacccaaaacagtacctacaactataatatgcaaaagcaagataaatcaacatcaacaataataaccaaaccataacacaaacagtttgcatggttcaccaaattacctatgtccacggatgtcgcagatttcactagtaaaaggatcagccaagttacaagcctcattttaatcttcaagtgatgaggtaacaccgctaccttgatgagaactttcccatattattgtgtacttcgaatgatgagatatccatctataactgaacatgagcaaagatttaacatccatctataactgaacgtgggcaaagatttaacaagctaaaggaatacgcaaacatatcctagggtatcggtttggtcagcacatcagatgcactcttgtgtgtgaattttctcaatataggttttatagaagcaacatcctatctctgactccatgatattggacaacaatgtgcttggttctaggttagagcagttgcactgtcacaatcacacgtaagcaacactacatcctgcttcaatcccacaccattcaccaaacccctcaactatatagactttgatgctttggtaattgctatgtattccacatccgtagtaaacaagaaaacagaaggctaaatcataggtctctaactaattgttccatcaccacatgtgaaaataaaatccactgtagatctcttcttatctaagtcactaacataatctgaatcaacaaaaccaacaacatttattgcatcagtttgtgtttcacacataattctcagcttccaaatactgttttcccggatttgccatgcacatggaaacaacacccatgaagaatattaaagttacaaacctcatcttaatctttagccattgcacaccactagatcgtaatatctcaaccttaaaaatcccaattgttttagagttgcactctttgttgctctcttttctctctacacttctgaacacactgttttgtggacacttgactaatgctttcctaaaccagagtttagaatatatatgaagatactcacatctaataacttattagagccacaaacatcaacacattttactgagtagttgtcttaaatttctccattaaatgacagaaataacaaaagaattactaaatcatttcaatacctcaatttctatgtactgttattataagctttattctgaggcttttaatgagcaccatattttgaatttgcttattcataaatatgcattgtcaggtatattttgaaattacagaggactcgaagttgta

SEQ ID NO: 8925 - DNA, 675 bp, Citrus sinensis
  Intron number 2 from transcript orange1.1g016881m (locus o range1.1g016839m.g) derived from phytozome v7.0 (chr-ID sc affold00006; pos 2427350 to 2428024 reverse strand)
tattgtactaggtgaaaatctctaactccgcacttgtggtctattcattttggattgattacaaagagtagtttgttgatacaggcctatactcaatgtttttatctttcatactttcttcatagcagacaggaatacttttgtttcgttttccataattgttcatgtgttgtctttttgctccctgctctagcattagaattctggtcctgcaactgtcatggtttgacaatcattttaggctcgtagttaactatacattcagtcaaaagatgcatctatgactgaaacaattgttgtcataaacacataatagtctcatttattgatccattgatgaacaatggacactctctggtctataaaagattaagctgagcttacattacaaaactaaaaattattgttttgcatatttcgcaagtgatccacttgtgtgtattctgtcttagtttagttgattttcttagtaggttgtgcaaatagaattgcaatactggaaactgatattgatgaatagtctgacattgaatgttacactctagttctcctagccaagaaaaagaagaatgaaagacatatctgctacataagtcaatctgaatacaaactgatcgaaagggtgtgacatatattgcagtgtggaagagcatctgctggaagtgcattccagag

SEQ ID NO: 8926 - DNA, 1125 bp, Citrus sinensis
  Intron number 1 from transcript orange1.1g045959m (locus o range1.1g045959m.g) derived from phytozome v7.0 (chr-ID sc affold00040; pos 103376 to 104500)
aaagagaatcctctcttcggcccttcttcttctacgtgagtctcattttctcgttactttttatgtgttgttgcatggattgcttgttatgtatttcccttttacctgccgtttagtgatttcggtttctctcagtggtggggttttttattcggaaggtgagggtagaaatctgactaatgcaatttgattgggatagttgttttgttccatgaaatttgtgttgtatgttattgaatgtttatttataattcccccaatctaactgtgtctaattttttgtggattttgattagttgaagtgagtttcatggcttaatttgtcgttaaaatacaaaatttgggactagacttggtaggattaggaaatttgtttcttgtttactgatgttgtggacggggcattctgttatctgagtagatccagatgagcgtataaaggtagcttaagtgtgttcgttgattcttctccatcttagtttgtgagtctattgcttatttttgtttaagaaaattgagttgggattaaggtaggttataggggaatgtaggcttgcaagtaatagccactagaggggggaagtaggtctacctgttgctggcctaaaagtctgcatccgatgcaagttgggaaatatgtactgatttgctttatgaatacctccatcgactgtgataagtttgtgccaataatcttgagaacatacctggagctttaacaaatattgaatttggggatttttttttactctttccgttacctcatgtatttgaaaatcaacaactaattgtttttggggcaaattgttggtcaattattttcgtttttctgttgtctgagacttacttagtaaactgtaggattgctttttagccattacaaataagttataatcatgctgcttctttatgctggaagtgcgtggcggaagactgtgaacctagttctttcaatttggtcattctgattctatattctgtcaattggaattgagggcttggaagtgaaaactttatttgttttgaggaaaaccctcctttagaactgtgattctggttgattttaatttatttccacttgcttgtgcagattgcagaagttgggagctctggagtgggacaggg

SEQ ID NO: 8927 - DNA, 1086 bp, Citrus sinensis
  Intron number 2 from transcript orange1.1g028564m (locus o range1.1g028564m.g) derived from phytozome v7.0 (chr-ID sc affold00025; pos 296233 to 297318)
ttccagggatcaacgttctactaaatcctgaaaaggtacataagttcttacaccttattggcaatggggcactcaggaagtgacaagttattttttgtgcttcctttaatttttccttttctcaagggagaagtagctgagttattttctggtctagttactacttcaacaaacagattgtttagatgtttttatttttatttatatatttatttttaggattttaaaaaaacagtgatggttgtttcattaatatgctttattttggggttctgttggcaagttccgagatttaaaagttatgtgttacaatattgtgtctcatggatcaggcaaatttagcattttttctttttgggccctctggagcttttttgtcataaggaaaatataattaccacacttcttatttgatctctcactaatattaaaggaatatcattttgtcccataacacaaacacaacttcatcagaacaattttcattgagaaattaattgggttcaattgttgccaatttcccagaaaaatattgaaactcttttgaccttgggagtttcctctaatattagttttgggaacctcaaactgtaccccaccaaggccctaccctacatactgactctgcatcatcgtagggatatcgtcttctggaatagaattgagaggaatcctgtcgttaatatttgcctacaaactactgaccgaatttacctggagattttgcttaatattattctgagagtttcagactgcaccttcaaggattttggcaatgatttgtagcaaaatagctaaatgctctagatgattgttaataacttgaaattgattgtgaattgaggaacagggttataggctgtccaagtgagtcagaaaacacaagttagggcattccaagtctctttaacatggctatttaagtgattcaacacaagttagggagtattttctttaacacacgtttggaaagtcttttattcttctttgcattgtactatattaagatgtttacttgttttatccaaatatattttaagaatgttgagatatttctgatttcttctttcaacagccaagaagggg

SEQ ID NO: 8928 - DNA, 586 bp, Citrus sinensis
  Intron number 1 from transcript orange1.1g022032m (locus o range1.1g022032m.g) derived from phytozome v7.0 (chr-ID sc affold00032; pos 741126 to 741711 reverse strand)
tccacgtttgcgctcctcaatcgtgggttttgtttcctttttattgtttattgccacttttttaaaccaaagttttagttttggcaaatgggttttgttaaagtttttattttggtatctgtgtattgttaaagttttgatattttagtgggtttgttcgtttctctgtctgtgttctctgtgatttttgtaatttgtatgttgtcgtttgtttctcttgatttattatttgggctcttgatttattatttgggtttgtgggtgttatttaaataatgattttttccgtctttctgtgtttagttggctattctttgaattttcttatctgaggcaatcttttgtattcagaatttctcgtgtatggccattcgagttgtctttagcagtttagctgattatttatgtatttttgttgtttttttctcgctatattttgattgacttttcttatctgggtatattgtgtttctgaattgactttgatttgtaggttatttgaattttgggagtcttttctgatttgctactttgtgaatgaactgctttagggacaaatcagtgtcaggtcattctgtgacactcc

SEQ ID NO: 8929 - DNA, 1066 bp, Citrus sinensis
  Intron number 10 from transcript orange1.1g011011m (locus orange1.1g006530m.g) derived from phytozome v7.0 (chr-ID s caffold00304; pos 94931 to 95996 reverse strand)
caaggttacttcaaggtatttctgtctctcataaaactgacaactttttagttcacaactgatgcattatcaatttgtcatagaaaaagtttacttttgcacctttttttagtacaaaacttgctaaatttttttttcctttatctagtcatttaaaccttttggaaatatacatttgaagtagatatggaaattggcccatggttgttacattactattatcgatatgaaaaccatttccccttccctcgaaactgactatttctctgcattggtctaatgcatttgtcttgtatgcattagtgaatgtggtgttcacactgcgtgtgtgtgcattccttattatttgtattttaccatatccacaatgtttagattatcatagtggcactgatttgggtagataagaaagcataatgttatggaccgcccaattttgagccaagaggttaactagacaagcatgcaagtcttgattctaggatgttttaatctagaactctctttaacttgtaaatatctaggaactctccagatagtggtacaatgagagctctctagcattttgtagatagaaatctctacagtttagtagaaataagggttctctaagtcatgggaattctctggaatagaaggttctagaatgttccaaggcttggcccttaggatttcattcaagcaattccaagcattctctagacactcaagcattgtatggcaactcacttgtacacacgcactcttgtgaacaatatactcccttatctttggcttaattgcactctagtcatatttcctctctttctcttcccacaagcaaagaagctcaaggcttactgagcaattttgagcgagagttgtctaactgcccatggtgtactgcacaaaatactcatccgtgaccataagtttgagtaaaaggatactcaaatattatcacagttttaccactaatacaaactagtgtagcatctaatgtttatcttacattgatcattatgtctaatttgacgatttatgttattgttggactagaatccgtctgctacaaagcaagccttag

SEQ ID NO: 8930 - DNA, 1882 bp, Citrus sinensis
  Intron number 6 from transcript orange1.1g000533m (locus o range1.1g000533m.g) derived from phytozome v7.0 (chr-ID sc affold00151; pos 32367 to 34248)
atattaaaggtgcaaacatattgacaaccaaagaggtaatttgaatttttttcttcttgttgtattagcaagagtaatttatacacatgcaggctgtgctcattcactatattgcatgaaatggtaacttacccaaaagtcatttaatcttataatgcgattttattccacttcacacctcaaatacttttatggtaaaaggggatgggggagggggggggggttcacacatggtcttgtggtattatttaatgtcaacaggaactttttacatgagtgtattgacagttgtgaaaatttactattgttcgggtatgggtaggggtgggcaaaatcgggttcggatcgggttcggatcaacccgatcggatttcgggttgatcgggttggagagaaactcatccgaactcaacccgaatttcagatcggatcgggttgtattcggtttgggtcggatcggatctaaaatttggatcaatttcgggtcaattcgggttaaggacaaaaaagagttattttgttaattttggggttgtttaataattatttaataattacaatatcacttttatgcaattagttcattttagtccatttccactttccacttcccaatgactgtcataaaaaaaaaatataaactgaaataaaaatgaaaaagttgtgagcttggaggacttggtgccgtgaatctcggtctcggtctcggtctcgttggaagaacaaccatggatcacttcgcgcgggtcaagcggcagccgatggatcaagcggtaatgggtttcatcgatggctcatggcttcacgggtttcgtcggtggctaccggaaaagcaaatccgatcgaagtgaagtgaagcaatcgtcgatgcagcagcaagcagatcctgtcgtcagtgcagcagatctggtcagtgtggtgtgctgcctctagcctgctgctgtgctaaccgtttgtggttatgttgttgcttgtagttgtttgagtgagttgtgaggaaaaagagaaagaagataaagaagagagtgaagagaaagaacatggagagtgttggtgtgaggctgtgaggctgtgaggctgtgagccatggtgtttgtatctgctgcgtagccatttagattttgttggttttttttttgtttaagcaacccgatcgggttttcaaagatttaatccgatcgggttttattcacgacccgatccgatccgaatccgaaaattttcggatcggatcgggtattttgcccacccctaggtatgggttgtgctttgagttatcatgaaaaattaatttgtgacttgtcattgctctgttagtagatggatggtgaggaaatgaactcaagtgcttatggactagcattgaccacaggtggctgaggggaatgattgttaggttttcttatgtttggtcttatgttatcagtttaatgcggttatttggctttattagtaacacataacagtgtctttatgagtgtgtgttcttgtggcttaatgaagaagtgattcatggtggtgagcattaaaatcattgctgatgtagctgattctgactaagctaatctgattgaacaaataattggagattttcttatttattttataaatccagtggatactctgtttaactaagtctgatcactgcagtatatttttttttaccttaagtcaatcaaacttttgttgtttttagaaattgattgtttgttagccctcacctaatacatctgtttgtttaagtgtgctctgttattccagccatgtggcttgcatgattataaaatctccagcatttcaaggttcctttctgtgaagtattaactttacctaattgatgcttttagggtcttgtgaaacttgctgattttggtgttgccac

SEQ ID NO: 8931 - DNA, 214 bp, Citrus sinensis
  Intron number 1 from transcript orange1.1g006801m (locus o range1.1g003704m.g) derived from phytozome v7.0 (chr-ID sc affold00181; pos 13939 to 14152)
attttctttcaagtccttacttcttcagcttccttgtacgttcacttcttaagaatctggttatgtttttttttttttgggtatttttagtgttgaaatctggcttgtagttgggcttgatgagtagtgtaaagattgtagatcaatgattaatgtgcttgttgctgatttatttctgtttttgtttcagattggtgagtgtagattcagctta

SEQ ID NO: 8932 - DNA, 1116 bp, Citrus sinensis
  Intron number 6 from transcript orange1.1g015374m (locus o range1.1g014406m.g) derived from phytozome v7.0 (chr-ID sc affold00006; pos 978801 to 979916)
atcagcttgtcaaaattgccaaggtaacgacaattctggatttttcaaattgatttaaaacttataggcgtaagggtcacttgttcatggctgtgaaataatatagaccttcatcatttttatcttttatattgatgttaataccttaaaaactatttataatcatgtattcgtgttgtgagtagcaaatcattttctggtgctaattttttttttcttttgtttgttttgattatgttcatttggggaaaagaggcaaatcatacaaattttggtatttttcaaccaattctgcatactgatgcaattcataattgtaactccatcatgtgaatttatttaatcttttttcttttttttacatcaactcaaaatccctatgcattcagtcttggactaattccattatcactctttacaatgcttttgatatgatctatcaaatggttaattgtcatgttttgcatctagattaattatctaattttagtacaaatttgtggtagattcaagtctggattgcttcaaatactgtaaacattttaaatatattgaagtacatgattcttgttttcaagaatgagacagatgtgagatgtgaactacaagaatgatgaccctgagcaaaaacaacagatatattaatatataacatgcattgatcacaagcaggatttctactaaagtttgattgctataaaagaacaagctcttaaagcttgacaggttctaatgatgttttggagatttactcctttaaaactcagctcttccaaggatattgcaagacattctgaattagcatgctgagatattaggcacccaagttactgcctagtactgcgggtattaattctgttattgcctatttggtttgggagccccaaatcccgatgccaacagtcgagtgagtactggcttgatgacagttatcagaatctattgctgtctcattatgttctaaattcacaaaagctgctcactcatcactttgactgtaggcatccatattgctcatgcatttcaaaggttcataattggtttgtgcgttgaagtttgactagtaaatttgatgccacaggactgctgtttgattatttggtgtaattccaggta

SEQ ID NO: 8933 - DNA, 464 bp, Citrus sinensis
  Intron number 1 from transcript orange1.1g024842m (locus o range1.1g024842m.g) derived from phytozome v7.0 (chr-ID sc affold00030; pos 402480 to 402943)
cgctaataaagtcaaagatccttctcatctctccggttcgtcctccatactctttcaaatcttattttctgaaatttcaatttcttaaagctacgttcttttggatctgtactcattagcttgaatgtgagaggattctgccgcggattgtgtataatttgagtgaattttgactgatttgttgtaattatgtaatttagaatgaagtgcacttcatttaataacaagatatgaatcataacttcttagagtttgattttctaagaatctcgagaaattagatatgtgcaattgtcttttgtaagttggagttttatttatttaagattcgtagctgttgaatgaaaatgaaagtgaaaggaaaagtgatctgaatctctggaagtgtacctattcattttatcaatgaaagcttatttagaatctgcaaggtgtgaaattgacattgataacttatcgtgcag

SEQ ID NO: 8934 - DNA, 3188 bp, Citrus sinensis
  Intron number 2 from transcript orange1.1g026821m (locus o range1.1g017146m.g) derived from phytozome v7.0 (chr-ID sc affold00190; pos 45881 to 49068 reverse strand)
ttactccgcacgtcatcactgtcaaggctggagaggtatcaattgattttcattcttgaattttataatcggtttgttttgatgccaattgttaaataaatgttgatttaaagcaatgggctgtggtagtgttagaggaagtaacaacattatatggatgttttttatttagaccaaatttttcaataaaagatgggaaattacttgcataatgcgttcagaaactacttacactagctttcttttctatgcataatgggtaatagaccacactagtggggcttttacagctcccttttcttggcatattgtataacaatttttggcattgtatctaattatttagagtcatgctactgtacttggattttgctcaaggtattgtgttctattagtacaaatacaacttaagtgttggacataaaaactcttgggaattacaaaggatgacaatcagtggaaaggatggcttttgcctatctttcccattgttgaggaaaggaaaaaaagggacatgtacatcttgaaaagagaaacatttttttagagtcaatgaagacatgaattttgatgtccacataaagaagaaatgtgattagtcatacaaagaattactgagacattttcacagggtatccaacaattgttaaaatggagtgacatatcactcaatcagttcttctagctttgctttgggcttcaatttctaaggagttccaagattcatcttttttcttcattcatctaagttgggagagtgctttgggataggtgtccaggttggtctagtattgtaaagggggattggcatattttgtatagcacaaaaaagttttcattattattttgctttctcagtggacagttggtccactccttgtaacaattctttggtattaatataatttataatttcttattttaaaaaaaaaaatacactcaaatcagtgatatagtaatgatgcctcaattacttttagatgtttcctttacataagctgttatgttgtgtataaagttaatgacatagttggttcatctttatttatcttaccttttttcttcctaaataaacagtcatttactattcattgacagcatggttgcttctatctgaactgctaagagttatctatgtcaaagataattcagtataacgctttacggtttatgaataattctcaggattgttgggagatgtaaatacttatgtttcacttgatataaataagataaatatcaggatttaaaatatcagtttgaaatcccattgatttattgctgctaaaatctgcatgatttggtctttttgtttctcttgaaaaaacaaaagtggtttctttggttcttcaagtggtatatgcaatttattttattttaggattctaatttgatggcccaccattttattggtagattctgtctttttgaaatgcatggcctgcaagaagaataatgtttaacatctccaagtccttgacctcttgcttccactcaagaggccaaacaatgaacctggtgggaattgcttcctccatgggaaataatttcatgagggtataggtttttcagttttataacttagtcattaaaatttttggtcttgcattttttgttgaaaatataatcactttggattactgtacaagatgattggactttaatatcttttttgtcagttagttcctagtttgcttcgatcaaggaaatggttaaatttggacataaatctaagtagatatggcataaacattgtttacacattttaaagaagagaacaaaaatatgacaaatagggtatatattattatgcttctgtacataagaatttatagatcttctaagatacaaattgagtaactaatctccctaattaaaggaaaaataaaatctgattcctaaaatatttgcacagttcacaaatctctcaattacctaaaataacacataaccaaatattatacataatgacaataaatcctaggaaatcttccaaaatcatccaacacatttcaactgtaataggatggaatgattaatgatttaaattagccttatgtgctgtattccattatttgcagctaatattacaattgtagatggtttatatagtgcacacagcaccaaggggttggttgagtggtaagagacccttggttttaaaagtggttggggtttaaaccccttggcgctgcctaactgagacatttatatcccatgcgtttcctgacaacccaggttgcaggttcagctatagtcccaagtttaaaactggtatccaaaaaatgttgtggcgtgcacagtttccttttttggcaagtggtcctttcaagtttccaatcgatagagattcttctgttaaataggaaattgacagtttgagtgcacataaaatgtacttctttcaactttgacgaatattcctctttggtgtaaattgcatgatgggaaaagagccgaattgtataagtgagactatatgacaatctagcatgcatattggatgcagttgccaagagtttggacaaggccttggtgttaatatgatgaaagttgtatctaacattcagtggtaatagtgtaaaattgcttttataaatgtcttacttatttactgttttggacctctggttttaagtcttgctttgtttccagacagacctcatgagtcaagtgttggtgacctagaacttaccgtattcaattcatgtgtgcacttcagcaccgatatttatataattgcatgtcatgaagaaagtgctattggtactagcctactggtggaagagaaaaatgtagactgcagtttattcaaaaaaattgggtgacgtaaaattactactttatatgttaattatcaatggagaaaattgtcaataattggtatactaggaattgcattttgatcatgcttcagctcgaatagatttttaattatcatacaattaaaattatcagataattagaattttttaggaatggagttgaaaatatcaattttttttcccatctcatagattcttatgctatagaattatatctagatttcctgtttggtgaggaaaagggtgtaaacagtttacttatctccaatagcatattgttgttcagaaaatatttgtcttctgagtagtgtgttccttttgtttgcaggacatatcatcgaaaatttttgcattttcacaaca

SEQ ID NO: 8935 - DNA, 820 bp, Citrus sinensis
  Intron number 1 from transcript orange1.1g029144m (locus o range1.1g029144m.g) derived from phytozome v7.0 (chr-ID sc affold00023; pos 507787 to 508606)
tgctcatttcttacaccagcaacactttcccgacggtgactgacctaattttacatcttctgtttggtttccgggaaaatgcgagaaaatttatctactctgagaacgaaagttttcggcttgactgatgcgtatttgaaaagtttgacttacttttgatatgcttgttagttcttagctttcaaaaagtttgttcctttatttgtttttgttttatttattcgagaatgaagatgaaagttttgatttttagtgttattagcgacagcatattttaagcataaatgcctagtgataatgggtatctgtggaatttctgtttgttgattttgtttttttttttttcttgccctttccttttgtgaaattcttgaatttttcaaatgagttaatattgtatgttgttgttcaaacatatgttgaaaaaatgttgactttttgtatcttgactattgaattgagggctagaagaaggtcttctgtttgttttggttatttcctctttgctctttgatattagatgacaaacacaccccccccctccaccaaaaaaaaaagaaaaagtgaaaagaatgtagaagtttgaaatgttatgctcgggttaaattttggtagtcattttctgttgagatgtggcaaattaaggtcttttttgttggtgtgttcattgtgcttttgattcttgattctatggatgtggttctctgctactgtcttttacttcatgcaattttggtgtttttggtatgactgcaagtaagagattgttaagttaaaaatggtttctatcttcttttgctttgtattgggaaacaggatt

SEQ ID NO: 8936 - DNA, 1261 bp, Citrus sinensis
  Intron number 1 from transcript orange1.1g015039m (locus o range1.1g011420m.g) derived from phytozome v7.0 (chr-ID sc affold00283; pos 78097 to 79357 reverse strand)
acaagtcaaagggtgagatcaattttctcttgcaaattgtgttttgctatgataccatcatccactcagatgctttgaactatatcatgtgtttgcaatgacttttttgtccatttatctgtgtgaaatatgaggatgcagacaacttcttgcttttattaattttatctttgcttcagtagttgaataaaatttgtcaccatctgaaccatccatatcatgcacttatgtgaggaaagtagttgtaaacttctttttaatccatatcccctctcttttttaggtttaatcccaacattaatattatttaaagcttatgccattttaatctgttacttcgttaatcaaagaaagctattttcttttcttcttggcatttcatcaattattgccaagatatattacttggttaattgaacaaagttattttcttttcttcttggtctttcatcaattattgccaggatcgagaaactttaaggctgagttggtagatgaagcaaaaacctgcatcttttgaacatgtcaaccagaaggctttgctctgaatttagctagttgcaacttgcatttataaaatttagatgccaagaatatggtgagagatttctagttttatctagaagtgaaaacatgtgtagtttactgatctttgcagaattgggtgaattttcattaattgtcgcataacaaacttactgcaataagtttaggagttcgcatattctcttttctttcctgccttggttttagaaatttgatttatgttttatttcttcttgtttatgaacaaatgattcatctatttcattttcgttgtgattatatttaatggaaatcgatgcttgttcctcatgatttaagagtttcattatgggcatttacattcacctttgttttatatctattgcaatagcttgtcttgcgtactaaatgtatccttgttttatattttttgtaataacttatgttgtgtaccaagtgtgcctacctaagcagacgtcttggagttcagttttcatttaatttgtcattaagttttcttcataagatgaaatgttctttgaagttattgtggttgtttaattatgcaattgtgaaattaaattagtattacaattttttgtaaatttcccattttttcttagatattcttgtagtatcttaattattttattattgtatttatttagctatttatttctttggtcattgctttccctcaggtaaaggtagaagaatcctttgttcctgcttttaa

SEQ ID NO: 8937 - DNA, 2085 bp, Citrus sinensis
  Intron number 1 from transcript orange1.1g001772m (locus o range1.1g001479m.g) derived from phytozome v7.0 (chr-ID sc affold00370; pos 30916 to 33000 reverse strand)
ttttttttgctcaaatttcttgctgtggatttgaggtatgctttgcttttttgttcaaaccaagcccattttggaatttcctttcttttttttttttaatttttgtagctggttttgcttttgcttttgtttctgaacttttctgtgcttgaatcttaggttaatgcgatgctagatggttgatttaatctgggtttttttctttattttttttcccttgactgaagtggtaaatgggttgtctggtgaattgttagctttgtagaataatgctgcattttctgggttttgtttcgggcacttttgtgagtgattatgtggaaatgggagttttttttccctgctttaaagatggtggcttggtctctggctcttgtatctctgttgggtatgttcaatgggtctctttttgtaagtatcgttgccttttgctttctttgaactggatttaagttttgattcataaaaatgtagatgtttctcggtggaaaaattgttatatctgatttttttttttaaagagcttagagatacattttgcaaagggatttaggagttactaatttagggaattaaattttaggctccaaagcgtggtctactccacaaataagctctttatgcaattacaagggcttctggtagtggagtttgctgctgggaaattcttggtgtcctaagagaatttgtaaagtgtgtgtgagagagacagtttgtaaaggagggtgttttctctgaaatgtggaacacaaggatgggagaagcttccgaatgttataacgttgcttatttggcataaatggtggtgtcgtgacaaatcatgaaagtatctgaatgtgtttttatttattcttgagtaaaagtggctgttttatgcatgactctgcatggatatctagaattgggtcagtaaaaggcttttaaaagtatgctgtcttggctttagatcttggtgagaatttggattttaaatttgtgaatgtgtataatgtatcaagtttgagattgaatcccattagcactggatgatatttgtggagagtgtttttgggtctagaatcttctatttatgtgctagggtgtatagtggtaaggatgcgagattaaatattatcggatgtggatgataagagttttagggcccagagtattctatctacagccaggacggctttgttgagatcattggaattgtgattctcctcatgctctccttttggcaagtataggtctttctaggatgtttgtagacacttagtcctgtaggcatttgtgttttagaagttttaatttttcttttggtgtagcttggagtgcttataatgtgttagatttgaccacgttaaaacatttgtttgatttgtttttttatcaatcagatgtttggatatatatttgttgtaattgatattctgcataagtagttctggaggagctcttcaatgcttattgtgagaacctgggcttatgctaagactggaaaaattttctttatggactttgatttttagtcatgctccaggtcgtagtctttgaaatggaggtctttgcttaatttcagatactacgttatattgatgtgaacaaacagggaggcttatctctactgattctatttgatataagcaaacaattgattttctggactcaataacgctgagtgctacctttattgcttttttgttgaaatctttaccctggaagaatttataaaaatgtcatagtgacttttttcttctttctgatgtacttgaaatctggaagtaggtatttttgcttcaattctcattttgtagggtggattgttactgtagacgcttcaagattacaaactaaaatagacctcttatttatttatttacttatttttatacaccgcagagaagcacatacatctggttgtgcactttataaaaagaatgaatgatgtttgtttttctataaagaatgaatgatgtctgcttcgctattctgattgctaactttgcaagtttgaatcagaaaacttgtaaggattgcaccaccaggtattgattcttgctacattcatgttgctgatcctaaggtattgatttacctggccac

SEQ ID NO: 8938 - DNA, 1849 bp, Citrus sinensis
  Intron number 7 from transcript orange1.1g009419m (locus o range1.1g009407m.g) derived from phytozome v7.0 (chr-ID sc affold00451; pos 76266 to 78114 reverse strand)
tacttttgttttgaagccatcagaaaaggatccaggtaaatatgatattcttaaatttctggtatataatatcctctttaggttaatctacctcattgtagtgctgccatctataggacaacagcttgaatgggtatgtgaagccttcgtgattagaattaagggaatcaccagtattgtcaactttttcattgaagaaccgatatcatcatatcttatactaatttgctctttaactatctagagttgtgcaagtgagacatattctgttgtttctaagaatagtgtgtaattcattattgaaaataactcgtattcattggaagcagaaaacatgcttcgtggatttatgttttttcatctaaatggctcgtgtttactaattattcacacaaaatactaatgttcattttgcctaatggaattcttcataaatcaacagtgaaacatagattattgaagcatgtgctgattttaactcgtatccttggttccatccatgagttgtcaaatatcttgccttagcttcttctttctcacagtcaacatgaaccccaattattgaagggtcacctggagagtttatattcttgtagacaccctatgacggacattccataaaaccgaatcagtactggaaacaagtcattggttgattaatccttgctgtaaagaatgagaaaaggatggtccggctggccataattaattactgtttgctttacataggccaatctatcacatgcaagcacatatgtaagattgtctaagcacaatcagtgactaaatttcattcatttagcattttataagaaatagaaattagaaacaaagaatttttcctgtacagtagttatctaaatcgaaggtcattttttctggtggttagtgttgatgatccgttctctataatcaagttaaatattgctcgacagattatcatcttggattttcacatgaaatttgtgttcaatatgatttggtgaacttcagggcggtgcaactttttaattctcaagatatttgatcaaacctcaagtttgtaaagtgagcttatttcttaattttaccgactattgatatgtattttatcacaaaaatggttctttgtcaaaaatttgctgtatgtatcatgtgatgatttcatttggaacagttgatattttatgattaatgtcttcaatgtcacatcggtttcatctccatttgttgcatgatttcttgtttttggagagcgtttttgctgtcaggagaggaagaaaagcccacagactatgaagttttgcaatctcagctcttttctgagtgatttggagtgaaagaactatagaatctttaaggaatcaagagaggacaatattgattgcttgtgggatagagttcgcccatttgcttcactttggatcttcagtttccaaggagtactctttttcctctttcttctttttttttttttttgggggggggggggggggtgtggctggggacctttttacatagatcttctcaattctgtaccagtacgaggattagtggttttctgggattcaaaacagaattttggtactgttggttggtctatagccttgcttcttctccctatagtttttcctttttgtagacaccagctccattatacacttgtaatacttttctgatactttaatatattatttgtagtttcttatctaaagtataaataataatagtaaataatgtaaaattcccgttttactgtatttgcttgtttctgttacagtttggtcgatttccaatttaccttttcttcaaatttcatatttttacttaaaaaagattttgcttggttgctcttgcaggggcttctata

SEQ ID NO: 8939 - DNA, 3017 bp, Citrus sinensis
  Intron number 6 from transcript orange1.1g020488m (locus o range1.1g020485m.g) derived from phytozome v7.0 (chr-ID sc affold00264; pos 22011 to 25027 reverse strand)
atctctggatcgtaattttagaccattggtaactggtattctctctctctctttctaagatttttttgtttcctgctgtagcggatttgttgtcatattgtgagctcaaattagtgaaacgcttctctactttatttttaatgggtcaagaattgtttattcattcagtgatcagctaagctaactttcctgtctactgcctgttttggatatattgaactgcttttaatcttacaatgaccttgcctctgatggatttctgtgtcctgtcaattatccgctgctgccttctgtacatgtttcttgtagtttcatgctcagcatgtgctttataggttgggacaatggactgcataataagaggcaaagattgttctaccttagtactatttcttatcttaaaatgtgtttcttttttttttttttggtggttgggggggtttaaaaaaaagaaaaagaaaaagagaacaggtacagatgcttctctctggttaagccaagtcaattactatatcctttgttacagtgaagacctataactttggccgcaggtaggggatgggtatgctgtacaccatgaaccccgtacctaattttagctgcggttttgttaaacagtcaaaatactgttgtatccatagttaatcatacaattggttgattacattgaaattgtttgtcactctgcactttctatatgattcgtgagttgcatgcaaaaaaaagttaaagataagactaagaatgactgaggaaaagaagagagaaacataggaaatttagcagctaaagaaagaggagcattggtgtcctgtcttgtgcaattatatatgtaagcatctataaaataaaatatagaaagatagccccggaataataaccaatactcatgtatttatatcttggaatttcgaaaatatctctccctttttttaacaataagcaaaccttattctattaaatggttattgattaaagtgggaattaggatactggcataaagagaagttgaaaacctaagtgtcttctaagatctcattagactaagtgccttaccttataggaagcatggtgtcatggatttttcttctattgcgctcatctgtctgtgtgtatcattctgtttctagtgtttcccaattctactcactttttagctggttttagtaaatatcaatcataaaagtagccttataagacattgattatcttcccaatattctattccaatagttttacatcacctctgatgaattcacaccactgccaagacatcacttcattcctatatatttcttcttaattcattctttgactctcaactgatgtgtaatgctctatgagctctgtttttgaactcctaataatgctcccgtcctgctaattctgtactttgatttgtgacattttggcaaatatatctctatatttgtcatggatgagagtaaaagagcgctggtatcggagctttatccttaaaatttcaaattgctttttcagatttgtgcataagagccatgtgtgttccattgaaattctttggatagaattgggtatgtctcttctttgctttataggttgtcttcacagattttctgccctgctgtctctggtttactacatcagaccaagtccaatgccagttttatgtcttatgtcttaagtccttgcactccgatttctatgtcagagggtctaatttcagagaatctagaggtcttggtaagattttgataagtatttgtagttggcttgtcatgatctgggaagtagtgtcagcatttgatgtggtgaatgatctggtagctgatagtgtaccgcacgctgatggtctgttagatttgacataagaaatggactgaatggcatcaacagctgggaagatctgaaagatacattaatttctgtctcaatgccaatacaaagctagacgacaatagaaaaaaccctatcaggtcactgtagccatattcatgcttgccttatacatggttgaggaaggataggcactgaataatttgcgaattcaatttgtgcaccaattatccttcttcttcttattttactctttaattttaaagcttccatttaggtttacgctagacctaggatatagaagatcatgaattgaaaaattacaacaacataacagtttgttaatgatcagttgctttaacaatgtggtagaaaatgagtagacatgtatgatttttacatgctaaaggtggttgcattgagttggattcaagcgttcatttattaagcaatccatgttccagttttacctgcttccgaattgaactgttaattccatcaagtgaggcaaaatgccatgtgattagtggaactgatagtagattagtagctatgctacaatcacaaagtttaatcccaagtatttgaggcaaattgacacagcattcattcatgaccattacgtaggtgattggataatgaaattactgtactgaaatggcagtctgaatgcagcaccacatcactatgatccaagactttggggtacaaacattgcaagtatttatcattattccatagattagttgtagctctcctgcttggaaaaggttacacctgaaaatctgttcttccacaaggagttagttgactattgaatcatatgagaagagctttgttttaaggccttcattatttttatcattttcttactacccatgccatctgctagttgcacttgcacaaatcaatggaaaaaacactgtaagtttgtagtgttagcaaatcctctaaatttggggagctgtcattttctgcagtccatgtttcctccattcattgggggatattttagtgttgtctgttagaagaattttccatgtagcttgttatggttagaattttgtgcctcagatccgtgaacaaatgtgtatatatttgcagtgtaaatattctgttgtaagcactatactggttttattgtccttttgtatgaatcttattggtacctctttcagcagtttttcagcaattaagcagta

SEQ ID NO: 8940 - DNA, 1993 bp, Citrus sinensis
  Intron number 2 from transcript orange1.1g047180m (locus o range1.1g047180m.g) derived from phytozome v7.0 (chr-ID sc affold00041; pos 416244 to 418236 reverse strand)
gaagcagagcggagaattgctggaaccgccaacatgtgagctattttttgtactttatatttttttgttgtcaaaaataaaaatagtatattactattttgcaagactttttatcaaccgataaatatttattctgttctttttcgctttacatgtagcaataagatttgtgtgtatgattttttttctttttttcccctacttttctgcttggttcaatttaaagtaccacctttataactccactaacctattcgattcctttctgttgtcttctgttattgtgtgctttgaaacatcatggcctgttggtgatataagattccctttttggggtcaaatttagttaggatttgtggcagtgtggttatggcttccaagatagcttttgaatcttttataacgtctaggtgaattaaataaaagtgcttttggccaagttcaaaaacataattttttccatttagcttcctcaagtagaacttctactagtagagcttttgaccgaaaaattattgcttgcttggttgtcaatagtagcttttggcaaaaactctatagttagataattttttcatgattggaataaaataaaataagtgtattttaagctatttaccaaactcacacaaggctcaaaagggaaaaaaaaaagcatactcacacaagaaggaaaaaaaaaagcatacacatactgtcacacaagaaggggggggggggggaggagttgctaatgtcttctcccatagaccttaaacttcagcttctttcagtagatgtaaaattttcttaactagctcttctctagttacaacaaaatgacactgtacaaatttgaagagctttttatataaaaaattctatcaggcattcatttgttttggagtaacatttagtagatgcttttctaaagcccttttttgttttaaaagcaattgtgaaggagcacttcgtgcatttctggaaagaatttctttttgatacttttgtaaaatattaaaaagcaaacccaaacacacgttgagttgcatgaaatttagaaggtttgtcactactgtcggctcttattaggaaaaagaaaatatgtgagttttttgcagtaaatgtttattttttgctttattttagtagaataagggaggtaggttaaataaacctatacttatttgacttacaactgagttcaattatgggcttttatgtctgatataccttgatgaagctggtagtcttatgtttttatactctgcatttcacattgctgcttttctttcgacagaaatggatatggttttgaaatccaactccatgaaacaaatagtccatacgataaaccaagattcagaacaatttaaatatgccgtctttaaaaaatgatttttttcaactcgtctggactgttgcacattactgtgaaaggatcgtattgactgtaatatcttatgatgtgcagtttccattttttcggtttcttaatatcttttgtcttgcattttcttgcttctactttgttaaggaatttgttctttactccatgtgaatgtctcagcttctccaaaatacagttgccaagttccaggaatgtaaaatatatccctaccatatgcccctagaagctgtgatatgtcaaagggcaatgagttcatttttggaaatttaattctaggagattaagaacaccttcaacgagggaaatacatttgtacacatttctcttctttttgggcaaactacactaagtgcaaattaccactgccctaatctctcctagcttccttataagtgtgagtttgtgtgagcatagaacttctgttacttctattcattacccctcccttcctttttctgccttttcctgcccttcttgaaggacggttgagctggttgtataagtaattggatagggttgctttgaaatttttatcctcctcttattaatattataatttcggtttccaaattatgaatattttggttcagggagtatcttcct

SEQ ID NO: 8941 - DNA, 1877 bp, Citrus sinensis
  Intron number 1 from transcript orange1.1g012480m (locus o range1.1g009468m.g) derived from phytozome v7.0 (chr-ID sc affold00057; pos 296491 to 298367 reverse strand)
acatcaaggcttttgctttcaagaccaaagctgtaaatggcacatctttttctggagttcctttttgttacttgtgttctcttttgacattacgcagttctgcttttttgggtaccattattagtcaaatgactgacgtcaatttcagctggcgaagcctctggtccaaatctgttaggctaaatcaatcccatcattttaacttgcataaaatagagttaagtctacagggctaagccatcgtccttaataaattattaatttctaatgcaaaaaatgataatgaagtcaatcagcttgcagtgttaaataaatgtactttgttactattattatagggccttcttaagttacattaagatgtaacttacattaatcattaagttgtaattaatgatctaaaactaaaactaactaaactattttttaggtcactaaatacatcttttgagttaatataagttacattatataacttaacaatacccatacatacaataacatgattttgaaggtctgaacctacttataaaataaaaaaaaatgtactttggtcttatcattgacttgataaaaaaaatctgcacaaacaaattgttaggctgattattgattagcccctttaaacaaaatgtttcacatcgtcttgaaaatgtaacaaaataataatgtaacaaaatgatattataacaaatatgttagttatatacaagcacattagcaatctataatgtttttattacttaccttttctacaaacaatcatttcatacatgaagttgctttaagacgtcaaaaaacaaatgttaaagatgatattcaaaaggtattctttgacactagcggcataaatttttaattttaatagttgggtaagagggaaagaaaagtttgatcctagatttacagattttcttcgctttctaatgacaaaagattggttaagaaagacgaaaaattggtagttatttggtaaaaccagttcaggtcaaaccgaccatccaaattttaacccaattgagtcagatggctggggtgcgcggtttgatcgaatttgatcctaaatagattgattaatatgattttttttttgggtgatagaaccacgctaatatatggcctattaattgattttaaagacgggtctaagcagagtttggtaaccatgtgattcatttaaatgctagtatatgataattgcttcctatttttactacttccacctaaatttttcagatctatattctgtcaatgtctattttacctgaacatcaagttcagtttctagcttgctctctttgagctgccgtcttaattacagagttgtacttgatttcagttggttttctaatttatgataagttttgcacccccttcaacacttatcttgtatgcttatcgttgaaaaagatgtgataaacatatttacagcaatccaaccagccaggtccatttaccaaagataataactttaacaagttatttatcagtttccctaatgaattaatgctgacaggataacaaatgaaagttcgacaacatagattgttaaatgtttattctgcttggacattctttgacatttgctcttgaattatcactggaaaatttgtgtgaatggtagggcttctttaggctcaatctctttgcttgttcagaagttaatgcattctggtttgatggcaattatcttgctgctgaggtatcaaccttgcatgacctgttggatgatttgaattttgttatgaatcgatgtcattgattgacaagctcattgtgaatgatttgcacctacaactagtttatgaggataatagcattatgtgtgaaacctctcacaagttagagcatttttccccattaaacagcttttgaag

SEQ ID NO: 8942 - DNA, 702 bp, Citrus sinensis
  Intron number 3 from transcript orange1.1g031372m (locus o range1.1g029391m.g) derived from phytozome v7.0 (chr-ID sc affold00106; pos 415974 to 416675)
ggaactggtataacaatctctattgctaaccgaattttattttagtttttagttttttcttaatttacgaattttctgaattgctggatgggaagcaataaactcaaatagtcttctgtaaatacttgtaaaaatttaggttacaattcgaagtttcttggatacaacctcacaggaaatagcaaaagcaattgttagattttaaactagattttaagatttttttccaaaaagtgtttccggaaacacccaaaaaaatgtttttagattttggtatgctttgttttcagaaacaaagagttttatccaaattgctaattaatttggccccgatggtttgatcaaaatttgggtgtcctcctaactcataagctgtggacttttacaaaggctaaggtgatagttctcagaatagtatacatgttaagagtaaaatttctaaattgttgttgtgtttactcttcatagtgctatcaagtggtcggcaattcagttactaaattgaattttgtggaaaacattgatttagttttagtagtagtttaatgagaattgatgctaggaggtccacatgatcttgatgatacctcggatttgaggaactatatgcattgcgatttcaatgatttgcattctgttattgctgaatgatattgtcatttctgagcaagtgttttctgtgctcttttaagtagcgttatc

SEQ ID NO: 8943 - DNA, 1567 bp, Citrus sinensis
  Intron number 5 from transcript orange1.1g036083m (locus o range1.1g036083m.g) derived from phytozome v7.0 (chr-ID sc affold00497; pos 106375 to 107941 reverse strand)
tcctacaaaggggtaacacatttttctctgagatttgggatatctgaaaaggagtataattggatattaatgcacattccttttatgtgtagtttgtttccaatttgtattgaattatgtttcagaagaagggtgtttgttaagtgtcttttaaccctattctatattattttatttgcaggtcattggatatactttacctttatttggactgtgaaactatgcgtgattaactgtacattattacttactgctcaatttcaattagacttgtatgaatattgagaatttaaggatgggatgaagggcttctttatgtgaaaattcctttgaagtagatgtgtgtgcgtttataaatggccttttgatgtataagttggtggttcctcttttcttcttcccgaagtactcttgaggatttatgtagtaccatccaaatttttactttgttggtaatggggcaatgataaagttttgggaagtcataggcatttgtgtatatcctatctttaatttgtttccatggatttaagttactggtgaaccatgacatgactgttaatactatggaaggttgatgaacatatttttggctcatggctttaagactattagcatgaataattcggcttcgaagtccagactcttaatcatagacaaacttgtactgatctcacctcctcatcatagtgtaaattgaatcttaaattgcataggaatcttatttggaaaggaatcttatctaaggagtatatgatgtttatgaaatctttaaagggttttttctatgtgataattgaacttctttttgatcagtttgataagagcaaaagtttattgtaagaataagatcatagaaagatgaactttgatgaaaccttaaatgttataattgtgctccttacctaaaagtttaactgtttaggcttgtaggtcaagtggtttaagtgattgcttaaagaagattactgggataaattgtgtctttcagtgatgcataatgtgcaagagagatgtttagagtttagagcattggtcaaggaccttatcttgcagtgcctcattagcacacatctttgactcaacaactttagggcttttaatctcagtttgatgtggccgtacttcttattgtatctttatcaaaagagttcttgactttagtagaagaagagaaccactatcttgtggggctcatgtgcaagaaaaatcattgataccttttttttttaaatttaattttatttggagggaaatcgaggatacctggaaacgttttgaggagattctttggttttctagtaatcatgtttttcccacccgccgctgccccctttcccccatttttcctttccctttggaatgtgttcttgattggtggttctattttttgttattatctaccaagggtaaagtcaatccttttgagtcttttctatattgaataattagactacatgataccgttctttttctccttgtcattacactgaatcacttccttttatgtcattcacctccctcaatttcaggattacaaaaattatatattcccacttgcagtagc

SEQ ID NO: 8944 - DNA, 1825 bp, Citrus sinensis
  Intron number 5 from transcript orange1.1g042501m (locus o range1.1g042501m.g) derived from phytozome v7.0 (chr-ID sc affold00056; pos 212565 to 214389)
atctctaaatcttgtatttgaggaggcatcaacaggtaatttctctaactagttaataaacaggcagctgctacaaaaatgtgtgtttcgaatgggctaccaatgcaggaactaaattgtaggataccaattttggccgttggattcaatccaacagccaaattgtatttggccttataaaagtcagaaagtgggtccatatgtcaggaaataagtccaaatggaatttggcaattggattgaatccaacgtccaaaatttataaatttatacattatataaattttgtcagtcatttctttctaattcctcttatcattttttcaaagacactttggggcaatagattgtacaaaggaaaatagttctcccatatcctataaacctctcgtcttattgtgagtaggatttgatataaaaacattcgtctgatgacaaatgacttactagctgaggtagtaattttatttcaaaaatgcaaaatggtatattagtgattttgtaaagaacttggtgttgtcaagttacctcatgatccacaagcttaggctcataggtaaggattcaacaatagtttttaagctttattaggccctttctcatgcaaggctatgaaacaagtccataaaaaagcaaagacacatgtaattactgatgcaaatattaaataaaatgcaatcacttggaatgatagacatattggtcaaactgcggtcaatattacgttaacacttgactcaaaatcttaagttagtagatagaggcttgacaatagttaaagctctaacaaatttgacaatttggaaggaataccttagctttaatggtttaatcgttcctagatattacttgaaaactttatcgaacttgtcaatatgagattcggagtcccatccacaacacctctattcataccgtcctcaagactatggttcacgacctcactgctgaagacatgatgatgaagacttgtggcctaatattgtcagttctaactgtcctactatcttaacaaacaatgccataccttaaaaggactccaattactatcattgattactggtgctgcaagtggcacttggacctttgttaaacgttgtcagaattctatgacgtcttgtccaccatgcttccatacctaaattgaggctcttccaagtttatattgggaagaatatttactcgaattaagtgatggctgcacgttgtgtcaagttgaaggaggaagtttttaactgttgctacaattgattcatttttctcaacgatttggcggaattttggttacattctatctctctctggggattggaggaagaagagttgaaagaatcaggctggacttttgagttgttaaataattcctggttgctacagataactattaacaaatgcaattaattctgaacttttcaactcttgaaagttgttgcaatagatggcgaatgtataaaattaattgttctttggaagttccaacctccttcttttctctgtttttagaatggatagccttaggcaaggcggacaaatataaagcagtaaagtactggactttccttcctggaatataaatagagtcctctgatggccagtgcacaagatccaattttttcgcattgaattggtttaatttctcgtttcagtttattttcagtcctttcgtcgattccatagatcacattgttttagcacgcttttttataattattctttatttcttcgcctaaatgattgtgcaatggtccacgaactaggttgttcaactaaatttacttttgtattatcaggttctgctgctgaaggagaagaaagtgctaaattc

SEQ ID NO: 8945 - DNA, 3854 bp, Citrus sinensis
  Intron number 5 from transcript orange1.1g021930m (locus o range1.1g021930m.g) derived from phytozome v7.0 (chr-ID sc affold00008; pos 1222232 to 1226085)
aaggagcctattccaattaaccgttttcgaccaaagtacaaatcagaatcatacaatatctgtttattatctaaaagtatcctttgtttatatgtatatagcatctgcttttcattgtacattgttggagttatgttttagtcttctggaggaaccccccccccccccgaaactgtatattggtctcactatgttgataattttttatggcatagttttctcgcccctctttaattacccacattatttttctcattttgtatggtgtatgaatcccttttttatactggaatttggcagcatccttgttgatggttgtgaaccgttttctgaggacttatggacgggcatccgaataaacaattgcacatttcaaggtgttaagctgtgtgaccgctgtaaggtaaaagttatctttcttcatttctgcatcttttgtgaaaacgtttcattcaactaaatatcatttctgtggtcacttgtctaggtgagaactgtggtccattcactgagagattttccaagcgatacctccatttgtattcatgtttttaacaatacagagattgttttccaggtgccaactatcaatcaagacactggtgttgctggtcccgaaccaagtgaaacactaaggcaaattaggtcagataaagttttgcgtccaaatcaaaaacagcagggaaaggtgagctattttcgaatccaaaacttccgagtataatctgtcacctgataaaagcacaacaaaagaaaagcattatcttgtatcttgcagatatactttgggcagaacttggtgtggaaggacaaccttagtaatggaaaggtgcttaaacttggggatccggtttttgtcatgaggaaggtcaattctgcagctgaggcagcagcttgagctctattgaatatttgttagtaatgctaatgctgttgttggggccaataaattaaactctgttgtgtgtgtatcattgtctagtggaataagaaactggtttgttgcttgctatgccacagcaaggtgccatttccagagacatcgatattgtttataaatttttttttttctttatataatccgccgcctggctcccccacctaccaaatcctccaactctcatatgtggcaagaacagtcctatgcttatccgcttgtgcgcacacctctttagatataaataaaacaaagtaaaaagatgggccaatcttaggtcaggtgctctgactactgaaatttatctgactcgtgggtgcaaaattttgaacagacttctccatagaataatgacaatatacgaaaagaaaaatgatggatgctgatcgaataaaaacatctgtatatatgataaattaattaaggtaaataatttgtttttgtatcctttgtcttcgtaaatcgtaattgccctcgatttgataacacgtattatacatattagtcatgcaaaaactattgaaagcatgagcagtagctgaacctgaactgagtcgacaagcaaagaaaaaactgcgagtgagaaaatggaggctgcaggcaaagtcacttcaatctttgtatacccaattaaatcatgtcggggcatttctgtttctcaggcaccgctcactcctactggtatattaaatccaagaactgtaactgtttcattctgatattattgttgtattttcgtttcttaattttttttttaatgcaattttgttgttttgacccagagaatctttttctcactgtctattgatttttgcattaaaatataattataatgaatactagtgctctgagatgatttaacttggtttaaattttatcaagtttgaccagtttcttcaatgcaatatttgtatgagtcttaattagccttctgtcgttgataagctagagcaattttgcaattaggtttggaaattaattgaaaatctaaacctgaatacggttgttaaaatagattacttgtaataattttgcaactctgagatgatttgatttctttgacatctccatatgttgaaagacttttcatatcactacagcagcaacacgctgttctttgtggatgttgataagacttgcataaattttgatgtctgagctcccaaacaattagattaagttgaggctagaggtttgacatgcaagcttaatttgtttctatttatacatgtttgtttgctatatacaggatttcgatgggatagacagtggatggtaataaataacaaagggagagcatacactcagagaaacgagccaaagcttgctctggtccagatcgagctgccaaatgaggcatttttagagggatgggaacctaccggaagttcatatatgggtaatccttgctttctgttttgctacggaacttgttgaaattacagttgttatataatctcataaaatattttaaacacatattataccaagttatagcataaaagaatttagttgctcaagcctagatgttaaaggaatacaattttattccctttgatctgtcagataattgaaatgcttcatgttaatctaattctgaagttttttttctcatagtccctgaaatgatgctagattttcatttatttttctctgaggcttagtattttagtcaagaaaatcgtaagatgtgtttagcctttgtacccatcacttgattggtctcttatttttgccatgctactaagttagtattaatggatatggtaacagcccatacagcttgatcttcatggtttgaatctatttataataaaatattatttatctctgactgaatactttttctctcatatttcttattgtggagctagtattagtttatatgcttcttttttcttctcagatagtttatgaaggatgtttttgcctgttcttttatctgatattcaagcataacttgactttttcccttacagtgataagagctccagggatgcaggctcttaagattccaatgagcaaaccatgtgatatagcagatggtgtttccgtatgggagtggtctggctctgctttggatgagggagctgaagcctcaaattggtttacgaattaccttgggaaatctagtcggctagtccgttataatgcaggttgggtctgatttggtacttccttaagaataggacattgattgcactaaccagtaacaagagttaaaaggggaatgctttaggtaggaaatgctgtagcaaaattatttgtatcacaggggccacatgggcatgacccattttttgtctgaatgaatttaggttgtgttatatattcacaatctaagttaggtggttgataatctggctgcgttatttgctggtgcagaatcagaaactagacctgtggatcctgaatatgctgctggacagataacaatgttttctgatgggtatccatttatgttgttgtctcaggtaattcgccattatgaacctgtaatgtgcatcatttttcctatgacatgaaatctcaaactgtaagcttataaaaatatcttttgcagggatctttggacgcactaaataagcttctcaaggagcctgttccaattaaccgttttcggcccaagtataattcaaaaatcagaatcatgcaatatctgtctattatcggacagcatacaaatttcttttataaaatagcatcttctttacattgttcattgttggaattatgttttggtcttgtggaggaacccatactaattattgcctcatatcctgacagtttctgtcttgatattttttacggcattagttcttttcttccccctctcctttgttaaccacattattttcctcatgcgtttggtgtatggatttcttatttatattgggatttggcagcatccttgttg

SEQ ID NO: 8946 - DNA, 734 bp, Citrus sinensis
  Intron number 3 from transcript orange1.1g029191m (locus o range1.1g029191m.g) derived from phytozome v7.0 (chr-ID sc affold00259; pos 191461 to 192194 reverse strand)
ttccacacaagcttgttgctcgtgcaggagtcgtaagtctcatgatttgatatggtttatactctgttatttgtggttctgtctaattttattgtcatttgagaagcaatgcaacagttgttcatattaggttgatacctaagcagttattctaataataaatatgaccaaatagcttgatactaaatcttaaaccaaatgcttgagtcttcttaatttcctctggctatagaggctttttcttgaagcttcgcattgcaaacaatctcctcttgcactgttcattaagaaaagtatgtcaactatgaatttcattggtacacgcagacaaaatgtgggacaggcttgaacagttcatgttagtcatgattagaacttaattgtcatcaaacaatggtggaagagttttcttgttatagtaacaactaacttttgtagttgtcaatgctggttgggtagatctgttagctcccctttttaccacttctatattaactaatctaataaaatatgcaatatatactaaacctttcaacatttatgatctaaatctgtaacatcattcatattcaataatgtcttagatactttcacatccattgttgtgctttcattggtgcatttacactgacgtttgagttcaagctatatatatatatctgcagaatggtgattgacacaatttttcctttttttgtgtctgcttgtgatggactccgaaatccatgcagaaa

SEQ ID NO: 8947 - DNA, 1470 bp, Citrus sinensis
  Intron number 11 from transcript orange1.1g004012m (locus orange1.1g004012m.g) derived from phytozome v7.0 (chr-ID s caffold00354; pos 37230 to 38699 reverse strand)
actcggacatagcctggattgaattggttagaaccctgtacacatatgttttacattcatgtaacgattcatcatacactgtatatcattctgggacaaacaatggaaatagcatctactcaaaactttattttattttatttttgatttatgctcttggggacgggggatggcatagaacttaaccgcatgaatgttattgtatgtaggaagaagttaacaaattgcacatgggatattgtaaaggctaatactgacttttcttgccttagccttcacttctctcttcaaacaccaatattcatgtataagaaactgcacatgctcaatctcctctgagattctaattatcaatatgattgggagaaaaatgtaagaaggaaatttaatgtttttgaaagtctatttcaatcaaattctttggagttctaaatgagtatgtagaccactgaccaagacataatggattcagcgcaaccaacctgatgaagctttgtataaatgataagagctatagcagcgtaatatgaaaattagaattaatatctttgtagttgatgagcttggagactgcattgcccataagattaatttatagacggtgtcagatattgtttctagcatttctgctatcatggtttagtcaacttaaatggagaatttactaggttaatttaatttcacaagatagacgtaagattagctatcttagtcggttatcaagtcataggttgtcatactgagaatattgcaagttagaaagacgatcagctgtgtttgttggtggcaatattttccagaagaaataatgaataatagtagtgaggagagtgtgctaaatattagtaatattttggaaatattttttaatgttcatttagtttacagattattaattatatactgaattaggtgtttcttgtgtggtactgaattatagaataaaactattcttgtggtactgggttatttggctctacttctgccttctatatctgttagtgtttttgttattcctttgtggttgtaatggtcctgaatcattctatgggcttggtccacatgacaagcttgttagatatcagtctttgcaagtgaggtgggctgctagatcttgaatgcttaatacgattttctctttacctaagagcttaggcttttaggcaaagtagttacttaacatggaagaccattgtaattttctaattcaagcttttgttaggaaatgaagctgtctatgagagatagatttccagaatttacatataatgatttgctagggctttgtgaaatattgtataagctcaatagcatactgggtttaaaatttgccatacttttgcttgtcccacttacagattttgagtccacctcttcaaataattcctgtcaaacactattaatgtgctacttggagttcttggcatataatttgccctttttcttgttggatgtaggattctgagttgg

SEQ ID NO: 8948 - DNA, 663 bp, Citrus sinensis
  Intron number 5 from transcript orange1.1g042851m (locus o range1.1g042851m.g) derived from phytozome v7.0 (chr-ID sc affold00001; pos 5058360 to 5059022 reverse strand)
cactgtggaaacagcaatttgtggattcaattgcggtaccataattttagctgtattttagatttcttcaaaatcatattttgagttcaagagtcactcctcaattctcaagagtcactcctcaattctcaagaatcactcctcaattctcattctttctctcaacgcaataccattaagaatggatcaaatatttttccttcaaaacaaaaaaatgaaatcttctcaattgactccgtactggaagcatcctaaaattgtagtttgttcaaaactatttccagttgtatttcagaaaacatcaaccattgcagtccctggaatgcaactttgactgtttaaaatgcaagagaaatatattctggttggggattttcgaaagtttagactcacgaggcggacatttgagttcacctcttcatgcttgttcatattgttaaattgaatttattgttgatatgaaaattttattagaataggattgttgggactcctttggtatgatttattaatgtctacattctgtagttgcacactagtaagttttagtggtttttcagtattaaatggttcctctttttcatttttttccaagcatagtaatagatcctcacaaattatttctaatttcttaaacagttggaaagcccagaatctaggaaa

SEQ ID NO: 8949 - DNA, 803 bp, Citrus sinensis
  Intron number 5 from transcript orange1.1g024745m (locus o range1.1g024745m.g) derived from phytozome v7.0 (chr-ID sc affold00181; pos 33780 to 34582)
gctgggtatgttttcttcaagtccatattctggaaggctcaatatataaatttcaaatctgtacgcacctttcaaatgttcttttttaaatttcttgtagtagattttcttgttacaagctctttagcattgtacttgcccaacctgatttgtctgaatgttgatcatttctgtgtcaaggcatatatttttatcttctactttaaaccatattaccggctatgtaaattacacaggcatggttggtcggtctgtcaattaaacatgactagctccatattcaggtttttctattgattcccaaatgaatcaccaagagatagatatgtgcataaaattttgacaactgtagactagaatgagtattcctgttacaattgatttttccagaacaatatatattttccttgtaaagaagaagatgcggcataactaactctagaataacttagaaatatatgcagtttgtaattcatcatgctgtatcagagattaacttgagaagaatgtaaacatctttaaatctgttaaagacttgtcctgatagcataaagagaacttcacctgggcctcttttatgtgcttatgcaaagtataatgtgcctcttatgagatcttctgttaataagatagatgttgtagcttcaatggttagtagaaagttcattttgattggattgtctaaataattcttttttatttttattttttgtctgtgcagagaaatctttcgctggaaattagtctatatgatctttactgaaatgttcttaaattacgtgacattgtgtaggtttggctgc

SEQ ID NO: 8950 - DNA, 481 bp, Citrus sinensis
  Intron number 5 from transcript orange1.1g010300m (locus o range1.1g010300m.g) derived from phytozome v7.0 (chr-ID sc affold00016; pos 279179 to 279659)
aggagtcacttgaggtcattcttaaaggtttgtagattaattctgctaagttcatgttgccataatgtttttttaatgcagataagcatgaaatatatagtttttatgctaataagatgactatatatcgtaggagtgaatgcatagcatgtttaattctctatttctcttcattttaacatcttttctttttgtgaaaggttcattttaacatcttagtctgcaattacagagaaaaattaagtggacatatttagatatgacattgaaaacttataatttgtaaatctgtaaacagtgcccattgacatggatgattcctgactcttacatggggtgttgtgctcatgaaaatttagatgtgattttgtagtttactataatgcatgtgctataatgcatgtgctctttcttctctttctataaattcttgaaataattattgttgaatttgataggttcccacaatattggaattgca

SEQ ID NO: 8951 - DNA, 1509 bp, Citrus sinensis
  Intron number 2 from transcript orange1.1g044298m (locus o range1.1g044298m.g) derived from phytozome v7.0 (chr-ID sc affold00585; pos 58875 to 60383 reverse strand)
ttgttggagcttcatgtaaactgataactctatgaaatgagagttattatgacatttttagactttaatcaatattacattgagagtaaataacatgtttttattacattttagttatattttgcatattcattcattttagtttattcttcataaattttgtttgatttagaataaattatgtgcttaaatcatatgcataattataggtgtttggaagctcaaattccaaggaatgaatgctaatgcaataggcttgcaaaagatgggaaagaatttggctacaaaagaataaaacaaaatctggaacattgtagatgttgtagccactgctgtagcaagcattgctgtagcaatcttggaacaatgacagaaaatattttgcagaatcttgtgatttgtagtttcctaatctagaagatgtgagacttaggctttcgtttaccttaattttcaaatataaaaggagcacacattatattaaaggggggccgtcaatcacgaacataagaaaacaagaaagaagacaaagaagaagattaaagagaaggacgcaagtctgcactaataacaaactctacagaatatttggaattcaacttttctcattcaactcttgttctttttctttattctttggttggaaatatgtacttgatggctggaactttgtatttagattttcttttacaagttatgaactaaatttgattgtagttgagtgacaaacaatttagatgggttatttactgttcttatgagttgctgcatgtttgttgtagaactttgctttaataaatcttattacattcattatttcggttgacttcctatttaatgatactagttaagagagagccacaaaagggtatgtcttagtagaaattattagagcaatacttgatctaaagtgagtttcctggattgcgtttaatttgaatctcaaaagggccacacttgatttaagatttatgatgaattatacatatggattcaccttgtatggtagaaagagtatatgtttgtaatgacgtatcatatgtgacataacaactggtcatcgttaggttacataaaggtatgaaatatccaacatgcgatgactgaggatgcaaagtcattctgcccagtgttgtagcaatcagtgttagcttgaacaaaacagtcaccccatcaagaaagtttgatcattcaattaccctattcctattgaaatctttttgtgcaaaccgtgtaatttaatttcattactgcatttatgttgttaagttgttaatcttattagtcaatcaactttatttattttataaagttaagatagaagaaagtttgcaccatcgtaattattgtagcatttctagtaacatcagttcatgtgaagacgatcttaaatattcattactttattacttgttgtgtacacttgcacattgacatcaataacatttgaatttttaccaacataaacgcagagatattcttcgagagaagcaattgctttcagttgtt

SEQ ID NO: 8952 - DNA, 1163 bp, Citrus sinensis
  Intron number 5 from transcript orange1.1g010636m (locus o range1.1g008645m.g) derived from phytozome v7.0 (chr-ID sc affold00060; pos 277995 to 279157)
tttctggtgaaacatctggccttccagtttctgaggtattctttatctttttacatctctattttgttccttttcttctacttctctttgccgagtatcactgttaaccatatagttttttaaacttttgtaacgtgtaattgcatcttgcttttatttgagtaattaacttctactttcacaccttttcttcttggttgccattcctaactgcattatacatttcaaatttaagctactccaatctctagtttaaggactaaggtgcaccaacataagagtcagtgtattgttgttgcatggtaatataacttgcatggctggccatgtggtgcagtggaattttctaaatggctcttgttgaccgagtggctgcaatatctttgtcctctaaatcacagtttgcatgatctggtgcgatgctagaacctcaaaaaagctactttctcatctgtatgtttagatgaccctccgttctgtgaaatatcaaacttgtattggaatttgaattaacctaggtaatttacttgtatgtaatatacaataaacctcggtaaattcatactcaataatttgataacctcgattaaattatagtgtttgctggtcctgacttgaggccaacattataagttaacaattcaataaatttaggagataataaattttttgaaagtttctatttactataggacccactttctatataaattaataattgctaaactaaatccatatgatatgtccatgtggctattgtaaaatatgttctcgatgttgtttgcttcttaaaattgatttcgacttaaatcttacctctaacttcttttgtaatgcgtaattccagttggtattgtcattttgcaacaagaaattatgcaaggtaaatcaatactataaacatgatcatattttctaaaataaggaatatcttcataaattaataattgattaattaatatttgtttaacaaatagattttctatggtcccgagactattaatttattaagattttacttttgattttgactttttttggcattcattatttttccagagctgctggatgtgtattattgttgccttgtagtattggatttggtagtttgttaacatgtgtgtaatattaattttgcaagctatcagggaacagctcgattg

SEQ ID NO: 8953 - DNA, 1801 bp, Citrus sinensis
  Intron number 11 from transcript orange1.1g007668m (locus orange1.1g007668m.g) derived from phytozome v7.0 (chr-ID s caffold00290; pos 13417 to 15217 reverse strand)
aagctcttcgtgagatactattttcttgagtttctcttcttgcatcacttgtttccatattggaacaaatgaatctagctcacactaattttggcataggcatttagtagaggaatatttatcatgtttgaggtccaatgtttgtatgtgtgtttggtagccttctcccaaccgcctatgatcaatgaactaataaaatgcatggtgatatatttagtcttgattcactaatgtcattttagtgtctttccaccacaacaaataaaccatagactcatcattgatacctcggagtagagcatcaccaaaagccttttcaaatgagatttcactacttatttgaagagtcacatcaccataaagagttccaaaagactcttccaatgagattcttaaaataagattgtccttctctgaagagagagaagcactatctcatttgaagaatctcatttggagaatctcttggagcatttaatttagtattatattatttatctcattattcttgaagagagagaagtgttataattgctcttattttgttagggaaagaagtttgattaaagtaatagaaacttatttttatttgaggagtcttttgggaaatgacttatttttttaactcttctacttgccatatgggtaagtacataagtatttgaagagttaaattagtttggtggtgctcttattgcccaatctgataacttttagtggtttggatgcagagcatgagaaggaatttttagttttagaaagatcagtttgacattctggaggtgttaaattattacttgattaatgattgtggttctaagctttcttcagtggcctggttctttgataaatcatggcaaagtaaggattagggtttgcagctatctttattcttccttatccagttcctaattataatcagatggtgaagttgttattagcccttcatatttcaatgtgtttggatagcagctgctatgtgactgtccctagttcacgagcacatttggaagcatcattaaatgcactctatttttctgcttgatgggcattctacattactgagtttaattctaatttcatctcttatgattttggaaatcaaattaattttatcttttaggagttagtatctctgtggagtagtctaggggagtcttctgagactattgattattccttcttcttgaagcaactatctccgttgagtagtctaggggagtcttcacagactattgattattccttcttttttgaagcaagtctgtctataaggcagttaaaagaaataattcatggtacaaatttctttatgtttactgttttgaaaatacttgatgaggatgagaatgaagatgtaagcagttcataaaaaagaatttagttctgctcttgactggagatgaaccttgtctgaattttatgcagatcagtagttttttgtgccttgaacccatgtgtttgctggcatattcaaaccttaattcattctgatatggaacataggcattctccaagttttaaattaataaagcatttctcctgatcatatttgggcaaatgtctttccaaggaaaccatatagcgggtagatgtagatatatgatacactagatgttgttattcatttatgtggtcccacaatgtggaagtcaatgccatttgatgttcaattgcagactaagtcatgtttaaccacttgtgcattctgttagtttgttgcatgaataatttgtttaattttatgaaaaattaatgttttataatgattgtacagaaagatctgagcagttagattggg

SEQ ID NO: 8954 - DNA, 948 bp, Citrus sinensis
  Intron number 2 from transcript orange1.1g025386m (locus o range1.1g023903m.g) derived from phytozome v7.0 (chr-ID sc affold00002; pos 525989 to 526936)
cttaaacgaccccggtccgattacggtacgctcttttacactttcttttttgttttaaaattccaattatatgattccttttggtgagcttgtttatttaactagttaaccatggatcgccatggtgttattacataggattttattgttttatttccatggcatgagaaaattctctaatttatgttccgatttgggagctaaagttgcaattttatgtaaatttatacagataagggttatgacattagcattttggtagaatttggagcactgactctgtgtgaagagatgcagggtaaaagaatttgtcaacttcaatactgataacataatctttgtagtttgtatgtgtgcgtttggggcagcgcatcctatattctaggagaatatatctattttgtgatttatattcagatatagcaggagagaatgactgtatgagtgtgtgtattctattttgtgatttatatctcgaaaagaaataaagaagtgtacatgaataatgggtttgaattcaattcaaaactgagccatcgaagggtgtgaatgtgctaagtgacagataaatttgttcagaattatttacaacttttgttttaagtttcaaaattagaagatttatctatcctttttttggactaatgagagattcatgtcccttgccaactttgtaattatttgacactgaaagtcattcttctgcatgaatcatgtattcttggatcttcctgtagaattggattcattcagtgttctccattttacgatggagtccatgttcatcggtcttactttaacagaaatcactaagcaagtagagagttgacagtaggtcaactgcatctatgcatgcttattcacacattccttttggagaaggaatttcactgacatctttgatttttaatactgaagatcttcccccttctgaagtgctgtcacgtc

SEQ ID NO: 8955 - DNA, 1005 bp, Citrus sinensis
  Intron number 6 from transcript orange1.1g029861m (locus o range1.1g027286m.g) derived from phytozome v7.0 (chr-ID sc affold00015; pos 1832193 to 1833197)
ctcgagagagagatcgaagaattcttctacgtgctgtaagctcctacactgctattcttgatctaaatatatgtgtttctttttgccaagtgaagaaaaatttcaaatgctttttcattttgtttgcaattgatctttaccaactgcttttttaaggaggcaacttgtctgaatgacacaagtcaagccacattcatacttcaatcaaaaatataaatgggccctttctcagcgatggaatatcaaaatcatgtccaaaaaagtaaattaaccatattgttgatgctaagttaaattgttgagttttactgcatttgagatttgaactactagtaaaatcaaggttaagaagggatattttggggtgttcaacttctattctcagtacttgaatttatataattgtctttctgacaatcatctgaaacaatgcaatagtaagacaagacagttttgagaatatctttctgaagttttatgttagatggactatgaagattggggcattatcttccatttcaactgctttctgtagttttgatttgcatggttgactatgaactattgattagacaccagtgtcttatcccgtcttcccttgatattagaggggtggtggcagtggagagggcatcttgtttgactgtctgactgagacatataacttgctacctcttacctagtaggccaaaatcacagtttgaatagattaagtttccgtaggcaagtcctgaaaaaattggttgaaacttcagaagttggattactatagcttcatgaaggtgtttgaatcatcatattaaccagtctgtgatcttgaacctttttaattctaggaataaattgccttttgtgctcatattgagttgtggcttttttttttttctaaagtttaatttgcttagcattgaatgctatttattctaatagatggataaaggtaaatctgaaaattcagcaaaaaatccagccaacaaaaataaagttggggaattatttccttcc

SEQ ID NO: 8956 - DNA, 708 bp, Citrus sinensis
  Intron number 3 from transcript orange1.1g037346m (locus o range1.1g037346m.g) derived from phytozome v7.0 (chr-ID sc affold00054; pos 247153 to 247860 reverse strand)
ggaattgaagttttgtctaagattactgagcttagaaagtgtagaattttgagtgtttaactttcaatactactccaaatgcccccaagattacaaatcaaacaatcaagacgctaaaagaatctaccagatcaaatcacagcaagaatgattttctgaaagagttatgacacaatcttaatacccaatcagatgaatcgaaaaagaaaagaggaagtaatagcagcaagaatagaagagttaacgtggttcagctagttctcacttgcttacatccacggggaaaccaggatcagttttattgatttgtagaagatgattacagagcgtttacagagattattacaatcaagaagctttctctcgaatcttctctcctctaaatagctcactgtctcctctctccctgttgcatcagaatcagctgtttataacagcttctttaacgaaccaagatgaatacagaaacacgtgatgagcatgtgctataaccaattcttaacgaacttgagcagctgtctaacgcacgtgtttccctcgtgcttcacttacactaaaacgacgcttaatgaagtcgttccagtgacaaaaggaattgctcaccaaaacgcaacatcaattgtcgtattgaaataacattagctgcataacgcacgatcactctgccgtttcatctatcttgatttgcttcacaacacaacagaaaga

SEQ ID NO: 8957 - DNA, 4412 bp, Citrus sinensis
  Intron number 2 from transcript orange1.1g032905m (locus o range1.1g032924m.g) derived from phytozome v7.0 (chr-ID sc affold00005; pos 1444730 to 1449141 reverse strand)
gattaataaacttggaactgtcaagtaatctggaggtttctggcttgttatttgctcctttttttttttgcatgtacaaccgtgcaaatagtggtcatggatttagaggagtattggcgctatctatcaaccggtttttaggactcttttatgttttctcctcctttttagcttccacaattgcctttctgaatactatgatgtccagctcatattttgatcttgcgtttttgcatatgctgcagcgatgtggaaatggtttgagtttttctggaagattgggattctggggatgtgttaaagagcttttctgaccccttcttagttccttattgaaaatttctagtcaggttatgctgggctatctcactacagcagggggtttttatggcttctttattgtttttccttgtctcacttccatccatcctattcgagtgctataaagttacagctcataattttgtctttcatttttgccaatttctgttgcagtgatgtggaaattctttgggtttcggtggaagattgggattctgctaatacttgagggtgtctaatgagtttttgtccatccttccttagttaatcacttctatctatgaaacttaaaatcaaattgcgttttgatcttttgatttacgcatacttttgtgtggcagtgttaaagagtatttgaggaataccgtgactctgcatctgggtgatgtttcatgagtttttttttttccctttggaacctgctcttagtttatcacttttatctatgaatacttcagtgcagattgtattcgggccatttcatttttgtaatttttacgtttcagtgttctagaaatggtttgggtagctgaggaacatttgggctctgttacgaaggtggcattcatgactttttcttagtttactgtccgtattgttgagcaaatcttttcagttttgcaatgttctgtggcagcaatagggaaacattccaagttccaagtaacgctgggagcaagttttgaaagaatactaggactattctactcagggggttttctattgtcctattttagtaatttttgcagtttaattcttctgtctttacctaactgaatccttgaggttcgtattaactctgtcttcattttttgcaaatttcttgagagtgatgaataagtgttttagcttgccaactctccaccttaggagtttctgacaactcccttgttctttcttgttggtagcttccatctatgcctgtttgaatactataagttcagctttcatttttgtgaacttctttcctatgatgtgggttttttccccctttttcaaaggtttgggtaggatttggggatgtcattcgtccctttcttagctgatcgcatctacaaatttatctatgaaaaacccaattgtattttggtcatttgatttttgtaagtgttatgttgcagttcttgagaaatggtctgggtatttgaccacttctaggggctgatctaatgaattttttcgaactttttttaatcacttctattcatgaatattttagagcatattgtaatctggctgtttcattttttgcaatgtttaatgttgcagagtttcagaaatggatttagtagttgaggaatatctggactgctgcaaagggagcttctatgattgaggaattttctgagttttcgaagaatcaattgaccatttcacttgaggagttgtctattgtgttgttcagtcatttttccagttggtttcttttatctctgcctaactgaatgctctgaagtgtaactatgtttgttgcaaatttcttgagcagcgatggcaaagtgtgttcagtttttttggagtattaaggctttctctccactgcaggggcttctgatgactctaattctttcttcttgcttctagcttctagcttccacatggctacctgaatactatgaggtttatctcatattttggtctttcatttgtgcatctctgttggagtgaggtgaatatgtttgaattgcttgtggatcgtttttaaatagattgaaattttgagtgttatggatttatgagtacatcttcgtgtttttgagaagtgttgcagaacgctattcaaggggcttctagtaaatgatttagcttctcaatgccttgctttagagtgtaatttgatcagtcatattgccaaattgttgttgcagcttgccagtagagaattgtttgtggacatctgcgaataaagagttttgttagtgttttgcggtttgcttgttatcttatttgtttaatttgttgatgagattacatcctgcaggtttgtgttggaatcttgtttgtttgatttcaatgaggttatatgcttcaggtttctgttggaaaatactctggccaatggtcaatatagtgagtggtttgtcttccgggttgtgattggctacagcaaggcttctgcaagtttgtagggcacaaaattccttgccatttgttgattatcacttttgaagcagctgctggaatcaactatttggcaacaataaatgggggtgtaagggaaacattctaccactagttattgagcctttatggattatccatataccaagtaaatatacttctgatgtttgtcaatattttgccctatcatcagattattcagtgtgttgaactttttagcaaatattctacatggaagggtgtccacgtgtggggatcataatgctggcacgcttatcttgcgtacttattttcccctttttttctctttgatgcatcgctctgttttttgagttgatcctgtgatccgttctatgatttgtttggttacagagaattgttatagctgttccattgccccccttttctctagttgaaagagagttttggtgtggtcgaattccgagtgttgttgggcagatattgcctattggttctatacctcctggactttgttttccctttttagcttgtcttggttgctagttagccctgtgctcattttttttttttggtttgattacagagaatgatgcttcagaatgatgttgctcggttgatgtttgtagtttttatggaataccaggacttttgtctcgtggtgtctatgaacattgagaacatattcgtgctttggtaatgccattttacaaatttttttgttgcagtgttacttaaatggtcagtgttttgaggagtattgggactgctactgctgtgtctttaatgggctttttctgacctttttttagcttatcacttctactcgtaatctgtaagagaggattgtatttggtttgttttctctcttaacaaatttttgagaagtatcgtggagcattttttagacattttacttagtttttaccactttatctttgaatactttaccttcattgtgcccctttagtttggcaattttttgttgcagtgagagaaaaaaatgttccaagttttcaaggagtataaggactattctacttgggtgattttctgacagatttttagtcctttcctaagtttatttgttctattctaacagtccagtttttaattatgttttccatctgttgcaaaattttggagcagtgatggttgaatgttacaaattttgagtgttggggctagctatcatctaagggggtgtttgatggcttttaaaaattttcctctaattccttcacaattttttgttgcataggtatggggaacttagttttcaggaacattgggactgttgacgtgggggtacctatgaacttagttttcaggaacattgggactgttgacgtgggggtatcttccgtgatttttagtcttttctctaatttattatatctatattcttatcttactctgttaaaatttaagatacattggggctagatattgactacctatgtcttgctattttggaaaattgtgttgcagtgatggcagtatgcactgagtttttgaggaatttgaggctatacattgaggagtgccccgatgagtgttttgtctcttatagtttctcacttctgtctatgtttatcctgagtacttgaagaatatatctcttatcatttatttggcacaattgtgttgcagtgttacagagttgccaatttttttgaggaactttggaacttgtacgtgtgaaatccataactaaaattttctctttctcttctgcaaacatatgttgcagtgatatcattcctgtgttttcaaggaatagtgggactatgctgcttgtagtgaccaatgggtttttcttccttcactaatttattattggtgtctcagactatctttcatttcttcatgaggttcaatttgtaattttgtctttcataattgtagtattccatttttgcaaatttatattgcagtgatggtgaatgttttgaggtatttcgggattatctgctgcttggggttttttg

SEQ ID NO: 8958 - DNA, 1082 bp, Citrus sinensis
  Intron number 17 from transcript orange1.1g046825m (locus orange1.1g046825m.g) derived from phytozome v7.0 (chr-ID s caffold00092; pos 24536 to 25617)
acgtaagatgcttctttttcctttcatttttttctcaatggatgctgcttgatattttagtatatatctcttcaaattgtaagtgaattcgcaattttttttgaaatcatgattgtaagttcatttgccattagggtgataattaatcgttgctcgcaaattttgtagacctaagatgatcaatgttcttcactagttcacagcgaactcaatttgttgaccttcatgtttaccagaatttacttccagtttttggatgatattatttgttgggtaatagttttaattgttcgaagttttgttaacacagtgctaacaaactttatttgtctaggagcttttgatatagctattggctttatgtagttttcaaatagtcgattgctcttttgacataatttattcaatgaaaagaacgaacatatttcaatttcaatatacatatattcttcagatttgctctttcaacagaggtaaccatggcatttactttgaggttcatttcattggtaaaccatgaatcagttgatgcactagaaattgactttagaatcagtagttataatttgactttttggttttggagattgagcattcaaacatgaagggtcgttgaggactgagctcaatttcgttgacaattcagtgtcattcctgtcaacaattataattggagctggacaagataatcgtggctactaataaagtctgtgcacatgcagttaaaagatagcattccgtgggtgtttttactcattgcacagtgtctatgaaggtcatgcttgttggtggcactatatgaattaagttacgtttaatttttcggacttttttatttttaatctttccaatgttcaactagaagtgaataggcaataagcattcatgggcattatcagggactaaatagaatgccttgtacactgaaacatagtataattcttttgagcattgcatacttcaatccttttaagcattcactaaagtctgtttaaatagacttgttatttttcttaaacttatttgatcattgctatcaattgtcagattgaatacatttcatcttgctgggcgaggtgaaa

SEQ ID NO: 8959 - DNA, 724 bp, Citrus sinensis
  Intron number 2 from transcript orange1.1g025389m (locus o range1.1g025389m.g) derived from phytozome v7.0 (chr-ID sc affold00025; pos 973845 to 974568 reverse strand)
caagccacagtaagtttctgtcctttttccttttttaaaattgtttgttggttatgtttgattcatatgtctttctcttaatctgctggattttgtttcatcaccaggtccatgacatgtaatgattctgtctatgttaatattattatacttgtctttcataaccgtagcacatgattgagagaataaaataaaaggcttgtatttcacaatgtttgctagagaatgtggtacataagttttaaaatatgcatattttattgatttttgaataggaaggaggacttgcccatgaatttagaacttaactattaatgcaacttattaattcagagcaggttataggcttattggggatatagtgtttgtcaatatattgagatggtagagtcgggtttctgattagctcagacattttaatgagctttgctaattcttatatacatttatagtgatgtctccttgtagcttatctaatgttctgtaactgttgatggtttgttttactggttctgctgttctctctctctttttttttttttctttttttcagtagctacttatgtgaggctgtgttgacatatgaatagaatgccatttgttaaatcagtaacattgccagtgaacattgagttaatgactagttttgttttggttatgttttgaattggttaatctaactctaaaaatggtatttgatatggcatgcaaaaggctgggagat

SEQ ID NO: 8960 - DNA, 449 bp, Citrus sinensis
  Intron number 4 from transcript orange1.1g026687m (locus o range1.1g026687m.g) derived from phytozome v7.0 (chr-ID sc affold00063; pos 626150 to 626598 reverse strand)
aagccctccgaactcctggggtttgtggcctcttcttcatatcattatttgaattaacagttttaaattcaatgaaaagttcaaatctaatggtacaattctgggttttgagaaaatgatttagctgtcttatagtctcccagctatctgcatcctgcgtatgattcagtgaaattgaacaaaaatccctgcactgctaagactttctaccataaaaaattttgaagttaaatcagtttgatgtctgttaacggaagaacaatgcaataaggccaatgattttgtgatgaaatcatgagggtgattaaagctagtgtgcttcagtcactttttatttgtcacaaagtgcctaaattccttgagccatatggctgctgaaaccccccactgatattatgagctttgacgtcgcaggtgaccagccaaaggctgtctgttggggtgacacc

SEQ ID NO: 8961 - DNA, 1446 bp, Citrus sinensis
  Intron number 1 from transcript orange1.1g019509m (locus o range1.1g019076m.g) derived from phytozome v7.0 (chr-ID sc affold00236; pos 78620 to 80065 reverse strand)
agtttcttgcaaccaaagcttgaaattttagctcggtatatattaacacacacgtaaaaatatccattctagtcattttgtttgtactgttgtgtaatgtactagatactatgtttattgttaattatgatttttgagtttcgtgggttttgttgtgatattttttcatgcgggttgctctataactagtgaaatctctgtgatttgacaagtttatgggttgccaaagagtttaagaattatttttcgtgtcatttttattattatgaattataatttatttggtgtttctgatttatttatttatttcttttcagttatgtatgtttatggttatctgaatataaggattgctatatatttcgtagtgtcttttggtttgagctgtgtttgatatggtcatggcaaaactactttttgcaaaggtgatttggtgtccttttctttagttgtgaaattgtagtgcatatttaaaaaattagtgattgattccacaaataaatctttggcaactgtttttgctggacttatcagttatgctttgcttaggggtatcaagaatcttcaatatttttcctcatttttatatgggaatattccaccatatataccctttggattagtcttagtgaagattataaagtcagtgcctgatgctttgttctttagttgaaaatcatattttacttaatagttttgtatttccttgtaactaagaatagttcttttgtcaatgtgtccctaaattcaatgtaaatgatgttttctagaatatgaaaatcaacctgacctttagttcagatcctcactcggttttgtagtatatgaattttctatttctcttgcaatttttgttatggatcttttgtgtctgaatatagtcataaatagtgatgattttgtatcaccagagtattaaattgttacaagttctcaattaatgtataccatgtgtttgaatgatggtgagacctaaactggtgcaaatcatagtcacatgatataaattttgaccttgtactatgtagcgttataacgttcaatcatggcgacggaggtgatggatcttcctcgaagaacttgacatgtttaaatgttgcattaaagttctttaagattttcttgatttacataagacaaaggattttagttaactagttttatgcttttaactttggagcagtaattactaggaagtcttttctgctgttttgttgataaacattttcttgcacttggtttttactacgttcttttgagttttgagaaagagaaaaaatttagtgagttgtttattctgagtgtgaagttagataaagttaattactttgattgattaacttcacagaatgttgcctattaatttagacagtcaataacaatcaatgatttatatttttgcttggtgcagaaataagggaataagttttgttgccattgatcaga

SEQ ID NO: 8962 - DNA, 1407 bp, Citrus sinensis
  Intron number 2 from transcript orange1.1g014479m (locus o range1.1g014227m.g) derived from phytozome v7.0 (chr-ID sc affold00180; pos 279606 to 281012)
aggcgtgtccttttctgcaaaagcttgtaattaaggtaaatttttcacactctacttattggtagagaagcttgggatagatgtgatggttactgttgtagcttgctgaacgtttcaaatgtatgggcatagtccgtctttttttcccccatttattaagcattttaaattcagctagtaagtaaccttcttctgataatagtttgcacttcaacatgcgaacgcttggcattgtgactatatttttcacagtatcatctaaatattgttcgaaattacaatgtcatctagcataacagaaaaagatcacatttgttcacagtccctgcttttatctttagtctctttcaagagattaccactcggacatgaagattgtaaattaatctcattgaatagggtggtttggttgggcatccattataaatctcaacagaattttgtttttgtagttttggattttttcaatcggttttgcatgatcctgtggacaactggtgtacaatacttgcaactcttttttcttgcaaaaagaaatcttaatctcgtatcattttgcacttcaatacttgaatgtctggtatggtgaccatgtttgtcatgatatcatctaaatattgtttaagattacacagatattattgaataagaagatcacatctgtgtgaatgcccttaaatgagatttctgctcttccacttgataaatattttcattctctctctgctggcagaaacttgaatattataataatgcaggtgttgaaaacttcaacttttagagttttaatcatggagcaactgtagtaaattccaatacattccaagtatggacaggttttgtatagctttgcgagtctggcagagatttttgaggtctattggtctaatgatgatgcagaataaatttttcagattttgtttctgtaatggtcaattatgtttttttcacttgtgtggtctttgaccttattctatatctttccagctaaagcatatgttttttattttaccctctcaataatatattgtggaccagagtattaggcagaagtagcctgaagatgaaagtaagctgtgaatacagcatttagttacgagctaaaacaagaacgactgctcaactttttgtttcatattggttgtttgtgtggcgatcttttcatatgtggcatatattatgatcatatttcatatgtgcttatttttttcaatcagctaggttgtatattgcatgtaaaatcagtcaaagtgtgcaggacagtgttgctcagtatatttaatggttcggagtcataactctctttgttaattgtaggcaaattttggggttttacaaattcagttatctgttttctctaacaagactacgcagttaaacatgaaatagtcttctttcgttgcagat

SEQ ID NO: 8963 - DNA, 2315 bp, Citrus sinensis
  Intron number 1 from transcript orange1.1g023163m (locus o range1.1g023166m.g) derived from phytozome v7.0 (chr-ID sc affold00008; pos 2273025 to 2275339 reverse strand)
cagcagcagcagcagaatcagcaacaacagtgagggtattgtttctatttcataatcgcaattactctggatttactgtttggattattgtactttctttgcacgttttttattaattattggaaagcttatatgtgatattggcaagttgatgtggctgtacattgctaccttgttgcgatgatatgggctattatctttgtgtgtccaattattatcttcttgttcaaatatgttttctttttaaaatatttgctatcatcataaaaaattaacatgctttgtttagggatcagctttgagaaatttagatgttcgtgacttgcatttgcaggtccttctttttcatatattaattttaaattctctatggatgtttaattttcactggatctataccttttcttccatggtagttattctgtgtatttctgatcaatgatgctgtgggtgtgttttgttttacttttgtctctgttgtatcatgtcttgtccccttttcctagtccaaaaaaaaaaaaaaagtcataacttgacaaaaaagtcatacaagatagatctattctaagcatgtaatccttgacaaatacttgagaaaatgagatggggagatgacatatgatagcctgacttgaatggtgcttcataacttttccatatatagatagttctgctatgaaacctaactttactgaagtacaagtacattaattctcctttctttctttcaagttctagcttctgctgtactttgatattcctacccatgtattttgggtgctagtgtttttgcagttgcttttgtattatgtcttctccgtcttctcactgaagtatacaatagtaatgtggtacgtttattctgcatttcgcttgacctctgcaaactgtatggcgtagcaatatggttgaaagtctaaataatatacactaggaaatatcttctattgtaggcaaaatttctaggttttgagatgctttcacaccaatatgtactagtacttaccttctcacaaaggctagatattcacaactgtctgtaatttaaagactctgatcttcttacttaaatacactttagatgttggtcacatagtagttttgtcatgtctggctctatgttttcctctgatgtcatccctgatttgtttagaatccggaagaaagatatttcgaaagcattcatgaggccctaattagcgtctcttctaattaatggctgtaaaattctgtatctctttggcaatgtcccagcaagggtccaaagatattctttaggttttctgaggtgtttgattgaggtgtctcaattgtgccttaaagtctaaaaatgcagtcaatacttctaaggttgcaaatcagcaatagaagccaaaattttgccataaggccttctcttttttaccatgctggtagagaatatcaaaggacaaactcagttttcttaattgtactccatggaaaattagccccctcaattaatttactccacaaatcagaggccatgacgtagaatagaagatgattaatgcttcagtcacttcttttgcacagtacaacacaagtacgaattggcacatattcttgttattcccttcataaccatattttattccattcatagccatataatgagagatttctagtaatttgacacttgaggttgtggcgcatgatcaaactctaagtattttgccctgtttcgttgggtataatgcccaaggaattttgggtgtaatgccttatagctatattacattttttatacttttgtgagtagttttaacactagagaccttgtttatacagcatcaatgttaaatcatacaaagccctgtctttgataaccgtaaatcaatctgtcaccatttatgtccaaacacattgaaaagctgccaaataactgtccaaaatactgggatggcctgctacgtttgttccttttgttagttatctaccacattcgccaacttaatttgataatgagctctccatgtttttcagtttccatttgttatttttagtttttattttaacagtagaagttctaaatatgggcatggttccaagttgtcttgttgattatctgaatctcatacagtcatactccgcaaatactttatgggagcttggacaatatcattagcggagttgccatgttcttcaacttttggggttacatgcatgtacgtgtcttgcattgttgttctactaagttactgcaatgcttttctcagttttgttacctatttttccttgtatatgaactatttcttgattagaaaatgacttgcattttcttggttgtagcagga

SEQ ID NO: 8964 - DNA, 1669 bp, Citrus sinensis
  Intron number 4 from transcript orange1.1g006141m (locus o range1.1g006141m.g) derived from phytozome v7.0 (chr-ID sc affold00034; pos 488210 to 489878)
ttgtacgtcactcctcatctctcactctcactctctttgattctgcaaaataagatgcctttacgttgataaataaagaggtttaagattcgaagaggtgctcacatgagtgatcagactaccatagtctaaataattaaaaaaataaaaataattatgaatcttcgccaacttgaattgagagcttagcaaagcattagcactctaataataacactaatttgctacgatctcagctctaagtccacatattctaaaagataaaaacattctcaccaaaactaaaaattaaaatcgtaaataaatatatatttaacatatgtttttgactcgatgaggacaatactgtctatttctttatattatatatatgtttattgttgacaagtacaatcggctgtgttcttccaagtttttaacacctagctttaccgttgataaacaccaatgagaagatctgttgccactggcgaagccaatataggaccaattggggtaagagccctggttagctttgaaaaaattaaagaataattttaaatcagttcatagtggtcttatagataattttaaagaatatcaaatttaatgcttgttaatttctttttaaaatttattagttattttaattctataaacttgaattagccacacccaaatgaagacaaaagaaatttaacaaaataatagaataaataaaaaatatataaaatagttttcctattttttccctcattttcttctcctttttctttgttgtatgcatgcaaatattgtatattattatattgacaatgaaaccatcattacaatacaaaaccgcatagagataacagcaataattgaaaatttatggataaataataatataatataattgtagtgtcatatattatatttttaaatatttggaaattgtgttgtatttttttaaaatatatatatataaaagttataggtagacgtgagaaactctacccactaaattatcatccagactatgcaaaatacttttactgtcagttaagctgcgctcctgccctgaattataagttgaatgtgccctcaattgaaacaattttttaactatgtccctgtttgttgccaaattgttgactaaggtctgcatgtttaacacgtgtcttttttttttttgggttaaaaatatttggggatgacacgagcataagcgagtggaagcatttttataagattaattcgataacttttttcaagcgtcaaaaatgaagcttgaaaaagttttagaccaaactatggagtcgccgtatgccagttgaaacaactcaagaagacctacggtcagtgcaccaacttaccattttacccttgtctgctcttacaattatttctgaggagtaccaaattttattaaaccaggcttcttctgctgcccgtatattgtaattggaacctaatcagcacttcaggtttttaaaataaatagtcacagtcacagatacaatcatgtccaaaatttatcaaagccaaattagcattaaatatggccatgtagatgagaagtaaatgactggctttttatgtttctgctggtcaagctcaagtggcactgacagtcaacagcaaattgaataaatctatgttgaatggtgcagggcacgaaaagaccgaagctgttctgggtctcagc

SEQ ID NO: 8965 - DNA, 609 bp, Citrus sinensis
  Intron number 1 from transcript orange1.1g005584m (locus o range1.1g005584m.g) derived from phytozome v7.0 (chr-ID sc affold00077; pos 202274 to 202882)
ggtctagcttcacttccatttcagctcaaatctcagtaagtaattttttttttaattaatgttacagcatgttttttaatttttatatttgtagtggaaagttaagatttgttttatcgattcctagggtttctatgattttgaaacttggatccatgtgcatttattttagtactgagcttagtgagatttggatttgatttgggatattttagtttaaaatttgtgatcttgggtggtaattatgaaatggggcttttgatttttgtgctggtgagtgtttggtagctgagaaaataggggaaaatgaaatttggatgcttatcgtttatgttgagttgaaaataagtcaactgtagcaaatgattttattatggcgacttcagttgatgaattcattttaactattcattagctgattgattgatatatttaagcttttaatcgaacagatctcaaattaaaaaccaaagaattagtgtcagtcatgttagtactgcttgttgaaagggctttgacctggtcaaattaaagtctttatgaggaaaatgttgaagcttgatattaagaaagaattgtacttaacgttatctcactgaatatttgcag

SEQ ID NO: 8966 - DNA, 731 bp, Citrus sinensis
  Intron number 18 from transcript orange1.1g005129m (locus orange1.1g005129m.g) derived from phytozome v7.0 (chr-ID s caffold00561; pos 84065 to 84795 reverse strand)
gttggaggggagaaaactattgatattgcagaaaggtgagaacagcttctttctgagtttaaaatgaaatgatatccatctgttgttccttttctccccatttcccaaaaaagtttagatatttgcggtaaaaattgtgagtgagcaaccaagctagtcaaaaacagtggttgatgaaccaaagccttacatgttttgctgctcggattttagaaaccaaaaataattgccatcaatgtatcatcagcgaataaccatgaaaatttaaacattcagattatcaaacctttttattattattattattatttagcctaatggcatccaatccgctccccaccgtgtgaatgggattcgaaccatggaccttttgttttccacccaagagaattttaccaactgagctagttgacacctactaaattcggatgatcaaactaaataagcaagatatggagatgtatggctggtattattatattctgcattcttgatggttttaccaccaaaaaagcattttagttgtcaaatcctaattatggaagtgtgaaaattttgttagcaaataggtcttggagtacttcccatcatttattgtctggacaaattcaatcaaattcagtatcccagtgctaaatctcaatttgaatgaatgcatatgaaaatgattctcaatgtttattatttggttgacaggaccacccaagcaattgcagcactgttgagaaggc

SEQ ID NO: 8967 - DNA, 358 bp, Citrus sinensis
  Intron number 7 from transcript orange1.1g020119m (locus o range1.1g018434m.g) derived from phytozome v7.0 (chr-ID sc affold00197; pos 172708 to 173065)
ccggggcaggtaaattatcataacttttctgcttatcctggttattttcattttttccctcatacacttggtagctaaatctagtttttaataattaaatcattctccatattctgtgtagtgggagttccaagttggtcccgctgttggaatttctgctggagatcagttgtgggttgcccgctatattttagaggtaatctattatactcaatatatatatatatatattttttttttttgttagaggatacttccgtaactactactggtatctattaaagatttgaagtgttcttaatgccaacatttgaatttaacagaggattacagagattgctggagttgtgctttcttt

SEQ ID NO: 8968 - DNA, 945 bp, Citrus sinensis
  Intron number 3 from transcript orange1.1g009722m (locus o range1.1g009722m.g) derived from phytozome v7.0 (chr-ID sc affold00370; pos 39872 to 40816 reverse strand)
agcggtttgctaatcgtgcagtgctttctcttcaggttagtcttttccttggtggttttattaagatttgaagttaatttgatatgggaatgttttgttcattggtgtacttcatttatcactgtagtctgcataatacattctccaaaggtaatgggttgtgaggcagccagaacaattagaggctgtttcaaaattgtcattctgtaaaggtccaataaggtactttttatttggttttgtgttctggctcatttgtatgagtgatagagaaaacatgggttgaatgtgtacacgaagataaataagcaattcctggtggatccagtaacatgttgttcctggcatgcaaagataaatgcaattctggtgaattggatgtgacaaacaccatcgtggttgatgatatccgctgttcatttaccattaaagtttgacgaatgggtatatgacgaaactgaattttaggataattgaattgagattgtatcttcatatgcggggagatggtttcacatgttgtggtgccgcaatgacaacatttgggtggctgcaaacctattgggtgtgcattgtgtagaagttaatccaatcatttctttttatccccccttttttcccacaacattgaagctcttaatgtgtttttgaaccctttgttagactgctcttatctttggcattatgcagttttgaagatttttttatctttttacaacatttgtaggtgaaatagatgcctatcaaaaggagatgcccatatattacatgcatttaatctgtttaaaaatgattgtcacgataatatttgtgaaagattgcatgtactgaccgcaaaccttgttattctttcacacgtcttaatttgagatgccttgcccaaaaggttatcatatctaacaaattttcattgcagagcaaccctggttggggatttgacaagaa

SEQ ID NO: 8969 - DNA, 603 bp, Citrus sinensis
  Intron number 19 from transcript orange1.1g001363m (locus orange1.1g001310m.g) derived from phytozome v7.0 (chr-ID s caffold00051; pos 730795 to 731397 reverse strand)
cgttgctgctcccctctaaagttaaagcaaacaaggttatgtagcttcaattttcatatattgtctttgatttttataatatcttctggtgtggtatatttatcaggctttataaatctgcattttaacagagccacttacaatgtgatagaatggtgcaatacaagctgaatgctatacatgctagtaaataagaactgagtaaatgacatattagaaattttcttttgcaactgttgtacgcttccttgaagtttttgtagattgagtttcctgttgcttgctagtatacaaatacacttgtcactgttctaatcacagagattctttatagttgattcaactgttctatgttcctctaatcagctatccatgagtagaaccttatttctagttaacttttcttccgaacttctaaatttgtaaagaatgattacattatcaaacccacaaatgtcagaggaactttaagtagcaaaggctcaaggatacaaaaccacctaaaacatatcaataattgggtttcaagttgaaggaaatgaaataaaagtttctcatagttttccttcttgcaactgcagatatcaagactaacctacaaca

SEQ ID NO: 8970 - DNA, 1731 bp, Citrus sinensis
  Intron number 3 from transcript orange1.1g022542m (locus o range1.1g022551m.g) derived from phytozome v7.0 (chr-ID sc affold00095; pos 292927 to 294657)
gggtgagtagtctttatgcctttcttcttaagcaatctattcctattgaaatgtgtttagtagtttgttgtttgctctgagtgaatgcaaaaatggatttgatcacttttttctaggtttgttggcaaaattaacagattggcttcatgtttgaccatcaagcttaactgcttttatatagtttatgccttgtgattgagaaccatgctaaggcttttagcaacttgcaggtgtcttcaggcagtaaaatgttggttttccataaaaaaatacctgcccataaatacaggatgaagccttccaataagcaaaaatgaaaaaaaaaaaatcacaaatttaactaatgctttctatactttcttgtgatttcttagttatgtgcattatccaaagaggccctttggtgctgattgtgggaaaaatattttggcctaaatttcacatattttatgcttttgtatgataatcttcaagtttacgaaatagggtgcctagtgtcagcctgatgcatgctaatgtccacatattgttatctcactgaccaaattgctttaagtttttggtgagtctaatctcaatctagtaaaacttttttttttttataaaaaccctcctaagattatcccattgtagtaatggtgatgaatatctgtattccaatgtctctatcaagggtaagattgcttattccttgttagattggaattggaattcaattttttgaggaacttgaacgagggagaaacacaagaagcttctgctcttttgactttactggagaatgtttcggctaatgttatgatagagtataaaagaattcggaagcttagtccttcaaggatcttttcttgcaaatcctttttggataagttgattgatgatcaagttcctttgaactttcagcctgcccatatgatttggaaagctaaaagtcccaagtaaagttcaaatttttgcttggtccttggctcttggtaaacttaatacctttgatgttattcaaagacagaatcctaatgtttctttgtctccttcttggtgtatcaagtccaagataaatggtggaagtatggatcatttgtttttgcattgtcacactgctgtccagctatggcatagattgtttcaggcagctcaaatctcttgggtgatgccagcttctagtatatctatgctttcagagtttattcatgcttttgggaaaggtgaaaaagctagagtgctgtggaagtgttcggttatggccactttttgggtgatttggcttaaagaaatagaaggatttttgaagattcagaggaagatatcatctttttgtgggaaagagcgtgattattagtttctctttgggccacagttactaagaatttcaagattcttctttcttctgcattcatctaaactgggaatggttgttggcttaattctgtgttttttgtaatgattttgttgtaaagctttcgtagtcttttagatcccttgcttatcttttcatctgattagctcttaactgtatagatcttctagtgatcttttgggggtttctttctttgtggacttattgttcacattttgtgattattgttcttattaatactagtttcgttgtttcctattaaaaaaaacaaataaataaaatttcataaccaactctaaccatctgtatccctcttaattcagtgatttcttaactgatgtttaatttaattatcatcttcttccaatgcagtt

SEQ ID NO: 8971 - DNA, 3024 bp, Citrus sinensis
  Intron number 6 from transcript orange1.1g020520m (locus o range1.1g020485m.g) derived from phytozome v7.0 (chr-ID sc affold00264; pos 22011 to 25034 reverse strand)
taaagcaatctctggatcgtaattttagaccattggtaactggtattctctctctctctttctaagatttttttgtttcctgctgtagcggatttgttgtcatattgtgagctcaaattagtgaaacgcttctctactttatttttaatgggtcaagaattgtttattcattcagtgatcagctaagctaactttcctgtctactgcctgttttggatatattgaactgcttttaatcttacaatgaccttgcctctgatggatttctgtgtcctgtcaattatccgctgctgccttctgtacatgtttcttgtagtttcatgctcagcatgtgctttataggttgggacaatggactgcataataagaggcaaagattgttctaccttagtactatttcttatcttaaaatgtgtttcttttttttttttttggtggttgggggggtttaaaaaaaagaaaaagaaaaagagaacaggtacagatgcttctctctggttaagccaagtcaattactatatcctttgttacagtgaagacctataactttggccgcaggtaggggatgggtatgctgtacaccatgaaccccgtacctaattttagctgcggttttgttaaacagtcaaaatactgttgtatccatagttaatcatacaattggttgattacattgaaattgtttgtcactctgcactttctatatgattcgtgagttgcatgcaaaaaaaagttaaagataagactaagaatgactgaggaaaagaagagagaaacataggaaatttagcagctaaagaaagaggagcattggtgtcctgtcttgtgcaattatatatgtaagcatctataaaataaaatatagaaagatagccccggaataataaccaatactcatgtatttatatcttggaatttcgaaaatatctctccctttttttaacaataagcaaaccttattctattaaatggttattgattaaagtgggaattaggatactggcataaagagaagttgaaaacctaagtgtcttctaagatctcattagactaagtgccttaccttataggaagcatggtgtcatggatttttcttctattgcgctcatctgtctgtgtgtatcattctgtttctagtgtttcccaattctactcactttttagctggttttagtaaatatcaatcataaaagtagccttataagacattgattatcttcccaatattctattccaatagttttacatcacctctgatgaattcacaccactgccaagacatcacttcattcctatatatttcttcttaattcattctttgactctcaactgatgtgtaatgctctatgagctctgtttttgaactcctaataatgctcccgtcctgctaattctgtactttgatttgtgacattttggcaaatatatctctatatttgtcatggatgagagtaaaagagcgctggtatcggagctttatccttaaaatttcaaattgctttttcagatttgtgcataagagccatgtgtgttccattgaaattctttggatagaattgggtatgtctcttctttgctttataggttgtcttcacagattttctgccctgctgtctctggtttactacatcagaccaagtccaatgccagttttatgtcttatgtcttaagtccttgcactccgatttctatgtcagagggtctaatttcagagaatctagaggtcttggtaagattttgataagtatttgtagttggcttgtcatgatctgggaagtagtgtcagcatttgatgtggtgaatgatctggtagctgatagtgtaccgcacgctgatggtctgttagatttgacataagaaatggactgaatggcatcaacagctgggaagatctgaaagatacattaatttctgtctcaatgccaatacaaagctagacgacaatagaaaaaaccctatcaggtcactgtagccatattcatgcttgccttatacatggttgaggaaggataggcactgaataatttgcgaattcaatttgtgcaccaattatccttcttcttcttattttactctttaattttaaagcttccatttaggtttacgctagacctaggatatagaagatcatgaattgaaaaattacaacaacataacagtttgttaatgatcagttgctttaacaatgtggtagaaaatgagtagacatgtatgatttttacatgctaaaggtggttgcattgagttggattcaagcgttcatttattaagcaatccatgttccagttttacctgcttccgaattgaactgttaattccatcaagtgaggcaaaatgccatgtgattagtggaactgatagtagattagtagctatgctacaatcacaaagtttaatcccaagtatttgaggcaaattgacacagcattcattcatgaccattacgtaggtgattggataatgaaattactgtactgaaatggcagtctgaatgcagcaccacatcactatgatccaagactttggggtacaaacattgcaagtatttatcattattccatagattagttgtagctctcctgcttggaaaaggttacacctgaaaatctgttcttccacaaggagttagttgactattgaatcatatgagaagagctttgttttaaggccttcattatttttatcattttcttactacccatgccatctgctagttgcacttgcacaaatcaatggaaaaaacactgtaagtttgtagtgttagcaaatcctctaaatttggggagctgtcattttctgcagtccatgtttcctccattcattgggggatattttagtgttgtctgttagaagaattttccatgtagcttgttatggttagaattttgtgcctcagatccgtgaacaaatgtgtatatatttgcagtgtaaatattctgttgtaagcactatactggttttattgtccttttgtatgaatcttattggtacctctttcagcagtttttcagcaattaagcagta

SEQ ID NO: 8972 - DNA, 1841 bp, Citrus sinensis
  Intron number 1 from transcript orange1.1g025640m (locus o range1.1g025640m.g) derived from phytozome v7.0 (chr-ID sc affold00217; pos 246392 to 248232 reverse strand)
gcattacctttgagtaggctgacaaagaattacatgtaagtaaagatcttcacttttcttccagtttctatatttccctttgcaagatctgtttttcttgttaaataaaaaaaaaattgtgaattaagcgtcggcgctgtttgtttctgaaatttttcgtttttagtcgaatatttaagttttttgctttttctttttgttttaaattttaattcgataagatatttgtaatgggtattggagttatccctttgtttcgctttgttgcaagtgcttttcgagcccagctgaatgttgttaaacccttgatttgaacaaaaaattttgtcatgggtcttgtttaattttccgatagttttatttatttttcttgatgttattacaattgatgatatttcctgtgagttacttgagtaaaatcagttaattttagttttgtcgtttaggaaaaagaggcacccacatgctataaattttttaaaggggaatgacttacaaactgacttattattagaattttcagtgagtttataagtggccaatgaaaatttgagaaataaccccttttcgatgagtaattaaggtttttgatttgaatgtattgatgcttcgttgcatatattctgttgtatagggattcttattgttgatatttatgctgtgtaatctcttgtatggtgaatggtagttctactcttgtgcatttgttttggtaggagaaccggttttactttctctctggttcttgagactccgatggtttatttttatttttaatgcatgtattagtattaagctaacctatgctttgccacatggttgataatgacaattgaatttgtggatgctcattactgatgagttgagttatttgatgctgttgtaatcttgttttggataatacaagtttcttctgccatcctcgtaaatgtagttatgaaaccgagagagaaagagagtttgtgttggtagttcttaagaagtctaacaagcaaatgaagtattggtgtataactcaatttttttttccctcaagatttagcaaataaatagattctgattctgagcggaagctatctactagaaaatcataaatggaagttttatgttaatgaatcttgttgattgttttgtggagctagccaaaatgtaaggagtggccaaagcttggtgaaattgtggttgtggagtaatttatttatttttacttatgtcaagatgcttaaagaatctaatcagaatatcttgaatttagcagttacccatgaaaaaatgtgtttggttgattttgaaaatgaaagttttagaggcatgctctttctttctgttttaataggagaagcgtggtttctttttcttcaattaggatacataaagaatcattttacatagtgcttgttattcttttgcatttcacctcttatcactattattatcattgaacttttaggttggtcctttttctgttcatccaagtatgttatagctgtcaatgattgtatttctatgctctatcatatatgaccatgaaattcttcagaatttgcatctacctatgcttcagtctcagcttgtttttcatcttcttactgtcttatcctccatactcatctttagctgtgctcattaactaatatatttctggtgttaccaaattagctgctatattgctgttttccatttttcggtggtacatttattttggtgcttttctagtggagcacttcttttatttttgttgaatctgttttattcattttccagtggtacaattcttttattttattgaatctgtttaatacattttctttgattttccttttttgcagtcataaccaaaa

SEQ ID NO: 8973 - DNA, 2014 bp, Citrus sinensis
  Intron number 3 from transcript orange1.1g023410m (locus o range1.1g014487m.g) derived from phytozome v7.0 (chr-ID sc affold00125; pos 274223 to 276236)
gaggagaggtactcatcatatagaccttgcaatttgccatttgcttcatattgtcttgtattttggttcaaatgtcaagtccttaattttatttttataagcttcttggtatttcatttatgctttcgattgctttcttctgcttcactgagatttctttttgagtacttttcatttcttaaaatggagtaaacttgtctgtggagattaaggaatctactggatgtctgaatctgttaatttttctcttttgataagtttaatcaaagctagcaatatggaacagccttaaaattttgatgtgtagtataagtgcaaaatctgcagcaaataaatgaaacatcttgtcagcttatcatctccatgaagcccaaattatttcttgtaaaatagacctagcttttgtcgctagataacactttttttttttaaacgtcccctgctgtgctgatttaagtctttatcttttcaaagtctgctctacatctatatttttcattttgatattatatgcttttaatattggtgtttttagttggactacatattttgttaatttgtagttcttgggtgtgtaaagcctgtcagcctttttttttactgtaagcttgtaagttatttcaatatagaatatgtttttaagatttaagcacagaatcaaaaaaatataaataaatgttaatctaattcagtcaacaaggaaactaggatccaccatgtgcatatttatgcatgttttttcattgtgattaatgaatttgtgaacttgtctagaaattaatttatatgataatttatcattaaaatacttgaataactatatttgctggagaggtggagtcatcactttttctttttgaaacattgcatggaatttttttgggtcttccttggtgcaaactatttgatgatttaatcatcatatgcctcttattctgtaaactttttgccttttagacatactttttgtaaggtttttgttccgtttctgtctcttggacaatctgtccttgttttcgtagatttcttgtctcataatctgtaaatccttgtaattgacaaatattctcttgtttctcagctaaatagatgaataaataaataaagttttatttagtatccgttgaagatcacagccagccaaattctttgtaagttgatttttatagataacaaacctagtgatgtcacagataaacttctcaagttacaacgttcaacttaaatggcttgatacacactttggagcccataaaattataatttgaatggttgtattgaaaatacaaattcgtattaaaaaaaaaaacgaatttgtatgccatcaaattgaaaagatattctaggaatcaaataaaatttattttctctaacccttaattctgccaatataacatctttttttttttggataggagacagaaacttttatataatattggaacggaataaatattacaaaagtgaaccagaggtccacaaacttaaatcttccctacaatgtataacaccaaaaatctatacaaaactttgaaaaaagaaacccttgaaacccaagacattggaataagaatccaacccaacaaaatcaatcctaagctgcaacccaatcaagctgaatgaaaaagaatgaggaatcttgagaatccttggacgttgatgcccaaatagaagaattgatatgtttacacataacaattaaagcacacttttagtgattcaaaatttttacacgtaacatgcttccttataggatacaaacatatgtcatgtgctcaaccctgtgaaagaaattattaagtatagatgtctatcagtgatttggtgggtaattagtgtttagttacaccagcaaatttgaaatatgatttaatcatcttcttggtggtcagctcatttgccagaattccggaatggcttggttattatatataaattccatgagatacttcttttgatctaatgcttgaagtactttctaggctggcccttgttagtggattaaagtgggtgg

SEQ ID NO: 8974 - DNA, 1864 bp, Citrus sinensis
  Intron number 1 from transcript orange1.1g031826m (locus o range1.1g031826m.g) derived from phytozome v7.0 (chr-ID sc affold00088; pos 495660 to 497523 reverse strand)
tccacccactctttcttcaattttacagctttctggtatttttcttttgcctttgctctacatttttatgggcaatgttcttttattagattggttttgggatttagctgatttttattgatttgcaatgtccatagtcttgcaatgagctctgtttcttggaaaaagagaagctgaaagatcaatgtgttggtataattatttaattacttgcttatgttgatgctatttagtttgataatactcgttgagatagaaccttgtatatagctttttaaatggaccgtaaaccatttataacattactaaattgagtacagtttagtgtgaattgagctgaatatttcttagatttttttttttaatttcttcgcttgcaaatgtgggggcttcttttttcctatcaaagaacttctccacattcacctttgcctccttcattgagtggttgaatcagttgtatagccatatatatttcctttcgtttgatttatggccatagggagtaagagtacgatttaattatgagaaaaagatcttttcatttttgcttcctttacgatgatgaatttaaatcaagcattaatttgcaattacaaaggatagaatgtcctgttttacattatttggcattcttatcatttgtcaagttgttccacattggctataaaaggatactcaggtttttacatttaggatgggttatatcatctaaaaggctagccttttgggttggatatctcgatatcctagacttgccccccagcgtcaatatcaaccatgggttggttcattgtgcttatagtgctgtgcaagaactgaaatgccttttgggtaaataaatatgcgttttggtattgattctgtttctatctcagagcaatgaaacatggaatctatttatgctataatttgttagttagaatttttgtcgttcaggttttgtgctgtatcaaaaagaaatatacctaagcctcttattatgcaaactttctagtgactcgagtatggcagagtttgcagtaagcaaggtattctcttgtgaacatactggcggcgtctgtgttaaatgaaatttccagtcctgagagactattttaggcatcgtagattgtaattatgagagcattgtcattcttgttacagtttttgagtttattagatgatcatacaactcagcatatattgtgatgatcctaggtggtactgtctggagctttgagcatgaggtttgagccatctgatagtgatctctgtgttaaatgtaaattgtggaaggtacaattaattagaatgctaggatttgaaagcatccaatttatgtggttgaaactttgctgggctgagttgatccatataaaagggctttttaatttgtgacttcacatcatctaggtgactcttattggacgtctattggatgatgtttcatggagcacttagagtaccttatcctgatttttagtggcccaatatctaggtcttgttgtggtgctctatcttgtgcttccggtgcttccaattgtatcttttgtagttactgttgttacctctgcttcctttttttttaaaaacattttctttgccatgtgtttataaacttatcatcagctggaaaataggaaaattgaaaattataggcagtcgagcttcttggttaagttggaccattgttttatggactcgatgttggtatcaatacatatttaggggaggtactttaaacacagagatgatgctcttcaggataactaatttaacattttttatagctctgtaaatcttgtgtgtgaacttctaaccttgcctgctacaaagtttatgctgaacaccttgtgccttctgcagctacctaattgctgct

SEQ ID NO: 8975 - DNA, 2454 bp, Citrus sinensis
  Intron number 10 from transcript orange1.1g000779m (locus orange1.1g000779m.g) derived from phytozome v7.0 (chr-ID s caffold00134; pos 303421 to 305874)
tattcataagctatctgttgagcatcggtggccaggtcagattttctccttttccttgtaatttcaatttgtatttagcaaaattaaattgtgatctgctacattttgacatctgcttgatgtctgtttgtatttctacttctagtatgcttcaaccagactatttttaccttttctcatgttggctattgtttagaaaaccatttaataatttttaggaaatcatcaaatgctaaatgatctactaagaattggtcaaaattatttagcattttatgttgctttcctttgtccaaatattgactcttgagaaagcaaggttaacatttgaagttataaattgataagggcctgttcagtattattttccatttgctgttttcatgaaacaaaaatgaaatgctatattgaaaatttaaatatgcatttggtatcattttcaaaaataatcttgagaacgacaaaaagtaaaacacgtttggtaggaatagttcaaagaattattattggaataatttcattaactgaatattaaataatagttagtcatttttattatttagttagtttgattattttaattttaagaataaatttggtgatcttattaattttatttgtctaaagtaaaattataaactatatacatatttgatttaattaatgcacaaaaacataagttttccattgtataaaagagcaaatattattgtgaaggaaattgattgtttagatgatataacaacagcagcagcagcagcaacaataacaataataattctttatgataatatgattattgatgatgctgttattgtaattattgttactttgagagttggtagaagaagttttcattttggagcataacattggaaaataaggaaaacaagaaaaagttattttcccgtttcctttgttaaaagtgtagaatgaattttatgtttccaaaaatgttttcagaaatgatctatcaaacacataattaatgtttcctgaatttaggaaacagaaaatagaaattggaaacaataccgaatgcaccctaatattttgttgatttgtctttttttttttgcttaacctacttcgtataatgatcattatgtctagcttaaatcttttttatgcttactccttagtaaatatacaagctatgtataagttaaagttgtttcctatgaggaatttttctcttttattattgttatttatttatttttttactcaatcatgcactgcatctttccccttccatttgcaaacataaatttaacagaatctaccttccaggttggtgtgaggcggcatttgattcctagtgtgctgccctactgaaataactctaaccaactatgatatccccttgggtttataggaaaaatatacctgttatggttatcaatcatgtttacacaagttccctttagtgcacattcatcatggccttaagaatttctatagccaataagacttcaaataactcctttttgtttgtttttactgatggaaggttaaaaaatgtcatgtttcatgttagtatcataagcaggattgctgtctattggtccttttatccttctgataaaattcctaaacccattttcctttctaccatctagaattcccattagaactcgggaaagaaaataactttctgttggttccaatttggttttttattgttaagaatgaccttcaaacacattgtctctgctcatggaggtcgaaaactatttattgcaacctttaagcttttgcctgagttctgatacttccctttatttttgctcctcctgtgtgagtcttaacatgatcacccgtgcgccctttgaaaagaaactagaattaatggttttgatggccaaggttccttctgtagtaaggaattgtaatagtccatgcagggtttgatattgttcaactgttatgtacaatctttcatttcttttattttttaactctttttaaaaaaaatattaattcaactgctagatctcttggtatctccatgcacgtatctcaggtgatttcacttacttggaagaggagttccgacatttcactgttacatgggtgaaatacttacattagacggatcatttagtattctagtttgatgatgttcgatcgcttcaatgtttacaatttccattttaccgttttgtatacctgacttccatgtgtgttatctagtgactattatgtattttcctttttgatgtcatagaatttgatgacgattgataactaatgattaaaatattaagatatttttatctttttttcccgtttttaataaaaatgatacttagtttttggcattttctaatctttttctatgttttcccatctgtgtttatcagtaattttttcctttagtgatatgtttaagtgcatctattaagttggcatgtaacttaactcagttttgcgtacagattggtatatcgc

SEQ ID NO: 8976 - DNA, 1097 bp, Citrus sinensis
  Intron number 15 from transcript orange1.1g042701m (locus orange1.1g042701m.g) derived from phytozome v7.0 (chr-ID s caffold00072; pos 38566 to 39662)
ccataccaggtaagacaagacgatgtaattgcatgtaaggttttttattcattgtttctcttttcttcttcttttctataaatatgaagtaaagtatactttcaaatcctggaactagagaatagctgtatttcatgggaaaggaattttggatctgttgagctaaagtttaaaaaagaaaaaggaaagaaaaaccagtagtggtaatatgctgtcccataacttgatgttatttgggcataaaggccatcacatctcgagtggcttgtttggaatacatatgtgtgtatggcataaaacaagatgcttaatgatttttcaatggtatgctttttactcttttcacagggttctgtgctgaatcttctagctttagattggaccaatctgcaccttggatcggtttgatttctaattatgactagaggacatggatcaaaccaatgcctgcatagtaaaattaaaaacggatttttttttcaccctttctgcatcgataccctcattaaaatttatagaatcatagcattgctagtatacctatggtagggaatgctgtagaccccaaaattctaatgataggcgaccacaataaatgctcatctctaggctgtttaccattgctagggaatgaatgctttatttgtagttatatcaaatgaatacatgttttaggggacctcctttgaatcttacggttcaatgttttctttggtatgctatggttggtgtagccaactctctcacaatttctgctttatctcaagataccatttttcaacatccaacttctcatttctatgtttttgttcgctaaatagaaattgtttcaacatcctagttttcatatttacgtaaatacaaaatattggatgtttttgtgataggaaagttctagttttttgcttggtggaaatctggtccacttcacattattgattgatcatctttaataaaattttgagtttcttatcagaaaataatgatgatgatgatgataaaatccaatttatcttatttgggtttttcactaaattaacaagtcttttacattttgtcaagattgagtctatatctggaacattggtactgcgttg

SEQ ID NO: 8977 - DNA, 1983 bp, Citrus sinensis
  Intron number 2 from transcript orange1.1g036122m (locus o range1.1g036122m.g) derived from phytozome v7.0 (chr-ID sc affold00425; pos 79472 to 81454)
ctgcttgccaaggtgtcaagttctctgagcctcaggtatatatacattttgcatttttggttcaattgaagattacccagttgttatttattgatgtagttggtaaatatcatgtgctattgttaagtctgatttagttgtttgcttttggttgtttacttttctgggtttgtagttttgcttttggatgtgtggcacattttgctcttgttttctacagttaggcttttgaactcattgagggtatgttggtcttttgtttttttttttgagctttgatattttgatggcactgcaaaagcatttctaggtgattgggtcccattccaggtggtttagacatacaatgttatgcttttgttggagttgtaatgaatggaggctttcagatgatctatgtttgtattattttgagcatgtgaattcaccggaattttttttgtccgtagcacctgctattctaaatatagagtccttttgtgttctcttttttggggttttctaagtggaattattgaggaaattaaaagtaagaaaaaagattaattttgtgatcccaattattaacaaccaccgaaaactaaagaatcctcttagtttaggaatgttctactatttggcttggagcagaatagctaacatcaaatataagttagtttactggtcatgtcatctattttcctctattttcctgcagactgcttttacttgtcctatttaccaatttctcaccaagtctgtaacttgtacatacttcaaaacactttgctcagacattaatctgccatcccaggtgtttaaatctgttgttactgaggttgcatttcttaaaagatttaaaacttcttgtcatttttgtatttcttcgtatcctccagagtgttcatgccgaaataatgcatacttgtctctgtttatttttttcttatcaaataatacatattttcccctaaagagtctttaccaagaccccccaaatagaagagcaacctggacctcgtgcactgccaatggaccttatctgctaaatcagccacaaagaatatacaacataacactaataacttatgctcacctatttctgagcttttgatttagatcattgtaagaatttcaaaattttcttttgttgctgaaaaaaaaaaaagaatcttcattttcattttattttttatccaaaaaaagagagaaataaaactacatttcagagaagtaagtaaatacacgtcacttgattactatagttgcattgttatgtataaagtgattcagaaatcagacaaccaaaagattcttgctgcaggattttctttctatttttatcaagttttgatggaaaatgtttgcattgttcattcaattaaatcgaatgttgggcggcaaatggtagttttttacatgcttcctgggatgaacgttaataaaagcatataatcctcgcaaagcatatggactctcttggttgttaagttacatagtattcagatacccatttattttatttccatggttttgttttgttatgcatggaggcttgaattgaaagtttgcattattttaggcatgcaaattcaatggtttctcattgctccacaaagtcttgagggttcttctggatttctttttcctcttgctatgaatagatgaggaaatgcaatgaaatataggatatggattttgacttgtgagttgagaaaagtaaatccctccagcaaatttaaattgttaaactaatttcacagaatagagtgaaagacaaatattttatgggtcacctcagaagggattcttattgtagaaaatagagttccaggctcaactagcattctgcggaaaataagataaccattttctcctgataggaaatctcttgattttgttaatttttaaatgctacttgtctgccctcaagttttacatagacaaatatataaaagctgacaggtggttttgtatctcaatatattctctgtggcaggtcaa

SEQ ID NO: 8978 - DNA, 1388 bp, Citrus sinensis
  Intron number 1 from transcript orange1.1g026075m (locus o range1.1g024783m.g) derived from phytozome v7.0 (chr-ID sc affold00002; pos 1850704 to 1852091 reverse strand)
agctgtcgctgaagttaaagatcaaggaagctgtggtaagtttttttattgttttcatttactttttcttttttagattttattcgttacctgcagtactttaattattatcttaaaattatgaatgaatcgattgcggagaggagaggaaaggaaagggtatgtttggtattttaaggatgattagagttagaagaatctgcactgcttccggttgggggcagttgtgctaagttgaccggttaggactattactgttattttttaatcttttccatcaattagaatctggtttttgtgaatttctttttttctccgacactgttattatgattatttttttaaagtgctgtttcgttctcggacttttggcgagagttcggaggcttgggccactgtgataatcaatggtccaaattgagtattccttttttattgttttgtcgaaaaacaataaagagaaaaactgacaagaaattaggaagtgtgaaaaacaagaagatatcttctgacggaaggctcgagatattttctgttttccctcacgagaaaatgttttccaaatgaaaataaaaagaactatgtctggatggaatcttgtttggctgtcctgacgtggccagagcttgttggttgaacatagctgccattgggtacagagtggcgggcctttttaaaaactgtagtaatattttttgtgtgttcagtagacgtgaaaatcgtattcctatcacttttggtgataggtggtaacaccacaaaattttattacgtgtcagtgggctgggccgcttgtcagtgtgtcagttgacttcatctgcataattattaaagctctgaacaaaataagtgcgtttattttgtttatttgtacaggatattggtaattcatttcaccacctatgagcttcgagcttgatatcttgttccgttctaagagattttagggattagtccttagataataattattacgccataacttgtattagtcattgtcctgtagtagcaagttaattattttttttatttatcattaaagttgtagtatggtaaaacctgtcaatgagagatattaaacattttatgtcctacaagtcttttgcggtcttattcaacctcaatccatcattctgaacaaacttaataactcagaattatatgaagtgatgattttttttcccctacctaacttttgtaggtaataaatcaactgatgtagatacaaaacatattcaaatattgagttgtctaagtacttaacttggttagaaattcagaaagcaaattatctgttgctctctgtgtcgtgtgattctaaccattatttgattgtatctcgcttgaatgaagggagttgctgggcattttcaaccattgcagctgta

SEQ ID NO: 8979 - DNA, 3050 bp, Citrus sinensis
  Intron number 6 from transcript orange1.1g020475m (locus o range1.1g020485m.g) derived from phytozome v7.0 (chr-ID sc affold00264; pos 21985 to 25034 reverse strand)
taaagcaatctctggatcgtaattttagaccattggtaactggtattctctctctctctttctaagatttttttgtttcctgctgtagcggatttgttgtcatattgtgagctcaaattagtgaaacgcttctctactttatttttaatgggtcaagaattgtttattcattcagtgatcagctaagctaactttcctgtctactgcctgttttggatatattgaactgcttttaatcttacaatgaccttgcctctgatggatttctgtgtcctgtcaattatccgctgctgccttctgtacatgtttcttgtagtttcatgctcagcatgtgctttataggttgggacaatggactgcataataagaggcaaagattgttctaccttagtactatttcttatcttaaaatgtgtttcttttttttttttttggtggttgggggggtttaaaaaaaagaaaaagaaaaagagaacaggtacagatgcttctctctggttaagccaagtcaattactatatcctttgttacagtgaagacctataactttggccgcaggtaggggatgggtatgctgtacaccatgaaccccgtacctaattttagctgcggttttgttaaacagtcaaaatactgttgtatccatagttaatcatacaattggttgattacattgaaattgtttgtcactctgcactttctatatgattcgtgagttgcatgcaaaaaaaagttaaagataagactaagaatgactgaggaaaagaagagagaaacataggaaatttagcagctaaagaaagaggagcattggtgtcctgtcttgtgcaattatatatgtaagcatctataaaataaaatatagaaagatagccccggaataataaccaatactcatgtatttatatcttggaatttcgaaaatatctctccctttttttaacaataagcaaaccttattctattaaatggttattgattaaagtgggaattaggatactggcataaagagaagttgaaaacctaagtgtcttctaagatctcattagactaagtgccttaccttataggaagcatggtgtcatggatttttcttctattgcgctcatctgtctgtgtgtatcattctgtttctagtgtttcccaattctactcactttttagctggttttagtaaatatcaatcataaaagtagccttataagacattgattatcttcccaatattctattccaatagttttacatcacctctgatgaattcacaccactgccaagacatcacttcattcctatatatttcttcttaattcattctttgactctcaactgatgtgtaatgctctatgagctctgtttttgaactcctaataatgctcccgtcctgctaattctgtactttgatttgtgacattttggcaaatatatctctatatttgtcatggatgagagtaaaagagcgctggtatcggagctttatccttaaaatttcaaattgctttttcagatttgtgcataagagccatgtgtgttccattgaaattctttggatagaattgggtatgtctcttctttgctttataggttgtcttcacagattttctgccctgctgtctctggtttactacatcagaccaagtccaatgccagttttatgtcttatgtcttaagtccttgcactccgatttctatgtcagagggtctaatttcagagaatctagaggtcttggtaagattttgataagtatttgtagttggcttgtcatgatctgggaagtagtgtcagcatttgatgtggtgaatgatctggtagctgatagtgtaccgcacgctgatggtctgttagatttgacataagaaatggactgaatggcatcaacagctgggaagatctgaaagatacattaatttctgtctcaatgccaatacaaagctagacgacaatagaaaaaaccctatcaggtcactgtagccatattcatgcttgccttatacatggttgaggaaggataggcactgaataatttgcgaattcaatttgtgcaccaattatccttcttcttcttattttactctttaattttaaagcttccatttaggtttacgctagacctaggatatagaagatcatgaattgaaaaattacaacaacataacagtttgttaatgatcagttgctttaacaatgtggtagaaaatgagtagacatgtatgatttttacatgctaaaggtggttgcattgagttggattcaagcgttcatttattaagcaatccatgttccagttttacctgcttccgaattgaactgttaattccatcaagtgaggcaaaatgccatgtgattagtggaactgatagtagattagtagctatgctacaatcacaaagtttaatcccaagtatttgaggcaaattgacacagcattcattcatgaccattacgtaggtgattggataatgaaattactgtactgaaatggcagtctgaatgcagcaccacatcactatgatccaagactttggggtacaaacattgcaagtatttatcattattccatagattagttgtagctctcctgcttggaaaaggttacacctgaaaatctgttcttccacaaggagttagttgactattgaatcatatgagaagagctttgttttaaggccttcattatttttatcattttcttactacccatgccatctgctagttgcacttgcacaaatcaatggaaaaaacactgtaagtttgtagtgttagcaaatcctctaaatttggggagctgtcattttctgcagtccatgtttcctccattcattgggggatattttagtgttgtctgttagaagaattttccatgtagcttgttatggttagaattttgtgcctcagatccgtgaacaaatgtgtatatatttgcagtgtaaatattctgttgtaagcactatactggttttattgtccttttgtatgaatcttattggtacctctttcagcagtttttcagcaattaagcagtaatgtcttcaggacctgggaatatttt

SEQ ID NO: 8980 - DNA, 2118 bp, Citrus sinensis
  Intron number 9 from transcript orange1.1g000046m (locus o range1.1g000046m.g) derived from phytozome v7.0 (chr-ID sc affold00289; pos 199777 to 201894)
gccaggtattacttgcttgttaatcatgatgtttggattctcatcgttttaaatcagatccacggtaatttgtttttatgcctgttttcttctgccatctatttcatataagggctttttttttaatttttttaacatatttccaaaagagattagaggttttgtgactgctattctttactgatccgcgtctcatgaggatattagatattgggggtattaaaatatttgttctgcattgtagacctaccaaatgccaaatcctagaaggcaaacttagctggagatgctaacaacaaatattttatttcataaatgggttagtttattatattaattttttatactcctattatttgacaaaaatttgctagaaattgtatatctgattcttttgggctgtagagagtattttgattgtataggagctcagtatacagatacattttgttcaccttaaattaagttggtcagcatcacactggttgggctagtcttatttaatttgttgccttattaaagattaaaaaaaaaatgtgttgtgctgtgtgtatacacacaacactgttaatggatgatagggcaatatgtaattgaataggaaatcagttgaaccaggggttgtatagaaaatataaaaacaataaattaaaacaaaaatgacaaaatagacttatcgatgaattgaaactacatttcttggatttgttttatataattgtgatactccacattaatcagttaatggataattaattttacaaccccatgattgaaaatgataaaagaaaagaaaaaagaaagtttaaaaagtcattgttttaaggtatgcatccaattttctttacacaatctgcaaccttatagtctgcagacatgtgtgaagggtatttcttgtttttctgttctttttccttttctggatgttgaaggcggaacttttgtataacttttgtccttctgaaaattcctttgatttatttatcatcatcaataaaaaaattctgcccttttcaaactctctagttgttatacttgttctaatttgcaaccttaaatctgccatgcgttttcttaaatatattgttggatcatcagtgatcatcatggcaagttagttgagcttcgatggtggttcttctcatggtcatatcttgtatcttagaactcatttttctcgcaggtccgtattaataattttccataatttatgttttttgtcaataaacaattacagcacctgtgtttttgtatcagagttaaatgttttcgtgtgtttttgtatcatagttgaatgtaaatatagtattttatattaaataccgactcatttctcatctttaacactcattcctctctctcatttccacttcaaaaatttcttcaagttttaaaagccccaactctctcttacgtctctctttgagtcctcgatctcatctcacaggaaaattatttgtgagatttttctaccatttggctttgctggataatctgacttaacaattctgctattgagatgtataactggcaatgttgcagtttatatctattatataattttaaaaaagaaaaagaaaaatggaacagaaatctggacgatgcagcaccctgcctacagctcacactacaatcaaccagtaagttaatcccagtaatcgtgtttagtaatgtcttgaagagaagctgtgttttaatgggaagtggaagacattcttgtcaaagccatttactaacatgtgattgtggttttgagattatatttccaataaatacttgaattttcctggaaaacatatcagctgaacatgtatccttattttatatgttcggatattatatgaacaacgttctcacaaaattttaagcttaaaaataatttttgaatactacaccaaatagaattttaaatataaaaaacagaagctaagggtacaattcaaatatttggtttgtaatcacaaaccaaattggcctggatttacttgggttttggtgtagtatttattatatatgtgaaaggtttatcatgttgtcattctctttttatttgtttgttcatccatggcctttgtcattaaaatggaatttgaccttttgtctgccagcatagcacaa

SEQ ID NO: 8981 - DNA, 1351 bp, Citrus sinensis
  Intron number 1 from transcript orange1.1g000090m (locus o range1.1g000090m.g) derived from phytozome v7.0 (chr-ID sc affold00001; pos 1969781 to 1971131 reverse strand)
tttacgattttgccatcaaaaccctagctttactggtatgtccaaaaaacctcaccttgagtatctgcaatagctcacttgaccctggaaattggagctatgcataaaccctaattttgatttatgttcagtttaggttgttttttggttatagattttgtgatttagtctttgaattcgtggttagcaagtcaaattctattgctgcagttcggaatttgtgtgattcactttgattattgtgctttttgtggacatggtgttgtttgttctgcttttgattgatttttctgtttcgctttggtttttaactgatcctggatttcggttcgtaattttaggagggaaaaaattcgaattttgaatattttttattgatttaggatttgtacttgcagatcaaagcgttttgattaatctgtttctgtttttctttctggctgatgattttgggcatgtatttgtaacttcttagtggttacatctttgaaatgctagcttttaattatttttcccatttgaaattctttttatttgaaattatagagtaagaatttattccaaatttttatatttatggcctcaccattttatttttgattggatatttcttgtagatgggcggcaactcctaattattggttatgttcaactcccattttagttagggcttgcaccctttacttggtgtgcattgttaatgctgctgctccaaacttttgggttgtgtcaattgaatggtgcaaagttccacaaatacctggttttgatgtgtctgcaatttagagttaacggttttgacctatcctccaaatatcctgtgaaattccatcttggatttagatttgacctatcctccgaatatccagtgaaattccatcttgaatttagatttgacctatcctccaaatattctgtgaaattacatcttggatttagaactattatgcagtatattatatcaatagggtgtatataagaacgtttttggtttcaatttgcaaatttggaatatgctctcttggttatttatgtaattgtctgtcgtttagttaagcttcccctgtttgactttttcttttaaaatatatgcacgtgcttaatacattgcaatacgctttttgacaggtcagatagcactttttgacggaagtctattgcatttaacttgtagatatttaatgcgtgaggtgataactgagttcattgttttagtatccaatttatatgtctatttcttagtgtggaaattgtttgacttcgtagatcatagtttccttgctttggctagacctgatgcagcaggcgttttttcaaatgcagtttagcttgtacagcttgtagtggtttg

SEQ ID NO: 8982 - DNA, 1695 bp, Citrus sinensis
  Intron number 9 from transcript orange1.1g001709m (locus o range1.1g001709m.g) derived from phytozome v7.0 (chr-ID sc affold00057; pos 168891 to 170585)
agatcatataggtctcgatttcagaggtaatgaaatgctttatgtacgtacatatgattatgtctctctgcttacaccttactcaaatttctttcgttaagtgaaattacatgagtcatatgttggataaatggaatctactaaaagatacaggaaagaaacttagttgtctgaagagtctggaaaataataattgtttaaggtgctgctaaagttgcttaaaatgatctcaaatagattgaagatcacggactgaaaacttaagaaactatgaattctgtttacttggaatccaactagtactggtatgaaatgtcaacactgctacttctattatcatcttgtaactgtaacttttgaagacaccagaattatgctattgcggtgtttacaaccaccatcatggtgccactacctctgctgttgtgacgttggtggagctagatttgaaaattgtagaggagtcgaagtggaaaaaaatgaggggactggagtacaaataattttattttcaggattgaattataaatacatgtttatttttttcaaacttgtgggacctggcctccaccagacctactctacttcttttttgtcaccactttggaaattaatgggtgtttaatacgtcattatcttgttttaattcgagatgatgacttcaggacagagaatattagataacaatactatttgtgacagcaagaaagtagtgtttgcctgtatctggtatgcagactcgtagacgtctccattttattaggcattttctcgtttcctttttttcggtgcatgcctctgtgctctataccatctacaatagaacctcgttaaattaatactcgataaattgataaacttgatcaaatagtagtttttgtagatcccaacttggtgccaatatggtaaattaataatttgataaatttattagataataaataaataaataatcttatttcctatagtacccaattaatacataaattaatcaataactaatttgaaaatttctctgttgtactaatataatgctttacatgtttcatcagtcgctattgctctttttacactttttagatgaaaaccattgttgtattctatgtgttatgttaggagaaataagagaaagatcagcttaataaactttctaaaaaaaagtcttctctaatgagttaccatgtaatcttgatctagtcaaaggattatcaagtgaccgattcactaaatcaatatcaaatcagaatcgtatgttacaacttgacagaatcattacattctctaattatattacctttatacttcataaaaatttccattatgaatgtgatattaactttataaataataaattattaatttattgatgaattaataattattaatgcgatatattaatatttgctaattaatagatttttcatggacccaatactattaatttatcgaggttttactgtattttactgctttttccaaaaccctacaattactggttctcttgataaaatttaagctagtttgttaagatttacatgaagtattaaatgttaatgtgattgtggtaaatcctcgtctttcatatttttaggaatgtttctctgattattcaatttgagcaagttttcttttgtaattagcgtgaaatgttattgttgcaggtctaataattgattctttttccttgtagaatct

SEQ ID NO: 8983 - DNA, 985 bp, Citrus sinensis
  Intron number 8 from transcript orange1.1g011450m (locus o range1.1g010330m.g) derived from phytozome v7.0 (chr-ID sc affold00045; pos 691800 to 692784 reverse strand)
ttctgatcccaaaagatatcaggtttgaattctttttagcaagttcaattttttagtacagaaattctctgaaattatctaaatatattttactggatcacttgtcttatatttataaaaataaggatcgacaaaaatcattcctacaatcaatgattcatatacgtaagagcttataatgacattgaaaacattttttaggagtgggctttgtttcactgttggccagtttttggcttttctaaatttctaattaattttagatttttttttaaaaaagaaaagaataggatcctctccttgtgttttcttctctccttgccgctcgttgtcaatgaatggccaggattgagttttgtatttgattttgacaattaagctagcatttttcactttatttaccaatcaagccagcttttttcaccagattataaagataaggagaggcaaggagggggaaaaaaaaacaagaagaggttccttacctaaaacaattgggcccgttttactgtttcctatccaaaaacaattaaaaaaaaaagagtaaaaaattctgattaatttaaacttaaaattttattgatgtaggtttgtacatttcatgtcttgtttcacaatcttttacaagatgtcaagacgattctctaattttcacaacatttttccagtgttttgagaaacttttcatgatgcatattactgtcttcttcgtctgagacattaacattatgtttagggtgttggttcaagttgcatcagtaggttgctgttagtgagtatttggcttaaaaccttacggccaattttagatttttttttttaattttaatttagttctgtgtggttaagaaattctccttgccagctgaagtaaagaaggttgtttaccttgtgtggataatctggttatcatgacaagtttctcatcctctatgttgtcaacatggcagtgatccagaacgtgcacttgtagaggaaatagctt

SEQ ID NO: 8984 - DNA, 1654 bp, Citrus sinensis
  Intron number 6 from transcript orange1.1g023252m (locus o range1.1g015865m.g) derived from phytozome v7.0 (chr-ID sc affold00176; pos 190420 to 192073 reverse strand)
ctctcaaaatagtcttcacagattggggaaaacaggttttgaatatacaacttttcttttacatgcgtttattatacttttactttttggcacttgctgcttcactagattgtttttgttttctaaaatcaaacatgggttcgcttttgttttataaaatgagtaaaataattggaatgagactcgaatatatgttttctcatttagaacaataaattatattttcatccaacattttaattaattactattttgaaactgatttctatttagcaaaaaaataaatatataaataaataaaaaccgtggcaaacaatttttagagggcatttggtactgtttgatattttatgcatttgttttagagaagaaaaatagtattttaattctagttaattattatttagaaataaaattatgtttgtagcttgttttcaaaatattattaattatttaaaaataaaaatagtgaaatacttttagtggaaatttttataaaacgtgctttaacacattcataacctaaggggaaagtcatctaaaacatcaagctcataacaactaaaatagaatgacataaaattatattttaaagcaccaatcaaactaaataaaaacaatctatttacaaacaacttcgtttcttttataagaaaaaaattattaaaaaaatgagatttgcatcttatacatttacataagaaaaatcactataaaaatttaacaaccattaaaaaaaaattatatgagaggtaaggagacttgcatagagagttgagctttggtgagcttgcatagatagatgacatttgataatttggaaaagtgagaagggaatttgataaaggttgaattgaatgtggtatctgagtgctagacatggtttgtaggttaaatgtttgaaatttgaaatttacttgtttgtttttcttaacttatgtttgatttttaaaaattcatatcttaatagaaaagtaaacttttgtgacttttatttaattaagagaatgtctgaatgagaagtaaatattatatttcaaaaatatctctacaaaatatatttattttttaaactataaagtataatcttttttgttttaaattataagaatataaatcaaataaccatatttaagattttttatttatttataaaaacagacaaaagttcacttatatttagatattaaaaaagaagtcatttagatattcctaattaaacccattcaaattaaaaaaaaaaaatacacacaacttttcttctacaggcaacttattggttaccttaaaaataaagaaccgcttctacaaaagtggagaacaaccgttttgcttcatccaattttctttaaaacagtgaggagatacagatatttcattttactaattctccatttactgttaaaaaacatgcccactaaacatagtttctaactttttgttcttgcaaaatgcaaaacacctaatgaaaagacaattccaaacacaccctatctttctcttgccttattttggttttggaaaacagtgaacacccacttaatttttgtaatcgtgaaaaggcttttggcatgcaacggcaccggtgttgacttgaatttgatccattgatactgtaggcatcaaaagcaagagagagaatctttgaaggaga

SEQ ID NO: 8985 - DNA, 2469 bp, Citrus sinensis
  Intron number 3 from transcript orange1.1g029616m (locus o range1.1g029458m.g) derived from phytozome v7.0 (chr-ID sc affold00360; pos 61960 to 64428)
ttttgaagaaaaggtttttgacacggttgttgaaggttgacacttacaattttcctttcctctcttttcatcatctctggttatattgataatttaacgcactgtatgaatcaactgaatggatttctgttcttgatgttgctgttgtttgttttagttgatgtttgtcaacaagatttcttagtaaaatatgtgaacaaaaatctatgtaacgtgtaatgcgtactcattgaagcgcatcccagtgccttttggcctgtccatcattaagtcaaaatataatgaataatcttagttttgtggtaaactttaaaatcaaagaattaaaatgggttttatagttgactgcaaaagtaattctctagcccaagaactagaggaacaatagtttttttggggaaatggtattggttatgattttgggttgcgaaggtgggttataagcatcaaatttggaggtataggtatatactttgcctctagcatgggaacaattacgtgttaggatcagaaaacaacatgagtcagtttagaaaacagactaatgtgaaattgattgatttttggtcctttaaattgaaaagccagattatatttgggtcttttgtctacaagtgtatatggcagatgtagaatacttaagcctctgggatatatctgatggaatactagagtactggaaaaaagcaacagtttattgtttccttaggattgtaaggtttagtgggccataactttgaactcaacttgctaagcaggtttggggtttatatagatagccaaatcaataattctaaaacaaggctgagcctgaggattttcaagagtgtattaagacttcactccatttgtcctttttaactctgtccagggggatcgttaccaggctggatcattgaatctagatccagcaggatgttcttgaagttttttaatttagctgacttcttcagaatggaagctataactaaatccaggaaatatttagctctcttttaatctctacacaataggcaatcatatcattattgagttggtcaatcatctaaaagaactgattgagaattccattttaactcagagtaagcataaattaatgagttcagtcaatcatctaaaagaactgattgaaaattccattttccattgcttttcttgcagcatttccataatatccattggttcttttatagcttctagctctttgcaaaactatatgaaaggaacctttcaagagctgcaaaaaaattatcagaactgaaatgactgaacagttgggttttagtggaacgttcagttctttttgggtcagctaatgttggttccctcgaactccaaccaaaacttaaaataggtataactggctgcaaaccagcttataaaccgaccggttgatatttctgtaaagtggttcaagaaagcatgaagcattcggctttctgttcagctcggcttgctgagaaaacaaatgaaccactgtttgtccacccctgcttattggatagactgtcttactaagaagaggttggagtgtcagtgtcttttgtacttatggacgctgcattgatccgtaactttgattttctcactacttttagcatgttgcttaattgtaataactacttaagtacatttagtttcacttctacataactgctgcagaattcttctcctcatctgtgaatcctgcagtctctgagtgaatctctgacctcaacaataccatatattcctggaatgtttatcagttgcttggtctgtgattctggcagcagttcgttatcatttgatcaacattgatgtaggagcttgacatttatcttagaagctttgcaatcagttggacctatataatgtaattgacttggcatgaaagaattccgaatgagtttaagaaagttatttagagcttacttattctaaccaatcatgttttgatcatgataacaaactaggatattcctacatttgagtgacaactgaagaagcttctctgaagtctatacctgagaattctgtcttactgctctttgcatttttaaatatctaccacaccaaaattgctgaatccagtgagagttgccaatccgtctacctttacaaactctcatgtttaataagtaatattttttagtaatttgtgggaacagcaatttttcaaagatgctttccaactcatcccatgactattttggctttcgtagaccttttcatggagacttttgaagcttgttgttcaaattaatcagaagagcttttttcttagtagttttagacatctgagacagtgttcatatatgagtttgatgaaagctgagagagccagattgtaaagcagttttctccttaaagagtcataaatgctgactcatttcttaaaaatatcttatttttatttccatattcttgtatagttgtttgatttttgtgttatataatgcagatctcaatactcgagaacagcctttt

SEQ ID NO: 8986 - DNA, 1841 bp, Citrus sinensis
  Intron number 2 from transcript orange1.1g002773m (locus o range1.1g002757m.g) derived from phytozome v7.0 (chr-ID sc affold00254; pos 121525 to 123365 reverse strand)
tggctgcaggctctcaagtcagtgtttcaattgtcatttggtaatgttgggatctttattgtgaatacatgcctatttgtgtgtgttctttgatgctaatgtttcttaatgatcaatgttttcaatggtttgtctggtgcttgaaatttttctgatttgttaaggacgtatatttaactggaaattttacgtttttgaatttgtggtgatagatattttgactaggtgctggtaatttttaataaattaaaaagctcgtttcaaaattcctatggtgctagattttttgtgatattggcaatggttgtttaaagtgcctgagacttctggctagtaaatggaaagaaattaaagcagaatattaaccagtgcatctactagcagaaagtgtttactttttgctgtgtgagttgtgcttcatactcatccattctctttagcatccgaacatgtatttctgcattttcgatgtttgctgttgcaccattgtggttgattcatgtgacaccaccagtgtgttaggaaatggatgcatgtaaatagaagagtttgattattgtgcctttttgccgactccagaattgaacccacgattgccaacctctgtgatttctgagatggattaatttttcctgattttggtgattgacaaatatttgcccacaaattttgtgcttttagtagtccatttgatttgaattctttttagcacttctaaaaaatgggcgcacatcatatttagggagtctttaatagtgaaatgattatggatgcaaattactagttcttagtatcatttttacttgtgttgagaaattaattcttagaatgtaaatatgtgatattatatttaataactgagctcatccatgcagtttaatctataatatgctttaagcaaataaagctaattatttaatctctgagttggcattctgtgcatgatacataaataaattttctcactgaaggaatttattgattgcatttgaagttttggttgttctaagtgaattttctttagcggtcatttgatggaggcttacatcctgagtaatctagtagacttttaagtcaaatccaatctagagggacctagatagtcttctcagttcagaaatcttcaccagacgctacaagttgtagcaactgtggaatctgagaatgctgccaaatctatatcaattatttacttcccccctcatggctatcacatttttctggtatcaatacactgttgagcaaatagtaaaccttctgaaatgtgggaagtctatctgagttgtctgcattttattttgtttatcacaatttgttgcttaacatttcctaatgacccataaagatttataaaagaacagagataatttttcactagctcttgaaaatttttaacgagatatggcattagatgtgtgaaccatagaagcaatattctattggtccttatagaagatctacagtggataatttattttccattcatggggttggcaggtggatgggttgggggtgaggaaaggtactgaggataggtggagaagcagggtattggggtcaggtggggatggagcctttcacttttttatcatttcccgctcatgatatttttagcttatgattaaatttgtagaatgcaaatctattgattctattgcgagaattaaagcttaatgaaacgttgttttcagagttgtgtggtagtaatttatgaatcaatttgatatatttttatactaatgttatcatttttttggtaagctacaaaaggaagttgtttaataactgtatttcatttaggcacagtgatactaaagttgcagcaaagaatagaaaaagct

SEQ ID NO: 8987 - DNA, 1650 bp, Citrus sinensis
  Intron number 1 from transcript orange1.1g003240m (locus o range1.1g003176m.g) derived from phytozome v7.0 (chr-ID sc affold00013; pos 295105 to 296754 reverse strand)
gttttcttcgttctgcaaaccccaactcctcgcaggtaaaagcttctcttctctcgtgctactattacccactaggtttttaagttttaactcgttcttttttaaagaaaattctcgctttttttttttctcttgcaattactaattgcatgtaaaaaaaaaatcaaaatttttaccacttatgtaaactccccctctggtgactcgatactgtttaatgtactattaattcttgaaataatttaaccatgtaatgaagttaattagtatactctcatgttcaatttgtagattggtgggtttttgctaaaatgtttcaaaagttaatggattttgtgattcaatgaatgtttgtttggttgactttgatagtgaactttttttggctgacctgctgtggggatctgctgacccttatggtgtttaccttcatttttatctggaaattgggtatagtgattgtatgcattctatttcgtcgctggatttggtaatctatgagttgtggttgattgaaattgttttttttttgtttgtatccttgtttgtatactgagttgtggcctttagttatgcccttggctagtgtgcatgtgcctgtctttttgataaacaggttcgttatgttttaacatgctaacattgatgatcttagagatggggaataatacagtaaaatcttgctaattgtggtccgggatttgattcttcagtgctgaaaacctgcaggaaaagccgtgtgtttcctgcctttcaaagatcataaggttcaaggagggccccagtttcaaactccagttcactaaggctccatttggcagctactgtaaaataaaagctctagttttaaaataaaagttcaataataattttgacaatggtaataaatatattataggatttcattaaaaaaatgtgaaataaaatcactttagcttccaaaatgcagctgcaactgcaagcctgcaagtatttaccaaaagcattagagttgtagctttaaagccccaacacccgcttaactttaagttatttcttttcttacactaaatttagtgatttattataatttaatttgatgtggtgtgacttcaagttttgtacaactgtttatcagtggcatctttgcctgtggtatggttggttgtcaagctttatattgagaaacataattactactataagctttgatttttatggtagagcggttactaagattttacttctcagttcccagaaaaagtactcacgaccaacaataataaatgtgtcatcatttgcataatttagtagttccatctgtcctgagttttatgtttgaagtaattcaatattatttaatttgggtgttgatgtcctgctgaaattcgatcctttcatttatgaatgtcaacatcatttagaacttcctcgttggaatattcttcaatagtgatcataaaatgaaactgtgtttgtcttcacatgtctttacattgtaattattgtactcagcatgtcaattttgttgttagtattatggaatagcttagtccaagaatcagttttttatgatagaagtaaaatataactggataattgtagaacatctttttctatgtaacatgcatctcttctggttgttgatgtgaatttcagaagttgtttgca

SEQ ID NO: 8988 - DNA, 1650 bp, Citrus sinensis; identical to SEQ ID NO: 8987
  Intron number 1 from transcript orange1.1g003234m (locus o range1.1g003176m.g) derived from phytozome v7.0 (chr-ID sc affold00013; pos 295105 to 296754 reverse strand)

SEQ ID NO: 8989 - DNA, 552 bp, Citrus sinensis
  Intron number 5 from transcript orange1.1g037068m (locus o range1.1g037068m.g) derived from phytozome v7.0 (chr-ID sc affold00005; pos 1609020 to 1609571 reverse strand)
gcactgtaagttatgctttcaatacatcagtcatttctcatccttctttggtagttttaacattgtggaatttctaggaacaacatgcgatatagtatcacatgtaactccttgatgatatccctcatgatgattttgcaattttttggaaaacactgtatctttctaccatataacatactatattgtctgtttttttcccctttattctttttaaattaaacttcttatatagtagtttttaactctttcatttccaaatgtcgccctcagcataatatatactactgcagtcattctaaactgtggaaaatatattaaaatctttcaactgcttgactaacactttcagtctttaacaatatctttgaaattaatttttttaaattaattggagattttaatatgtataacttgtacagtcttataggagttctggtatgttctgttttactgttattttcaattttgccgtttggttttcaaagttattaaaaagttacgttgcatgacacaggaagttgctgtgaagaagtttttggaccaagattt

SEQ ID NO: 8990 - DNA, 1241 bp, Citrus sinensis
  Intron number 1 from transcript orange1.1g036260m (locus o range1.1g036260m.g) derived from phytozome v7.0 (chr-ID sc affold00397; pos 59725 to 60965 reverse strand)
cagtttttttgtcatttctggttttcatgattttgtacaatatgtaagtttcgttttctagactttgctctaattagtattgggaaattttgtattgcacattgtaggggtcctcaaatctattaaattggattagggggtctgaactcattataagggttgtaaagggtccatatggtattttctcttgatgttttcattttttttgggtgtacagatttgatgcatcaatgattctttgattctgatgtctaatgaaaatgtatgtttatattgcattgatgaatttcgtaatctgggaatagtagtaatcatgtgttgtatttccatgcagttgaaaccttcttgattttctgaaaaaggaaaattcttaatttgataaagaagaatatatgaatttctggaacaataaaaactgtaggaggcaaaaagatatccttgtggcattaatgaattgcttgagacaaggtttaagaattttgtatgcttttgttaaagctataaaatggtatttattatctgtgttgttacaaactaaagtacttgtgtgctttatgcaatttaaaaatgttatgctatgtgttagagaaataaaggtgtcaagaaacagtgaaggcttttgttgctttacttaagatgaggttcaagaatattatatgaactttagtgaatattatataaactttagtgaatgtttgcatggtggctttgatcttgttgctgccccaaactgactgattgaaggagagaattttgcagctagatcaagcttctttccccagattaacttctgacatggaccaatcaaatggctgttgcattcttaaaaaaatggttcaagttttccatagttatggtccacttatacagaatctggagaaatgaatatatgaattgtgattatatcatctgtgaaggcaaggaataatccatggaattatataagaagcattgaaactgctttgttgatggcctgagaaatgccgataacatattcctaagaaagttgttccttttagttcagtccggtatatcattgaatcctggctagtggctacagccctgcaagtagtagggattgaggggcttctgtgcgtgtaagaatgctcttgtatttttttttaaaattctttttaaatcactatggcttattaactgttgaattgatcaaatttcgcaccgtgttttcagtttataacatggaagagtgcttgcaagttaagttggaaaaattatcaccc

SEQ ID NO: 8991 - DNA, 727 bp, Citrus sinensis
  Intron number 1 from transcript orange1.1g019985m (locus o range1.1g019985m.g) derived from phytozome v7.0 (chr-ID sc affold00018; pos 821396 to 822122)
cgacgagaagaccttagatcgcttgatttctactggtgagtggcgatagactgatgaatttgcatattaccttgaattcgagggttattttgggaaatatctaagttattgtgaagcaattttcatttgatttataatgtgtttgatcttcaagattgatgcatgcaaaatcagtgaaaattgcttctgtaattgtctatcttattatcttgtttccttggaacaggtgaaaatgcttttcagacaagcacttaattagtattagacactcattgattcaaaagcacttgaaatgttttctgatgaagaacttgtagatattttcaaaaaagattaacacataacaacaattaagtgaagatacttttgttttacaaaaaatgtttgttgttctagtttccaaatggttttaccaaataaaaaaaaaggggagtttcatttaaaatcctcctttattactaaaaattaaagtgcacctaaatttattgatatattttgaagaaaaaggaaatagaaatgtatatatttgtaatatctgtctttaacctccagtgtttcttgattctgtttttataaattttattcaaatattaagatttttttttttgtcactgtaatgtgatacaagagaaaaacattaggcaactttagggtatttgagattgatacttgtaactttgttaaatatgcaggagagagtgaaacattcttgcagaaagcaattcag

SEQ ID NO: 8992 - DNA, 466 bp, Citrus sinensis
  Intron number 3 from transcript orange1.1g029556m (locus o range1.1g024317m.g) derived from phytozome v7.0 (chr-ID sc affold00003; pos 2010420 to 2010885 reverse strand)
gagcaaccacgttatacgaaaaatcaccaacttaggtctcacctttctcttgctatatcaaatagctgctcttagttgtttataatagttggatttcctttatgcatttttattaaaacattaagcttaacgcactgcctcactcatcgcattgtgagcgagcttgtcgcaaaattcaaagatgggtcatttgtagctccctgttttaaatttaattacatagtgcagggtattttccttaggggcctcgaaaagtttgctggttttgttgatgggcgtgatttagtttctgtgctgtagtgtttatgttgtttggctgctgacatgtccttaggtgtgacgacaattgctggaggtggctcgaagaaagagggccgtgcagatggacctgcacagaatgcgtccttttcaaatgattttgagttaacttttgttccccatatttgtgctttactgatttcagatc

SEQ ID NO: 8993 - DNA, 1259 bp, Citrus sinensis
  Intron number 2 from transcript orange1.1g000108m (locus o range1.1g000108m.g) derived from phytozome v7.0 (chr-ID sc affold00005; pos 216564 to 217822)
ttgcttgcatacggtgatagggagcctaggtgagaaccattattagttcatactcttgctgttcaattgtgaatacaaaattttgttttctgttgctgaacacttgaacattgcttaacgtattcagttaaccagtttcacttaatgcaattttccactattcgttcatggaatcttataattaggtgatttgcaggttgaggttcaaatgtttgactgcaggtctagttagacaatgtcatgcaaatgtaagagtatttatcaatttggaaaagaagaaatctgaatattcaaataatgatttgagttattctgttaaaaaaatgaatataaaataaagaaaaactatttctcaagtaaccttgttatctgattatatttgttgtgagaataatggtctgtgcataatcaatttgaaagatgcggtagattatttctacaactatccaatagccgttgcattgtagatgtcatttttaatgcattttaacagagttttgagattatttaagactggcagattggcagatttggagggattaatgatttggtttttgaattttacaaaagtgaggatccatgtatgttattctgttgaataaaaaatgtggcaatcaatgttaaactcaatctggtagttagagatttaattcccttctttttattccatagcctagttctactaatgttaatttctagtaaattaatgaaagaaatccttcatttggccataacccaaaacttcaaaagttgggtattgtcggcccttctaatacagtgctcttgaaattctcaaacttgcgggaaaagttcgtggagccttccctttaattaaagagtcaatcattatacttctccattcctctatttctagttatcaaaagctgtcgaagtttagagcatggaaatatattgcttatttttctcagtctgttgaattgagggtgataatagtaattatctatgcatagacctgtatatatggactttcctattgttttctgtatgttgtggctctccctttttccctatctggtgtgtatctccctaccctgctaatttactctgtaattatgtactggtttaatgtgtgtatcatatatttttttctactgtccatgcatgttgaattttaatgcttatcctctgtctttagtttaaacaacatcaagctagttgaagatgggttcaaaacatattgttttcagtaagctatgcgcttactttgattttctcatctgcattcactgtctagagag

SEQ ID NO: 8994 - DNA, 2651 bp, Citrus sinensis
  Intron number 1 from transcript orange1.1g041052m (locus o range1.1g041052m.g) derived from phytozome v7.0 (chr-ID sc affold00006; pos 2707816 to 2710466)
accgtcttctctcctaagccatttctctcttcccggtatttctctcacctttttgtttttttgaatgagctaaatttgcaaattctgctgatttatttatttatttatctttttatgctttaaatttatttttcattcatttttttcagttaatggaacaattagcatttttctaactctagtacgaactagttatggttagtgttacaagtggagtagatgtggagatgtcaaattagcttgttccatagttgtgtgtggaggtcaaatggttgaaatttcgtgatagctacaaagttttgtggttttgagatttggaaactgtctgtttctgcctgtatttactgtcgcaacggcacaaatattgcgattcggatgcgtgctttccggcattagcaaaattgaatttaatgtagcttgtgatgaattttcacatttaggatcattgaacggatttttgacttaatttgcttttctttttttgtggtgtgtgaaaaaagatgaaattgcgattaacagtgaggatcgtaaactatatttgcactgcttgaaggatccatgctacagaacgcaaatagtttgaaataggtccatagataagtttatttgagtcttttttttcctaaactctgattcatgttttatcacttagtttacttataagaatttgacctcatttgctgccatgttaaatctaagaagttgcatatctcctccattcaattactttcgttggtaacgtgggtcacttatggactgacttacatttcaatggagctgagctagattcttaactggtatcctaatatgctccagcatattggaagcacgtaaattccaaaagaattgagctgactttgcccagctcaggtacagattcaaggaattttggactcgaataatccatacacgtttttccatgaggattaagattaggttgaggtgagtgtatatcttcacaggcagttaacaatggtgcaacaattgtagcgggtataggacacaaatttcacaattttagggaaaagattcctttatttgcatcccctccagctgtaagtcaaagaaattggataattgcctagttcctgtgttggcctgtaaaaaagtaatgcaatgggcctatgcccccgtcccatcctttcagactctatcaccaatctgtcttggctgcaggcttatcagttctctgcttgttagtagttgccagttatgaaaaatagtttactgaaacgttggtgattaagtggtctagtttattcactgaaactgcttggtgtaggcaatcccattttctacactatattgaggtatgggtttcacatatgcctccagaaaaacttaaaatgttggagaaggcttatctaattcttaacataatacttaattttaaatggaaggcccaacaataatattggagctctaaccagtgcttcgaatcctggcccttttccatttgagcaatatgtttagatgaatttgtcaaattgggtgacggaatgggatagtggaagcgaattgatagggtagataaacactagatattgttctagtacgggtctaagccaacgcgattagattatgctctaatcgaggtgtgattagatcttattctaatctaaatgactcaatgagattttaataacgctttatgtgagattagatgactctctaatccaaacgactttacaagagagattgttgatagataatcccaaagggaattctaaaagttatgaaataataacaagacctccctgtttataatagggtaaacctacttccccaagttaacttaaaaagagaaactaaattacaattataatagaaataaaaaactaaaacacatactctaattgactcgaattaaaatagaaactatcaaaagatctaaaataacaaaatcctaaagtcctaaaataacgtcctccatcattgggtatctttgtaaagaatgctatcccaaacaccgtaaagagaagatagtgtttaagacatcatagatggataagtactcccaacattgaaagcatcatctgaactttcattgttatttcaaacagaagtgactcctgcttgattgagacctgaatcacttctatcagatttatccttttgattagagatgatccagtggacagctccaacgacattctgcatgcataattttacatcaaatccattaggtattattggaagcacagcagtgaggcaaatgtggaaaaaggaggggggggggggtgtttgtaggattgattcaatgcgaacaaatgtactagttttgatggatttgtaggatactaagctgcttcatgatagtcttgaagtacaaactttacatctttttattttaatgcctttgaaaaaattgaaacttggaacctaccccaaattttcagatgccatcctgtgctgctgtgctactgaaaattttggttattcttcttttatttttaggaaaatataagtttctttgtgaatactgcttctctgacttcatgaattttagttcatcattggaaacgttcatgatagctgtatctgtatcaatttgtggctgtctcatttaaatttttgagttataatgcacatcattgtatgattatgccattatcaaatgagaaagactttatcggcttcatgcagggttg

SEQ ID NO: 8995 - DNA, 1976 bp, Citrus sinensis
  Intron number 1 from transcript orange1.1g034944m (locus o range1.1g034944m.g) derived from phytozome v7.0 (chr-ID sc affold00025; pos 1058977 to 1060952 reverse strand)
gtggatttcaaaatctcaggtaattagataagttcttagtggataacactcaccacactgttaattgtctctgtgtagatggggctagggttttactgagttgagttggaaatgagtgataacttttgtttttgttaggtttaatgtcttttgttgaataagaatgataaattttgaatgtttttcttttgagtttgtccttccacttggtttcagttaggtataattggtatttgatctgcctggagatgtagcttcaagcatttaaaatgaatttagggtatgaatatattttcttgtccttcctggatttttaaggacatgaattggctaatactttcggtagaattaggagatcgaatgaccaattaatagatgcctctcgattaagactatctccttcattatttatgcttaccttgcacatgtatacagcatggtaatataattgagtagatttatgttgggttcttgaacaatttggattttgttgaaatttcaattattggaagtttgtctctttaagcccgaggtctatttttcctggtgattacgtgacacaggagtgtttagagactcttcatgtttgaagattgacaatgaagtagaatgggaacatgcatgtggtcaggttagtcaatgtgggaagcaaaaatcaagattaacactatacttcctcaaattaactgtactgttttaaaaaatagttaaattgtgtattctatattgttgaaaagataaatttgccaagtttctgtggaatcttacgaagtcaaattcagatttcttttcttaaagatattcaagattttgccaacaaaggttataaccatcagaaattctgcacaaggctgaaagttttgaatttactggcatcaatgcttcaagaattgattaacaagcgtcatatcactggaaagttcagtgagtccggagtttaatggattttagaatgttcgatttgaagttttctacatcaaaatgtgattgaatgagtgttaaactactcagatttgttgttgaaaccaaatttgaagtcaaattgtgttttgttttgttctctttcatctcattacaactaagatctttaattttaatttgatttaagttctaaaatgaaagagatcatgtcctaagcttcgagggatgttctaagttgtttatgtaaaggtaataggcagtgattttagaataatgtgtgtgattttgagagtgtaacttagaagaatggtcttgtttaaagttccttctttaaactctatattttttaggtggatttcttatagtggcgggttaggaagcgatgtatatcttgtaggactccctagatggtgaattctctgtatccctttgtaatcctctagagtggtgagtttttgtttaatccaatgtcattacgcccttgtgttgatgattatactgatactagaatctatgcctaatcgctaatttcggctctatcctatctaatcgaagcaatcgtctttgtccgttgagcctctcttctcctattgtactttagttagaacaagttttttgggtaaaattgttgtacacaattatagaaatgcagacagttttgatgttaaaggcttggtcatgatacagttgtgatgtcaaagttatgtttcaaatgatctaatgaatgaaaatactattctgtttatttctccccttctttttctgttccacgctattctactctccctgagttggttctgctctcaacctctttctggcctctgaagacaattgaggataagctacatatgaatttaatgaatgcatagaccatatattatcttctaggatattgtagtttacttctactacctccaatatgcatgccatttttatcattgcttcactgctcttagttttagttttaacttgtaaaagtttgatgtcatgatagtccatttcagtttcttatttattacatattatgtcagtgttaaaggatttactgaagtggc

SEQ ID NO: 8996 - DNA, 1149 bp, Citrus sinensis
  Intron number 2 from transcript orange1.1g047651m (locus o range1.1g047651m.g) derived from phytozome v7.0 (chr-ID sc affold00063; pos 4259 to 5407 reverse strand)
ggtggtaagattctttggatttagattcaatattgaattgagctgtactgatttattattatctttagtcacgtcgaggcgatgcaattgaatcaaattaaaaagttgaaccatttcaggtagtttcaaaattttcgaaccaaatggttcaatattctctttaatttttgcaagaatcaaactgaaaaaaagtacaatgaagaacaaaactaaatataaatcaagtccaacaaaattgaattaaaatttggttccaattttctgaagtgatcgggttgggttcgattttatgcatagaagtaggcacttagttcagcgtagaccgaaccgaacagaattggattgaatcaaaggaaactgaattaaattaagtctatgtttggtttaaaatttttcaaattaaatggtttagcgttcagtttgattcattttggctcttgaggaatgaaccacattagttaaaaaaatgaaaaatgaaaaaccaaaccaaaccaaaccaacaataaactcaatctaaccaaaacaaattaaaatccagttcttgtttagttcctaatttttgaacagttcaggtttggtttgaatttagtttgattcctatttatactgttatacggtttagattcaaatacatattatttttctattcaataactactaatcacactattaagaaagccaagcataaagttcaagttagcactaaataagctcttcagttagaatcattacacatgaactctttttaattaagtggtaatatttgtatttctaataaaagtcacagtaaatttgcatatcacttaaatatgaattgctatagttgtatatgtaaacataacgattatatatttgttcaagaattggatttaatgatgatctagtgtttattttgatttttaaaaaattgtgattaataattattagataagaatatactgttatcatttaatgttataaatgcacgcaagccaaaagaacttgaaaaaaattatgagtacaaaaaaaaattagcactaatccaaacgcatttttacgtagcccaaaacacttcattgtcatatattacctacaatttctacttgacttgtcatgcatcatcaaatcatcttgtgatgaagttcttgtcattgcagacaaaagtttata

SEQ ID NO: 8997 - DNA, 3673 bp, Citrus sinensis
  Intron number 2 from transcript orange1.1g023559m (locus o range1.1g023559m.g) derived from phytozome v7.0 (chr-ID sc affold00274; pos 14705 to 18377 reverse strand)
cgtttgatcgttttggaaaaataatcgagtgccaggtaccactttatcgttgttcatagtttttatttattttttacttatgcgcccttttttccccctctatattattgtgctctgtttggattttgagaaactcgagcgggaacggagtatttttttttttttttggagaaagcggaacgtaaatgaatgacttgttctctttttactcacaaaatttatgaatttttgtagaagaaaaaaggtgtaatctcttcacgtatattgagaaaaaaaattattgataatgatatgtagtgaagaactgaatcgattttaataaattatgatttattacacaggctttttgagctgattagttcattgtcaaaagatagaaccactggatttgcgtgttagagtccttttgagaatcacaacttgttctcaatgcattagatttacaacgtgatgtcattgaatcttagttttgatttttatcatttggcttggacctcaaatagtttggtattgacatctagttgagtttgagtattaacatcactgaaaattatgttgctacgtcggtgtcttctttattttcaggtcacgtgttgatcgatcaaacaattctacggtggtcttttttattgtcatctttacatgtttctggcagcttgcctgcacgcatgaaaaagtacaaaagaatttgagaaaatgtttcattatttatttgaaaattgaagcatagttgatttcgagctattaatttataatctatgttgaggtaaaggtcctacagcttgtagttcatgataaccaacgtttgcacaggctatgtattttgatcgcatttgttatcattctcaattcttcatcttcactatattaattattctgcttattttgttgttttgcctggaatgctcgatatgatcttttgagatgctgtagatggggtttttagaggtccttttggtcagaatcttcttgctgaagctcagtgttatttgtgtgattagattaagatggatggttatttttagtttttccagccagcaagcattgacgtgaatggacggtcttttgtctatatggattattatggttcacaaaaggcagtcaaattcagatacctggatttggaacatttgatatctgcagaaagagttcttttatccatggaatgtaagttgattgagaaccatgaagattcctgctcagaggcttggaatggatgtaatttagtaaagtgatcaaccaatggtcaagtcatgtgaggtagcgattctgagatgcttgtgtcagaaaagtttctgtttttcacagctttcatccacctggtttctgtagcttggtaaactgaaggttctagagtgcttagtcctcaatgaccgatcactccactagttagctgaaggatagagttcaattaagcctgatgaaagaaaaattgcatgtttttccatgtggctttcggactagcgttgtagttggaaggaaaaaggccattctgcaagttctgtgagtttgatataaatttttaagctggacagagtgtgttagtgggtgttgatttcttcttatgtcgctcagagaaccagaggattatctggtgcagtcgaaagagtcatgtgatgtgtatgctttcaacaagggctgccacattgcgatgttatgttgatttacttgttttcactctagattatcagatttatcttgtgcctgatgcgttattttgtagtcttcgtgcatgcatatgaaccttgatttttacactattctgatagcattacatccaagaagcctgaggcttgattccagtttggattcatcaaacacaaagacgaattctatacaatgcagagatggtcatctgcttttgagggaacagcattctttcgttcgtttggtgtggcagactcgtgaaattctgatattccagcttttcagccttatttttggagctctttgaacttcttttattcctgctacagcatttagtctatgtttgattggactaaatggatcagaacagttttctgttttccagagcatggttatggttctgcgccattccataatttttaagcttctaatcaaatgacagtagttcagtagtttaagaagacttgtcattctgccaactctttttactttacagtcagagtcagtgaagggaaattatttaatttactcagctgcaaagtttaatctattgaatctggagtttgggtgcttatagttgctggctgctgtaattctctcatcttcctcttatcatctgagaagattcaattcaaggacagtgatgcatatttaatcacctgatatgaaagcactctataggctacgttttcagaggttgtaggttcatccccaagtccagtatatctttgctagaagttgtcttaacttttttatctcagcttttgcgatggacgtgtgggcaaagatgtcatttatggactgcttatctgaaggtttttttggtaccctgctgactaggatgatgaattaataatgtacaaggaatgagaaccaagaagaatttgggaataacctgcacaatgaagaaattgtgtgatgatcggtggttgtttctattgatattagttcttctggacagagatcggtttttgaaaaatatgtttttttcatggtgacgtcttactgcctgtttttcacttgtttggattaaggaatggcagttgttgtcactgcaagatggaaatcaccccagtattcaaaacatgacagtttgtggttcgtttaattacctattggtgggaacccaaccattttttagaaactagcactgacgtctggttcaaaaggctgatatatctgactgtatgatcggctattatcagttgttctcttgaataggattctatagaacgggtatctgggattttgtcagatgacagatatacaattttgaagattcttcttctttgtttaagaatccttttcaataacaaaaaatgcagcaatgcctcacacataataacgatttgaaagtaagtcttttttcccccctttccccccgggataggaaagtaagtctttatttgcttgatacattctgattatgtaagactttactaccttatcatcttgatgtgtaatctctggaaccaactatttcctcatttttgaaagttatttcaatgctattctgctccttgttaatatctgtcatttcaatgctattctgctccttgttaatacctgaatgctatgcctgaatcgctatacctgaatcctattatatacatgttacgattcccaatatgctttgaggtaagtagtcattaatcatcaaactgcgactttttatgttttgtcaaaagatctggtttactgcatggctatggctttttaacctcttttttttgttaaataactagtcattgtcatctgatttacaaactgtcattagcttccgcggctggttttataatgttacatacttttgagattctttgttacaaatcactatttagctattgtggagcaagtttcaaaatgtttctgggttattcttatcatttattttggaaatgtcatcctacttatctcatctttacagtggtggcaatttcttagtgtcctattttgctatggtttggggtcatccacggtcgtcctgtttctttgaatcaacttctcttgtgtgtttgtgtagatc

SEQ ID NO: 8998 - DNA, 910 bp, Citrus sinensis
  Intron number 6 from transcript orange1.1g020262m (locus o range1.1g015089m.g) derived from phytozome v7.0 (chr-ID sc affold00086; pos 195791 to 196700)
aaaattttcctgctgtaagtaaattaagttccttttcagtaattgatactttctttatcagacaaatatctaaagtctaaggtctgggtttggatttaccagtttgagccttgacgtacggggtgagcatttcagtgcatgcctaatgtttgatctttttgcagtgttttacttgatttcatgttgtcatctttcagtgggcaaaaaatatgtttcagtatggctttacggcctcactggttacatttaacatgaatttcaactaggggtggaaaacgaatatacgaatcgtatttgaatcaaatcgtaaacaaattgggtcaaaactctgctgttcggatttgattcgtttattaaatgaattgaaatcttaggattcgaattcagtttgcttattaaacgatttttggttcgattcgtttaattcatttagcggaattaataaacgagtcgaatttggattcgtttactattcatttatcctatatcgaatccaaaatgaattgaattgaatttgaatttatttatagaaatataattaataaacaaaaattaagcaaaataaaatataaaaagaccataattcaatattctacaaaatacagtcttattataatttataattactatattagcctttaaacattaaaattttttcatacatatttaaggacaaataagtagtttaattaaatggataatgaacgattttaaacgaatggatcgtattcgattcatttatgacccatttattaaacgaatcccaaatgaataaataaatcaatatcttcaaacccagattcgattcgtttaattagtgaattgaattgaatcaatgttgagtttcttaatcagtttattatttatttagtctacttttatatcatgcaggctgatcaaaagttatcgt

SEQ ID NO: 8999 - DNA, 651 bp, Citrus sinensis
  Intron number 6 from transcript orange1.1g020414m (locus o range1.1g020414m.g) derived from phytozome v7.0 (chr-ID sc affold00001; pos 5283351 to 5284001 reverse strand)
gtcgtgttcggagatctgggaaagtaagtggatatggtaaagattttgtgcttacttataattgaacagaaatagcttcgattagcaggtgcttaaggaatttttggtagtttaaaggtttggtacaataaaccaccaatttttgttgttgtggtttgcggaaaaaacatatagattgagattttggattcctatttaacactagcaaaatcctgatcagttgagggttccttttcctgttccattcaccggtcaccaattcagttcatttgattttcatagaagctgctgtttgaatccacattctatgattctttgttgtcacttatcagtaattagaatctctgtgttcttgggtggtagttaattcaaccagtaaaacctcttgtggtacaagaggtctggggtttaaaaccctgcacacatgagaatgagtatctcagcattctgctctgtttatcctgaggggtttaagttgaaaacaaagagtgcttagtttgttctatctacaatgttcatctaaagtgacgtatacgtaatgtgacaaactctacatccaacccaagagacttctaaaaattgattttgatgaggtcttgtacatttttctatatcaagttggtgtaacaacctctcgtatttgtgtagggc

SEQ ID NO: 9000 - DNA, 1738 bp, Citrus sinensis
  Intron number 2 from transcript orange1.1g034361m (locus o range1.1g034361m.g) derived from phytozome v7.0 (chr-ID sc affold00113; pos 122114 to 123851 reverse strand)
ctgtgagtaccttttgcactattagtatttacttaaattttgccagtatgggacttaattacatgctcgaaagtatgagaatgtaatactgttttctagtatatggcttttgtttatatcctaattaattggaatgtttcatggaatctcttaaagattgagaaatggattggagctttataagtatattatcatatgttggttgactctgtgcaaccactaaaacctttgtatagatggttaaagaatatactgaagctatgatactacagaatataagggtaatcacaatagcattgcatttctggcaacatatcgtcaaacacatattcttaataacatttggtgaaatgtttgtaagtcattacaatagacagcatattaccatctaaattaagcaaaacatcagcattgggaggcgatgtaggactggttttagcgtcaatagatttaggtcatttttctgaagaacaactgttgggtagatgagattctttctttagacttagttaggataatgatggtgtaacaatatgttctgatgtatattgaaatagtcaaacctgtggataatgttccagggtattgaattgtacttttgagcagtgaacaataatccagcttagagctgaatcaaactcaatggactgacatcctgttcagcaaaagagtatattgtcaaaataccctcaagactaaaacttgataaaactacaaaaataaagaactgatgccttgatcggctgtggtgaaccatcatttctagaccaaaaagatgcctttatgattatgttgggtatgatgttatgaattggcatataaagaaaactatatagtttttttgtaactatgcaattgacatggcgtgggacatgtgaacgtatagatttaggaatcattttattaaattactgcttgcccgaaaaacgtaagcttatgggtaaggccaacaacattatttaagttctaaatggtttttacatttagggctctggatcaaatacagcaataaggaatacagaaatcttaagcatgccttatttttaatcatttttgtaaagagatccaatcatttttgtaaagagatccatacacacgagaacttggtgaaactggctttgttgccatattaatttgctactcgacctaaaaatttaaagcttttatatttaatgttccgttaatattaattaagttctaatagtagctttggcatagctagtacatgaatgtgatgaaacgaaaggggacttattattgttgaagcaggtgagatttcaaatgagttgatttgcttctgtagtatcttatattttggaattaattactctctttggcctcactcttattaaccttaaatatttctatcaatataagattattttgtcgaaactcatcaaaacacttcagaaatgtgctgcttaaccttccaaagcgtgagaactttaacattgtcgatactctttctagtattcattctgttttacaaatataacttagtctgaaagaagaagatatgttccttttattgacactgtgtccaggtttgttgggagactagtgtgtcttgcgtgggttttgacaatgatatggctccttaaaatgcatcttgccatcaagtatatagatactgctattttcttattgtgggaacaattagtgaacttagcttttaattttctgtaaatcaatgcaattttgcttgtacatgctaaaattttctgagttgttctacagc

SEQ ID NO: 9001 - DNA, 1303 bp, Citrus sinensis
  Intron number 2 from transcript orange1.1g025411m (locus o range1.1g022728m.g) derived from phytozome v7.0 (chr-ID sc affold00772; pos 16916 to 18218 reverse strand)
tgtttgactccgtttcgcccgaaaaggtgatttttggaagtaatgtatttttaatatccgttactctgactaccttgtttgattgttgggattttgtttatgtagcttgcagcatattgaaattttttgctttcaaagtagttcgaatgtcttgaacatagtttgctaatagtggtttatgtaaatggggatgttgctgtggtgtctgaagtgaatatgatctgtttcatttaacaatcggcgctcagataaataccatataatctttcgtagaagttaaagaaagaaattctatatattttaatggacaaactaatttaagttgccaacacatagtgtccgaactcctaattaaccaatggatcagtttcttagttttgattctcagaactgtaacatgtattttcatttcaaattgacttgccataggtgtcacgtattaaaagaattcttaacgaatgtcattgtcattgattacagttttccattatttattgtcctttgactactgatatgaatgtcaaagactacaccaatcgaagtagagtccacataattcaatgtgaggttctatagggcaagtggggtacccatagtggttaaatcaagcccttcctttctgcacttgcttggttatcatcaaataagtctctgtaactagatgtaaagttatgacaagagctttaccaagagtttactgagaagcaacagaagcctagatctcaaggtttccctttcatcttgactcctttcactcttgcatagttgctttgtcacatgccttgtttcattgaaaatctcaaagtggctctatgacattacattccttacatatcctactgtgtatatacctttttgctgcacatgttttctgaaaatataatgcgacaaaatttcttgctagagagcaggatggactgggttatctgtgatcctgttttgggcttgttgaaagaatgttgtggattttaatcgtccagtccaagctaatttgattagtataaggtttagcgtcttgttttctttagtaaacacttttacaatgttaggtttcttattatgctattatatttggtgattactatatggaagcaaattttcttctcttgcctgaaatgaaacatttatttaaaatatgcctcaatgttgctttcagatttggcttcctttactcttggcaaattgtccatttgtgggctattcttcttcatggaaaaccatcaaagagtgtagttttcattttgatccttcttgggtatcttttgtaggttcaagctgtactattgttattgggggggcgaga

SEQ ID NO: 9002 - DNA, 1746 bp, Citrus sinensis
  Intron number 1 from transcript orange1.1g020820m (locus o range1.1g020820m.g) derived from phytozome v7.0 (chr-ID sc affold00005; pos 1825653 to 1827398)
attacccttctgttgcgcttaacttctctcttaaggtatcaagatttcacatttttacgttcttttttttttttaagttaaattgatttgcttcagcggttcttttcatttgggtagatccttggagatgggtttgttaagaaattggattcttgggaaatttatgttttgcatatgaactgattgatgaaatgttcgaatgtggaagttggttggcaagttttgagcatttcatgtcataacgatttatagatgatgagtcacttattcttgagttttggaaagattcttagtagcatatatatgcagttgttattagttttcatgtgacaaagatttattcttactcaatgtgtattcattcatattgaatctgttatctttgctgaactcttgcttatctaaaggtgccttattacataggatcattgaatgatatgatacatacatatatctacttcttgagttaaaatggaggtcttgcttccatggccaggcttatttgctgctttggctattgagaaatagataagttttgctttgacacggattatgatagtttctgcttatttcaacagaaatatagtttaaaacctacattttttagaaatatttcttagcaatctttggatgtggacaggagtttctttggcctcaattggttttctaaattattccatacttcttcaccctcagtcccaaacatactggcttataattttttttattagtttgttggtggctatcttaaaagtaacgacattaatcatccatcataaatatatttgggatacataggagtttttttttttttcactttttttgggttgtgctgaatggtattgtccgagagacagagaaagatagttgtgcggagttgatgaataattacttagcaaatgaaagtttgtggcaggaattaggatactctgatatttctgctggaagtaaggtacgatattcttgaagatattggggatgatggcaggattagagtgttactcttattgtaaaatattaacaagaaaggtttagatgaagcaatactattacttgcaattacaacttcaacggaggatgataggaaactgattattgtcatgaggatgatggcaggatttgagagttactcttattgtaaaatcagtaccagaggatgatgacaggattagagagttactctcattgtaaaatcagtaacagaggatgcatacaaatgtagtactgaatttttatgttttgggctcttgctcgactttgtctacatgtttatttaatattttcatgagtagcaggttcttagttcttttctaatcctacagtcaagaaaattattgtatttttaacgaattaaatcgtggatttcagtttccaggtaaatagtagtggagttgtagtaaattggtgacattatattaattggaagaatcgttatcaacttccagtaatcagagtatgacctttaattttgtaacatttaagttattatctgagattatatgtatcctataatggaaagatgagttaatgttattctacctagtaggtaacctggtacccatatggtattcaactgcaagacatgacttaggaaactgattttgtcatgctgaccgtatttcaaattgaaggaaggtaccaagtaatcaaggaatgtcatctgttatcgttttcttttaagtctggataatgtatattcatggtcaatgttccatttgcaggatctttatcgaaacgtcttaagga

SEQ ID NO: 9003 - DNA, 1868 bp, Citrus sinensis
  Intron number 5 from transcript orange1.1g008581m (locus o range1.1g008382m.g) derived from phytozome v7.0 (chr-ID sc affold00501; pos 61409 to 63276 reverse strand)
tcgaagacaatagaaaggtatgtatgggattttaaaccttgatgatattataatcaatcatccatttgtatgtattggctgacaacttaaattggaggttgggccatttatttttgggtaaactgtgactctttgtactttaacccatggacattttctgtagttactgttttttagggccatataacccatgaacagaacaggaagaagtataccattagacccttcttcttgcaccctttttgtaaaaactagcgagaactgtctgaagtaagtccaggctagcaaaaccttcagcataaatcctctctatatctatctgtcttttccctttattttggactgatttattttgattaattattttttgagtcgctttaatcagtccaaatgtagttctatggtcacaatttactaggctcaatgctggtgatggagttagactggaagttcttaagagagaaattagagggaaaacacgcagtttcagatagagaaagataagttgcaaaagaggcttatgttttgtcaaaacctatattctacttgaagaagcaaaggataaaaagtttaaaccaggaaatagtctcttgagcattgttgactatgaagccatgcccaaagtcattgaaagagctttaatagaaattgaaccaatctgattgatctctctgagaaaacttataaaacctagcagtggtctctatattagatttctgattgggcaaagaagtctcgagaaagcatttcttccacctccctctacgaagaaattgattggaagttagagatgaaagtagatagatttggatgcatagagtgtgcatggtgataatgttctggtgatggtggttgtagattgggagttgaaaacttattttctggattatgtttttatatatcagaggagttggttggcaaagataatatgtatatttgaggttgatattgagaactaactagaatctgttatcatgtcactttgagttgtgtgggttttctttttcaaatgaaagttctgaggattttacttctttttgggtcatagtatgaagaatatcagtaagattcgcctttcttagattcacctttcttttttctttacagactgtcttaggtatttcattttgattttttattgtgttgaaggatccagttgttgtggatattcttatgctgatgagagtagttgcaaattaaaaattcttataaaccaatgttgcagtgctgtttacgttggacatttatgcttatgatattgttctctttttgtatttcctagatttatgttattttatttttcaggcaacaagtgagtctggagtaccccatttcaattacatagttcacacttcctcattgaaaattattatcttttcgtgtctctttatgattctgcagtatagagaatgattgtaaacatttaagttctcaatgattgtcgtagatttcattcaaattgtgaacccctctgttgccattagtgagattggagtccaatgttattattattattattattattatatatcttttcattagattgaaaagttgaattgaatattgtttctgtaatttattcttttaatgagattgtacagtcttgaatgtcaaacctgcatttggatcttttataacaaaaaatataacttttttttttaaaaaaagagaaaacagtttactcctacaatcatagggagacctcgcataaggggaagaggtgctaacctactcaagttgttggcacccaaaatgtaactttatttgcttccttccatgttttctgtaattctgagccatgtagttcttaccctccttttctattgcatactgctagaccaagtggtgtcctgctccagggtgcgagc

SEQ ID NO: 9004 - DNA, 744 bp, Citrus sinensis
  Intron number 5 from transcript orange1.1g009528m (locus o range1.1g007978m.g) derived from phytozome v7.0 (chr-ID sc affold00506; pos 70469 to 71212 reverse strand)
taaagaaactgaagatacaacaacaaccttatcaggtttactttacctaatcttagatttaaaactactaaccttatatatacagatatttcaatgtgtgtgtgtgtacttttattgttatgatcattgtaattgtttatttcatgtggacatttggtttggtttgtcatcatgtatccatgaaaatacgatttatctttgcccagctctaacatctgtttggttggagtgttttcagcatcagattgtctaaacagaaattttcatatctatgttcatttttcatcgactgtttgtatgagtatgggttttttattgttctgtaacttcttcacatgtaagaagaaacttgctttgatttgttatgttgttggatggtgagtacatagtttgaatgcgacttagcctttgccatgtttactgaccccagcctttttgtctcttacaaattatggtgaacttacttgaatgtttataggttatctaatgaagcaatcttacctagtgataggagaattttatctgtggagaccagaatggttttatgcttgtcattttttggagactgagtttccttctttcctgaatgtatagtaatttattctttggatatctagttatcattggttcttgaccatttgataacttttgacaattgattttcttttcatagttttatttggtgtttgactttctgtcttatttccaggggagcaggctgagtgtgctatagcagttccagat

SEQ ID NO: 9005 - DNA, 724 bp, Citrus sinensis
  Intron number 2 from transcript orange1.1g033879m (locus o range1.1g031701m.g) derived from phytozome v7.0 (chr-ID sc affold00280; pos 149191 to 149914)
cggtcctagtcagcctgtttgttgtaggtgattgggtacgtaacttgtttctgatttcttttgtttccaaatgtaaagacttttcacataaatcagattcttgcatattaccgcatatttgcaaaattctgctgttatcatttttcaaatatctgcttatcatcgtattgtctttatatctagttgtatttgtgttgttcctgattgcggacagtaatctccctagtataacctcctcatgcttgggatgatgaagtcctaatatctaaactgggaggaggaagagagagcacaggaaattgttacaacaaagaaaaaaaagcaaagataaaaagaaaaactgtggaatctgtttaaaaacactgttggtttagtaataacttaatctgagaattgtacatggactcatctgtgtccgtcttttttttttcataaaaaattttgaaatatgatatatcaaggctgaaatgacattgaattattctaaacacgtagattgtctctcctttggcatctcctttggcaaaacgggtgtgagattggtcttttgttgaataatagtaatgcctactatgtcatgtagttcttgactaaaacctcaacggaaactatctacacgatttgagagaactgatgcaacataaccatgtatattctgctatttttctgctttgtagatttgacattagacaataattggtgtaacaaatttatagttcaaaac

SEQ ID NO: 9006 - DNA, 893 bp, Citrus sinensis
  Intron number 1 from transcript orange1.1g020903m (locus o range1.1g020903m.g) derived from phytozome v7.0 (chr-ID sc affold00002; pos 2757468 to 2758360 reverse strand)
gattaagaggtgtgattggatcacacccaactctggtaagtgactcctttttttaaaaaaaaaaaaaaaattgcgcctcatggctcataccaagtttttgagcgtccatttctgattatatcaaatgtggaaacttaaacaatggcttgaaggtcattcctgacatatcccacaattggaggttgttatttgttaattaagaattttttatgtttctgatttgctaccattttgaaaagtaacaaggttttggtagttggagccatgcaaggcttttgctgattgtataaataaaactgctgctgatgggttgctgcacaaaatgggatttttctagtttcgttaatgctaccttaatagtggagtcaagcatgatagtttagatttcatttaacagaatgaagcgttaatcatgtatggcactgcagagtagttgttgaataatttagggccaattgtattaccgaagtttaaggttcatgttgatcattaatggtggcaaaactatcatggccagacttttcaatactgcagcttgggttgacatcgcattgctgatgaagaccttaaataagatgatagcctttttcttgaagaatccggtacatcttcagacatcgataatttgtggatttcaacagcaatcagtaaccattgattctacttagtgttctagcatttgaattatccaaactgcctttttctttgaatccactaaaatatgagtcgtttactcatctagacgtttaggatgtgattcatatatacataatatcatcacttctattcatatatggcttatttatttgcttgtcttttttgaaaccaattatctactcactgtagaacatctgttttatacttaacagatccactttatatttctttccacg

SEQ ID NO: 9007 - DNA, 1943 bp, Citrus sinensis
  Intron number 1 from transcript orange1.1g036273m (locus o range1.1g036273m.g) derived from phytozome v7.0 (chr-ID sc affold00788; pos 23528 to 25470)
ctttttgagcgagtcagcggctcctgggattcttggtgagtataattgtataccaacttgtcctttaaatatgtaatttgggtttctttattatattagtacatgaaagcatctttggcatggtgatatgtatgtgaaagtaaattatgatgatgacttagaatacttacttagttgaactggctgatgctgtaatgtagtttatttctggtggtggcattagaattgttaatcaatttttgaactttttgtttttcattattaattgtataatagttacttctgccaaaatttgattcagttttgaccaatatctgaagtttaatcaaatgggttactatccaaaagaggatatgagcaagtcttgtttgtattatagttcttgtggaggaaacagcttatacaaaactaataaatttaataataaggagcagcttgtaataaatttaatcatgtagccccgagcatttctttctggcgattttgcttgattcattgagaagctggcatgagaagtgaccagatagttgtggtcaattcgcttcctcattctgtcgagttgttagattgaccttctagaaatttcttaaatttgatgaacagatagctgcttctttgtttaccatgccaaaggttaggcttgggtgactgattcatcaaagagtacatatgcatatacatatacatacatacatatatatatatatataaaacaaatatacttttgctttgtttgtatgtttatggctgtgttctcagtataattgaaaaatgttgctttcactttgaaaatctgcaattagatctatttggttgaatccttcatctttcttgtctcttccgtgtttttattgctaaaaatttctcttcttattcttagccaatgtgattgcttgaatatggaaggaaccagaagaccaaaccagaaatttaattgcttagaatttacagactattattattattattttctaaatatacacctctagcatttgttatgttgtctttcacatggagatataatttttagattctgaaacttttgttcctttcaatcttgaattgaagtgcaattttataaatatttggattgctttcgtttaatttaaaattatcaacctttgacattttctggaagatacttgagctggttgttattgaaacatttattatattctttatatattgaaattattctttcttttctttcttagtttgtaaaatttatctttaatttttgtgggttgggcgaagatctgattgaacatttgtgttttctttgatttggccttttcccactagcttttgagttgtagtgtttgtagaaaatttattttatttaaagtgtttttttcccctctctgtctctctgtctcttctctctctctctctgatgaagttggagcccgtagacattttgtatacttccctgcatcccttgtttcagcttgaatttttgcccgtcattgtcaagttgatggtttcattttctgttgtcacaggtgtgggtgctgcaagggcaagaaggaaccatttcaatatctatgtgcattgaggattagcctaagtcaatctacaaaagttcttttcaacatgtgtctcttgatctgtgtacatacgcacattgttgcagtttgtatactgcttttgtagatgggagtctggccttgatttcgtttggatatactttttgttggtgaatatgcattggttgtgtggatgttggtattgcacattcatttgtaattgaaactcataaagtgatgatactctcgaatgagattcatctttgaatacaactttcatgaataaaaatagttgcttttgcctggcactgttcctagctttgatgtctttctgtggcttgaacgtccttcgattttagatttttgttagtgcttctaaatttgcaattactttcagggaaagagaattctaagaac

SEQ ID NO: 9008 - DNA, 1164 bp, Citrus sinensis
  Intron number 13 from transcript orange1.1g003284m (locus orange1.1g003284m.g) derived from phytozome v7.0 (chr-ID s caffold00019; pos 533716 to 534879 reverse strand)
gatttcttggacagctccaagaaaagaagcttgtaagtgatctgaaggctccttcttttgaatttatttcttgtatgaaggtttattctttggagtagtgtatcaattgatccagtattttgtcaaatttgatttttgattctgtaggtttctttctcgattcagcagttaaagtcggttctagaatttttttcgaatgtttttaggtagtactagtatcattgtcaactaactggattactgccaaaaacttagttgtggtaatgtgggaatgaaggtgaaagatgatgtaatagccatggcttatttcttatcaacaaagttccccatattacaatttgtagaggaacaaacaaagccttttgtgagaagtggttggaatttgggaccaatttgcttgccacatgtttcaatgttgatcttttcgcctatttaactgacttgaatgagatgcctttaacctgattctgagtctgaggctgctttacctaattttatggatttagtttttttcgaagttaaaaattctcccataactgaattataggcttggtatgatatgagaacattttaaaaagttaaaatcacctgtgcagtactcctgcacatgaggaaaaaggaaaaatgatggattctttaattaactcaccactcacgagcaaatatgttaaatgcttcaatttatgaggatggagaatgtcttcagaattccatttataagacgacttctcgataaaatttttccatgtgggcaattatcgtgccattattagttgttttaaatatgcatgcaaacatggaaataatctattggaagggtgcattacactcaaagttctacttccttttgagaaatgacatttagattcttgtagacaaagatgttgcagttttcaagggagtgggttttacctgacaattaaagatcacatgcctaaattttccaggaacaaatgtttttttgctttggttttgttcctttaattatattttttgcctttgctaggaaactagaaaattgctttaggttatgctttattatgtgtttttcatttttaaatcagttgttggttggtttctgtctgatgcggtttttctgatgttgaatttgccatttctcattctttagtgtgcagttatccaattaccatcacagacactgct

SEQ ID NO: 9009 - DNA, 1149 bp, Citrus sinensis
  Intron number 2 from transcript orange1.1g001514m (locus o range1.1g001514m.g) derived from phytozome v7.0 (chr-ID sc affold00008; pos 892446 to 893594 reverse strand)
ttttgcaaaaattttcatcacgtttattggaaaaggtatgcagcttgagttgacgttgtgtttactagttcacccatgaaccccagcaataattctgtttatttgaatttgttattgctgtattgttatatttgaactttctctacattgtcccattgtcattatgcgttaaactatgtttgtgttttagttatttagatgtttgttacgtagttaaaagaataaagtatatttatcttttttttctctaatctgattcttccgtataaacatcctcaaatttgtattcaaatctgggtgctgtaaattaaatgttgcctttgacactttttcttcaccttccctttcggaagtgccctgtagtgagccttttgtctcttgaactacagtgagaagactttttttttcccccttttctacattatggcatgacatatgtgtctttgatttgttcacttgttgttcctgattatagcatgttttatttttagtcccttctaatcatgatgttctagaaacctggaaggatctctgggaaacttcatttcataattgctatttattggtttctcattttgaaatgaatcaatcattttaaactttccaattgattgagaaaaaccaggattatcataaattaacaatggaggaaatatggtgctacttttgggtttcttttgtttgccactcctttgagattgagggcattccttcatatatcaaatgcatccttgtagattgtttcaaattatggctactgctgattttagttgtagctctggttggaagaagattttttatatttattgtttttcagaaaacaagatatatctgccctttctagtcacatttctgtgttctttgagcttaggttgctcatcaattttccactgatttgttgttcagtctcgatgttctaacatggattttaattagttttcttaacttattggtcctgagccattctgttttaattcttgaattcagggactctctttgattatgtatacgtactttgactgttggttcatagtataatttcatttttaattaatataaaattttattcttgtttattgtctaaaaataattctactctttctcaattttgtaggtcataggcatttataggaacttcctttctactat

SEQ ID NO: 9010 - DNA, 2484 bp, Citrus sinensis
  Intron number 7 from transcript orange1.1g007038m (locus o range1.1g004315m.g) derived from phytozome v7.0 (chr-ID sc affold00295; pos 118542 to 121025 reverse strand)
caatcaaggtttccttaaagaaaggcactcttaaggtacatgcttaattcaattggctttgacttactcttgacctaattgcaggttacttatagctgaaatttcactttacagatatccaacactaatttttttgaaacaacacaagggctagagtttagctgggttgctcacggggatggttacaagcttggatttggaattctatctcttccactgataaaaccccatagcaattatgaaatagaattgaaatcaagtccctggtattctcaatggaattcatgttctgctgaagaaatatttttgacggtaactgctaaacttatgaattctacacgttgggctgaagctggtcatgttatttcaactgctcaagtccagttaccttctaaaagagagagacttcctcatgtaattattcttcatattttactcagaaattaagatgcattaattataaaaatgatattaatctccgctttactaatttgtgggcttccaggtcattagaactggagatgctattattctccaggaaaatcttggtaatacgattcaactgagtcaccagaatagttgggagattaaatttgacattcagactggagctgttgagagctggaaggtactctatactaggtcttagactattataaaattagccaaccatttattggactttgtagaggttcaatattactcccagacttgctcctattaacttaaattcatagggttaatgggttcttaacatcatttcaagcctgttttccgcatggtcgaaactatctactacattagttaaaagtgtggtgactagtgcttgagttttttatttgctttgtgtttgtgtatgttccatgtaacaagcttattacagttctcttaaagatcaagtttctaggaattatgtttaacttgattccgtctgtaatgaagaaaacatgcatttcagcattttagagataattagacataattctttgacatctaaaatacaaaatctgacaaatatttctcctttctgaatcaaaggctttaggtgttgaagaatttgtggtacatcacaatgttcatttacacaagtatcatgcatgacaggccttttagtttagcctttgggcgaccaatttcttttaaataattgcggaaaatatgtgtattaaaccattggtgggtccctagattttcattgtagatgaaattctctatgatggatactaggtgttgaattttctgatgtagaagaaaaaagtgtcaggtatttttagaaatagcttaaaacttgtatggatatttgtttatttatggtgattattaactgtttttgaggaataccatagtccgggaactttataaattcttttatctactgctttcaatttttctatactgaatcacaaattaatgtgaaattacgtatgggcttacgtcgttttagatcgtttttggccaaaactataatgaactgaaatatatttggttttcttgtttcaaaacctgttcagaccagccattgggtttctttcagcacatatcaatattttagaagataaaccagacccgattcatagtaggaaatagaaaggtggaaacaactattactattacatccatttatgctattagttacaccaatttatcctcgatttgggatttaatgtcattacaaacaatttatatcgaactacaatcttgtcgaactaaaaatttaaaattaaggtacaataataaaaataataaaaaggattgtgttgaggttggatgcaatgcccagtgaaaaagaaaaatagtagctagcaagtcagcaactagaggtgagttggtaagtgatggccagggaaagcctgaaatataaatgaagacccttttttcctttttcattttttaaaaaaattaactgaaaactgatgatgggagtgtgaatgagaaaggtgacatgatccatggtggctagtgacattgacagtgtgaggcatggctgcgagcaatgggaggagctaacgatgagaggagggggtggctgagtgagacgagaagttgaaatttcttttatttttaaaatattcagagggggtggctgagtgagacgagagaagttgaaatttcttttatttttaaaatattcaatgtttcaatcgtgtgtgggtaagactaagagtaggatgtaaacatcagtcacaatgattagatgccacgtgttttcaattttattaaattgcaatcttgtgtgggtgagcataacatgtaaaatgagatagcactaacaactttgggtgcagatagaaaatttgtagtgtcaatggtttgttgatggtaatgtcaatcttgaaaataatactgaaagccaaatcaaacctgattgcaatgacttgtacaataattacctagaaacttattcttgcattttctttgctaagcactagtgttttcccttttttaaagatgtgtgcaatatggcaggttgagggagtttctgtg

SEQ ID NO: 9011 - DNA, 876 bp, Citrus sinensis
  Intron number 8 from transcript orange1.1g046057m (locus o range1.1g046057m.g) derived from phytozome v7.0 (chr-ID sc affold00007; pos 1807898 to 1808773)
ggtaatccttcacacctgacgcctccttattctctaaacctactgtgattcctgtccatatttatactgtattcttgtgcagtaggcatatatgcatccagattataagtagagtctattgattattcgtatatttatgttaattgatttagtttaagtagtgcttttaagttgtttcactcagtgcaataagcttatttgtttattatcacaagcctggattggcgaagtcaatctgcaactcattaggtctgtgctggctgttttacttttcccaaaatgattagctgctaatatattgcacgggtgaagctctgaactttattgagattgaataataagaatgaatttgtttgagatgaattttacataggaaattacagtcatgaagtcctttcaaataataccaaatggtacataaagtcccaaaattacacctatatattatgtggccacaaatcattgacagcattaacttggaggctaaaatattttttccagtatatgatcctaaaggttgggttgagtggtagaagaccctctgattcaaccatgaggtctcggattcgaaaccccttggagttacctatctgaaaatttataatcccacgagttttctggcatccaaggttgtgagatcaggtggtagtcagtttagtgtatatgcattgatgcacaatatgaaatctcattttaaccgatcatgtttgacctccttggctcttttgatacatgcttgtggtttcgagctcaggacctattctgcaatgtttatttttattttcaagatcaatttgttttcgttaatagccatacaacaaagttctcctcaggaatcctcattgcgcatttttcttttagatttttttcgaaggg

SEQ ID NO: 9012 - DNA, 1224 bp, Citrus sinensis
  Intron number 1 from transcript orange1.1g039518m (locus o range1.1g039518m.g) derived from phytozome v7.0 (chr-ID sc affold00218; pos 170426 to 171649 reverse strand)
cgtctccagaacttcccccaattcctcgtcgtctggtatttcttcatttttagctcattcagtcagttagatcacgtatacccatttccatttggatgtcaattttttgccttttttcaaatttgagctcgattttgagatttggggttctgggaaagtttgtgtatttgaatttttagttaaactgaccaatgccctcttttttttaattattttctgctctttttatttcaactgattgtatgtaagagagcctgcaatgcagtttttgttattggtttatagatgcagtttgcctaatttaacaggaaggacttgaaggggatttattaactgactttgttgtttttttgaggtaaaccaataactgggagttctgcatctgctgaatgtagttagaaagtccttttcttgtgtgaagtggcttaagttgcaagagattattgactggctagtcaatggacaagattggtagatctgaagggactgttgaatttagttgttagcttcccatataaacatataacaagaggctcactctaactagcgttggctaaatgttcagagctcgtaaaagtctgttcaagaatcttcagggtgcccctttgtatgagatcgaagacattttaaataagaccatgttaaggactaaaaacatttttttaccttttttttaaattgcttgcaggcagacgttatcccacgagactatgacaatgtttatgttagataacatatcaatatttgctgcttaaaagatgattttactgtcattcattagtgtagatatttaactttcttctcataccacgtacagttagttgattacaattttctgattttttatgaaggtaatcattgttctcatattgaattttatatcatagaggcatgtcaaagtttacatcaatagaatatgatgaaagtttaaacgtccagaaaatcatcttatggatggaaatctcacgtagcactttgtaatatgaatgtgttgtttgcgcatgtgtaccgtgagagtttagcctttgactagttcgattgtttgtgattatagacatctttttcagttgcaggtactaccacttttatgaacaaagttactctaacttacaggaaaacaccacttgttattccagaaagtggtttaataatagtttagcctttgactagttcgattgtttgtgattatagacatctttttcagttgcaggtactaccactttt

SEQ ID NO: 9013 - DNA, 953 bp, Citrus sinensis
  Intron number 4 from transcript orange1.1g021956m (locus o range1.1g010300m.g) derived from phytozome v7.0 (chr-ID sc affold00016; pos 278707 to 279659)
ataagacagttcccttgaggtaatgcagaattactgatagattttttgttagtgaaattgcagtaatgcgctaattctgtccacacattttgcacttggttctcttctatcagatctgttttgtatgcgatgtatggtttgtggtgtgaatttctcagtgtgcaatttaagtagcataaaatatgtttgttagtatctcaactgttttgaaatgaaatctagtaatgagttaattatgcttgattcttcaggggtttccagagaacaatggtcaaaacaatgtccatggctgcaaaaataccgcattttcattatgtagaagagataaattgtgatgctcttgtgaagcttaaggcatcttttcaaaataataattctgacccaaacattaagcatactttccttccatcattgataaagtcactttcgatggccatgagcaaatatcccttcatgaatagttgcttcaatgaggagtcacttgaggtcattcttaaaggtttgtagattaattctgctaagttcatgttgccataatgtttttttaatgcagataagcatgaaatatatagtttttatgctaataagatgactatatatcgtaggagtgaatgcatagcatgtttaattctctatttctcttcattttaacatcttttctttttgtgaaaggttcattttaacatcttagtctgcaattacagagaaaaattaagtggacatatttagatatgacattgaaaacttataatttgtaaatctgtaaacagtgcccattgacatggatgattcctgactcttacatggggtgttgtgctcatgaaaatttagatgtgattttgtagtttactataatgcatgtgctataatgcatgtgctctttcttctctttctataaattcttgaaataattattgttgaatttgataggttcccacaatattggaattgca

SEQ ID NO: 9014 - DNA, 1335 bp, Citrus sinensis
  Intron number 1 from transcript orange1.1g029920m (locus o range1.1g029920m.g) derived from phytozome v7.0 (chr-ID sc affold00157; pos 216439 to 217773 reverse strand)
cctccttcttcgttcgccgtcgtcagccgcacaaggtaaggaattaaggttatacatatgtttgcgattccaaatggtgatgattgggacagctgtatttctgtaattcaactcataattccatacacacgtatttttgtataatggctgtttttattttataattcaatcggggttggcaaggacatatagagactgaaaattgaaaataaacaatagctcatgtcgtagccatgaacctgaagaagcataactgtctgaaattaaatctcgattaagcacatctaggactgtaatagagtcaataaagtgataactagcccttgcgtagtgcttaattaattcgtgttgtggtccttaattatcactaatcttcactctacccaattgcccattaatggagtttgcatactggcccatcaaagctatatggcattttctcacggataatgcttaattaattcttgttcttaatcaaacacgttcagaatgccctaatttgtttcttcattttctgtccgttgatgcttgattagtggtggttaattgttgctgatttggaactgttgtcttgagtgttgatggtgatggagatgaattattaatcatgtttgtcatttgaagatgtaacttcggtagctttacttaactgaagtactcgttgtttatttttattttttatttttttgttttgttaacttttaaaaagactcgttgaaatgttgaggatgcttggtagttaatatttgtttttcattcattgactgggctgagatttgagattttggaattttaggtggctgcctagtgaattttttgaaattgaattgttgtaacccaaaatgaacccaaaccgaaatttagacccgaattttcaaatccaaccgaaggggttgcaatccaaacaaccgaaaccaaaacccgatttgcccacctctacacaatgatatataatggtgtggcttactgcatccaatttaagttttttccctaattacataaaaccaaaaacttcactgtgaagtgcgtgatatggtaagctctcttttttctttaaatttggtatatgcttggatgcatctgaataccgtgaacgaatcaattgacttgcttatagtttaaaaagaaaaatagtttgattaaatgtgtcaagtgctgatgcaatttgttaactaaatgaatgaacagttttattctgtgatatttcaaaatataatttatttttgcacaatgtttagcgttgtgttgttttgtgctgctagtgctgttgatagtagaaataagtaagctgaatcagctgaaaatgtttaggaaattttccttttatttttagaa

SEQ ID NO: 9015 - DNA, 4800 bp, Citrus sinensis
  Intron number 8 from transcript orange1.1g001156m (locus o range1.1g001156m.g) derived from phytozome v7.0 (chr-ID sc affold00111; pos 30972 to 35771)
tgagcaggtatgcaacaatttggtgtgactacatcttgttctttaatgctatttttatgataccaattttttccactgaggctattgatgaaagatcatgtacctgtgtttaaactatttctcttctgaaactagtttggtgtcatcttatatttggggttgtaaatgtgttgcatatgataatacatacactctatgtatattctgttttactgttttggttaactatttccatgtagtacaactcttgatactcgcccatctaatatatatatatatattgtggagaaatttagtaatttttattgattttcaaacaatacaattctagattaatagatatgtgtagaggacaataggaaaggaaactaaatcaaatcccttcaaattagagattgacaactatcaagatctcctatctaaggcatcaatttttgtagtaaaatatagctaggtgttctcctacactccccctcatgctggtgaatggatattgtccatctccagctggcctattatacactgaaacaccttgctaatcaaacctttggttaacacatttgctagctggccactagtagatacaaatggagtgcaaattaggccactgtccagcttttccttttatgacgtgctggtcaacttcaatgtgcttagtgcaatcaggctgaattgcattgtatgctatactaatagctgatttgttgttataataaagcctcaaaggtgcttcccactggatcttcaagtcttgtaggacaattttctgctacagtagctcacaaatccctattgctatttctctaaactcagtctctacatttgatctagtaactatgttttgcttcttacttctccaactcacaaggttgccatccaggaaggtacaataacttcatgttgacctcctatcaacagtacaccctgcatagtctgcatcagtataggcttcaagtgtcagcccttctccttttttgaacaaaattcccttccctggtgttcctttcaaattttgcaagatcctgtatacagcttgaagatgaacttttttgggattatgcataaatttattcacaacactgactgcataagttatgataggtccagtgtgagaaagataaatcggttcccctacaaacatctgttatgtccctttatccactgctgcattttcatgagcttcgccaagtctatggttcggttctatagggctctcagctggcttacaccctatttttcctgtttccttcaacaaatcctctatgtattttcattgtgatacaaagattccatgctttgagtgggcacttctaatggtaagaaaatacttcaatctattgagttcctttatctcaaaatccttaattaagcatctccttaaagcttccctttcttccaaatcatttcctgctaccacaatgtcatctgtatacaccagtagtgttgttactccccctgaagcttaatgtttcacaaacaaagtatggtcagcttggctctgtttataccccatggctgtcatgaccttagcaaatcgcccaaaccaagctttaggagattgtttcagaccatacaagtcccttcctttttttcaaaaaaaaaaatatatattgcacactttctttccttttaaattcaaaccaagctggaggtatttccttgtaaatctcttcatccagatcgccatgtaaaaaggcattcttgacaacaaattgttgtagactccacccaatattagcagctaaagataataatactctcatactgttcactttggcaactggagcaagtgcttccaaattgtcaatcccataagttttgagtataccctttggctaccaacctagccttatacctttcaagggaggcatccgccttatatttaacaatgaaaacccatttgcaacccattggactcttctcttttggtaactccattaactccaacgtcctacctttgttcaagggcttccacttctattctcatagcatttctccactccgtatgacttagtgcctcagatattgtcttaggaatggttatggtgtttcgatgtgtgagataggttctgtgggtgtcttgacaacttttcattagaagtaaagtgagaccaaagatataaaggacgttggatacattttcgggtgccttttctaatagcaataggaagatcattgttattatcttgattagagctagaaatattttcttgagaaggtacggtgtaattaattgcctcattaccaggggctaattccaattcttagatttacataggttgaataatgggtgcatttctcctttaataagtcagtactgggcaagaagtactttgaacctgtttatcctatcccaaaagcttagagttgggaggttttcaggttccatagaaatagaactaggatttggaggactttgaggattaataggagtaagaggtagaggattttttatgtttgtagatgaggaaggagaatgagagtcaagttccaacgactgtatgtctttgtccttatctaataagtgatgtctacctctgaagataaggttgagtgaaatagcgttctttttcaactaaatgtacatcagctgacaaagaactttcttgtaggaggatgaaagcatttatatctttttgagttggggaataatcaacaaatacacggataagtgctcgtagatccagttttccctgttatgagggtgaatatgaacaaaagatacataaccaaaaattttgggaacaagatggttagtagtgtggaagtctggaaaatattttgaaaagctgcacagggcttttgaaccatggatgcgctctccactacttagggttcaacaatgactcctcttctacctttttcggctgaattatagcaatagtctccttccaatgatggcaagtcttctttctccagtacttgtactcaaacgatgtcaaacaccccatttagtccagctaagaattcataaatcctatctttttcaacaaaccttttcataaggcaacatcggcattacacttcatttgaaaatattgataatggtgcatctcttgccacaaaatttttaataaattagcatattcagtaatagagcgacctccttgtttagttgcaaaaatcttggttttgatctcataaatttaagcagcatcacccaccttggaataagttttttcaacagcttcccatatttccttggctggggtcaaaaacatacatgtgtcactgatatctgggaccatcgaattccacagtcaggacataaccatagagtctgcttcatcctaggcatcagatctgggatcccttgatttgtgttcagtaccaagtaggtgactaatttttccctgaaaggtttaaacaaactgagtccactttgaataatttttcccgtccagtcgataggctgcctgaatgttctgcaaatcccctgttgatggagtacccatgctgtcaccatttctgttgtcacttaattgagtagggggagtgttgggttcatcaacaatcttagacatggttggaatatgaaaataatttcagggagaaagaattcagcgatgaaggctaaaagaaaaggaaaaaaatttcccaaggagcctaataaggctctgataccatgtgggaaaatgtagtaaagttttattgatattcaaacaatacaattctaggtgaatatatgcatgtagaggacaataggaaaggaaactaaattaaatccctacaacttagagattgacaactatcaagatctcttatctaaggtatcaatatgtacagtaagatatagctacgtgtgttcccattttgtgtgtgtgtgtgtgtgtgtgcagttatctatatcatctttatgatttatggttacaataaaaatatattacgaaccatttagagaaccttcttatataatggctataacttagccatacctctgaaacagctctcctgcaagggttgtatttttatcgtccttatttgcactatctttccacgacctgtacctgtgcccgagtcttcttgggacagatggtggcgtcttcttttcctaacaatgcaacttaatattcttgcctctctttcatgatgataccaatgaaatccttggttctatgcatattggaacatgtgtatttttgtagacgagtgtagcatgaatgactataatcatccttggtccattgagattattagatatgttaaaagcatggccctggatggattgacagtgctttgggctggatgaaggttttgaaaggccaagggatgcctcgagaactggaagtggttaatattttcttactgattatgtctgtcgataggatttaatgcaaaatggaaatggttccttgttggtcgaagacattgtgatggctataacttgatatggttgtgtcttataatttgctagcatgtcttcaattttgtttacttgttggtttatgtctcggtgtttttgtgattcaatgaacaattttatctgtacatggtaggtacacttgaatgcatgttggataaattttctcgagtataaggtttgaacaaatttcttaatttgatgttcgtatatgttttttacgtccagtactttttggagctgatgaaagttccacgagtggagtcaaaactaagagtatttgctttcaagattcagtttggctttcaggtttggcggtatctgcattgtcggtttataattatctgatgattctgtttaattagttctttcctttgttgtcttaatcttgaacatcttttgcagatttcagaattcagaaagaatctaaacacagtgaa

SEQ ID NO: 9016 - DNA, 663 bp, Citrus sinensis
  Intron number 21 from transcript orange1.1g001630m (locus orange1.1g001602m.g) derived from phytozome v7.0 (chr-ID s caffold00274; pos 136013 to 136675)
actttattatttctctcacttcacaggtgagtatccatatgtgtgcttatattctgaggcagatagagcgtgatgaccttatctcatgcctgcttctgggtaattcttttgtgcacctggaatttgtgtttttcttttttttttaactctttttcttcctcgacaatgtttgaaggaaaataacacgagcatgggacagcaacccactgaattggcttggtcataaaaggataaattagcatgaatgatggcctttgtaatactaattctttcattaataatgttaactatccctaccaataaatactgtagagaacctacttctgcaatgttataccactttttaaaattgtatttttatttgaagagttattggtagagaattaatctgagcattgaggtttcgaattattttcaatggtactgctacagtatataattccttgtatttgaatatcattagagctcaagcattatgtttggcccttagtcttaagcctctgggtcaagtgtttaacgttatcatctgcatgtggaggggttgtaggataaaattcctttttctgatttgatcagtataatttttcatggtattgttgtttgcttttggaagtctatcttatatttcttttttcacttcttatgcatagataacacgtaggg

SEQ ID NO: 9017 - DNA, 462 bp, Citrus sinensis
  Intron number 1 from transcript orange1.1g042337m (locus o range1.1g042337m.g) derived from phytozome v7.0 (chr-ID sc affold02035; pos 2245 to 2706)
cccagcggagatcagttactcaaggcgctgaaactgtaatctttttacctccttgatttctttttaacaagtgtgttgctgaacttgcttgaacattgatcacaatcacttacatagtttacacaggcttactagaacatgtacatttagatggagaattggatcagcagctagatttgaaaagtcctacttattgtttggttatagggaagcatgttgttgggattttggctgctgctttttgcttttgtagtttcctgtttctgattcacatttctttagtacaacttgtgttaagaatttgttgaatttcttagaataaagaatttttgccatattgttgaggtgtaccgacttcaattgggaaatttctctatgaataatatatggaatcttagttatatcaagctgccttttgatgttgcagactgatcacactgctgcagttccagaattcggaga

SEQ ID NO: 9018 - DNA, 1099 bp, Citrus sinensis
  Intron number 3 from transcript orange1.1g022939m (locus o range1.1g019841m.g) derived from phytozome v7.0 (chr-ID sc affold00269; pos 110250 to 111348)
ccttcagtcagaagtaccacaatagggttattcaagtaagaaaaatgtcattttatctatatcctgtttctggaatttcgtaataatatttttatctagctaattgagagaacaattttcagtcaaattttacatatacgtcataacaaacttgatgtcactttatttttttcatggccgtaacatgttaaagagattgcttttgtggcattttggtaggatactacctttataacttttccactgtctattctggattttttttttttaaaaaatataacgaagaatagcttccatttaattctgcaaatatcatcattctatgtagcatgaagctgggcatttcttgattgcctacttggtgggtattcttcctaagggatatacactgactagtttggaagctttgaagaaagaaggatcactcaatgttcaagcggggactgcatttgtggattttgaatttctagaagaagtgggtagttatttttttttaaatttattttccttttggtagctttttcttctgtacatcctatattgttctgcttcctcaagggtttgcattgtctggcatatatatcttggtaacttatagacctcaatggtgccctcccttttttgattcacttaggacctcctgccaaggacattgggatgatatatcactaaagctgcaggttctgtcatgtctttgtcagtggttgattgagggcatgtgtaatggaaggggaaaaagggaaaaaaagatgaaaaagaaaaaagaaatagtagcctagtatgtatgcactttaagaaatcccaatgaaatagattgatcacttcagctcaactttggtttcatagtgaagaatcactatatctagaactgccacctatagtaaactatgtaagatctgaaaaatgacggcttcttgttaaattttatgccctaaggcccaatctgatgtctaagaacacttttaggcattagctatttggcaattgttttgtgtttggtcatttccattttctaactgtgttagccttactattttcttctgattttctcatgtcattggcaggttaattccggtaaagtatcagctacggtacgttt

SEQ ID NO: 9019 - DNA, 1085 bp, Citrus sinensis
  Intron number 2 from transcript orange1.1g021541m (locus o range1.1g014257m.g) derived from phytozome v7.0 (chr-ID sc affold00017; pos 648166 to 649250)
gggacaaagggagaattgaaaggttagttgtgcttgttattgcactctgtatatgcgcttttagctaaatgcttttctgtatcatcatacttttgtgcttagtttctttttgatattatgattaggtgattagtccgtgagtattattacagctgcaaactcttctacaatttctattttttacaaacttatatgtctatcatgattgattgaataaaatatgaactaatataaataaatcatgtcggccaagtgatgttttcattcaactaattatgttatgccacattagtttgtacaaaggttttgtagctgtatcttttattctttgtctattatgcttttgataatatttgcttagtttctagctatatgtgatcactatgggctcactgctccattctttgtgtgaatgcatgtgaatatgtgattggcctgagaacaaagtgcccatttactaatgattctagattgttcaaattaaccagaataaaagaacttaagctaacacccattactataattgtaaacatgtttaaatttgctatgtttatttacatctacttattgtcttggatgatcaagagtacgattaacttattgatagatcagtgtgtctatattaccagctttcattgacttgacatggaaatagtcttctagtccaggagacttgtgcgatacttatctgtttgacaaaagaaccttaggtttctacttttcagatttatactactgaaaggatcttcaatcaacaaaatgagttgtcatacacattttcatgatgaatatctttaataaaagctaatacctttgctatttttcatttgatttttttattttattcatatgctttgttagagagatgattttataacattttttttaattttaaaataaaaatatcatttatcatttgatggattaactgaagagatattccttgctcattttttcttgcaaatggtttgttttcattcaatgtgccatatatatattttaattatgtacatattttgatgctgagggacaatattattgttggaatatttgcagagaaaacgtattcagcacccaagaagtgg

SEQ ID NO: 9020 - DNA, 4280 bp, Citrus sinensis
  Intron number 2 from transcript orange1.1g021070m (locus o range1.1g021070m.g) derived from phytozome v7.0 (chr-ID sc affold00302; pos 30842 to 35121)
gtgataaagattttagcgtccctcgttttacgcaggtaatgtgaataattttatttattaggttttttttttaatacctagaatgtgctttgatactttttaagtaatcaatttttatttttgaaccattaaggaatctaattgcaacctttgatcttttgcccacagagaggaataacaaaactgaaacttggctactaataatctcattataactcttgcaagtattcagaactagcctacccaaatattgtttttggtattttttttcaaaggatattttttactttcttgttgaaaattgaaatggtgctttagagttgatgtttttagatttgaaaatgcctatggtgggtatttttaaaggatttggtttcgttactgagatgaatttttcgttaaacactgaaaaaatgatttttaggaaatagaaatggagaaaaataaaataaaaaacaatcataacttttgatttcatattcagtaaaaatttaactcattacttgtccattttaaaaatgttattaggaaatgaaaaatagtataaatttatctcatacaatgtttgaaaatatgtaaagctaaataaacatttttaacaaataaagaataaaaagatgggtgcgactatagtagggaaccatatcctattatatatgtttcaattcataattttaaagttttctcgtatttttcctgcattttaaaattccaaaccaaaaaactactttgtgtgtgtgtgtatgtaaaattgagtattcacctacttaagcaatttttaattataagtaggccaccgcacaagttttcttcacttgttgaataacaaaatagacacacagtattgatgtgtaaatgctcatttagtctttatagtttaagttaagggacagtttagtctccatatttaaataaaataccttatgactcccctcctattaaatatgctacactcgtactcttatattttctttctttttacattaatatccttgcaataacagtcttggaaatattaataacaagaaaaaagtatgacaatttaacaaattaatcttaaaagtaaataaaaatttacataatcttttatattattattttactttaggattaatctagtaaattattgttttataaaataattattagtaaaattgtttcataggcacaaaaagtactagttctttcacattgatatttattgtctaatttactaataaatagttattgattaatttgttaattaacttttatagataaactaattaatgtcaagaatattattggaatgatattactataaaaagaaagaaaatgttaaggtaagaatgtacctatttaactgtatcaacgttttaagttatttttgaaaatatggacacttaagtcaaattataaggactaaacaaacacttacctcggttttgatcatgttaagttgtgaattttttttttaaaggggaactacttctattcaatccctacaatttgaattaactacagttatttcatttatttttaaaagttatttaaaatgttcttattgtagatctgtttatttaaagtctacttaattatcattcattttttacttatttcatgtaagatttgttttaatcttaagtcaaaccacaaatgtaattattattgtacttaataagttagatcgaacaattatgaatgtaacgatagaggtactttaagtaactttaaaaattacaaaacttacttgcactctaagtacatctattaattttttaaggtttgtttggtattgaaatgcttattataaaattaaaacaataaatattatattatgcttttatttagttgttaaagataaccgcatgtattgatagagcaaagctacaactgtttgctaaaactcgggcaataagttttagctgccaaacaactaaaataaatggggcctaagaaattttctacatttacctgctttaaactttattaactctcttttttaggttcattaatattagataaagagagttcacttctaatacttgttttacttttagaagaccttgtgtaatactaccatatcttaattttttatatatgaatgtaactaatgtatctctttcataaaggattaattgctccatattgcccatgaacagtcacttcaggagtagtcaaataaggtttagttaattgtattactacatagttatcttcagcaattaaaacttgaccagattttaggtgtagtccccttttggtaattgccattggtttatagccagacaatgggataatattctcaataatgttaaagggaccagtttgagccctgatggaatttttttttaatttccacaaaaatataaaatatggaaaattactattcaatattattgttagtaggattagatttatgaacttctagattatactacaaatatatgtatttgttggtggataaattcggttaagccaagctaggagcatcacatgcactaaagggcaaaaaatagaaggaacgatatgcgtcctcatatagaataatctccttcacctcatttttataaaaagacatattattgatggttaattttgggccaatggtcaaaggacgtgtgtcaatgatgagaagagtatatgaaacaagtatcaggatagacctaaacacgctgtatagaggaggattacacagtgcttgagttaaaaacgatcttttaataagaaatcgtcatgtgtcatacaaaagaaatttaaatgacttcaaatatttgaactctaattgaaaattatgcaaatgcctagtaaagaggaccactgccaatcgtgttccatcatgtgtcttgagggacctcaggatgcccttagtagccctaatttataaaccatgcttgaactaagaggttgttccttcccttttgattcttctgtttttatcttcttatccttcatcattcttagaaaaatggaggtcttttacttttcccacttcttcattcttagagctcttgcaacttaacaacatacaccacacaagtccccatctccactactcatctcttaatgaagagattttcttcgtaaccttatctttctaatatgcaaccatggttgatacaacacactatcctccttgttatccttcatacataagtaaactccttagtaccttcacaaaagaacatagaccttttattgttctttatcgttttcacgtaaaaaacctattgtaatatgtggatgggttatccaaatgccaatagtagacgtaggccataagatgaaccatataaatttcgtttgtcctttacatttatgcttatgcttatgtatactgtttgctccctaataagcatccctggagcatcatcagagctccccagagcacccttcgagctaccctgagaattctatgggccttctaaggctccctcaactccataggccccacagagtccatcgggctcgcttagtcaaggcttttttaatcaatcgaaggcaccaagtcacttcgccgtcactaaataaattctaatgttcctcggtccgcatcccaagctaggacgaatgaacaagtgaaaaacgggccaaaactatatcgagagttccattagacctcaaattataatatgaatgtaaatcgcaacccattaaaaaattttgatcgataaattaattatactgcaaacagtgcttattaaatgacgttgatgataatgagtgacatgaattcatgacctgtatatccatatctttttccacttcagctgcatgatttatataagaatttggatatggtgttgagatgagccttttatgagctttgtcggctatatatttatagcaatgtacagttaacatataattacatattatactaccatcacaatgttataagagactttaactcaatatttaatctaactagatcctttatataagtcaaaggcaagttgcttataaattattccgggtgctatacgatttcagacgcatgcacgttattgatatatatagattcttccaagtaatgttatagttatactcttgtgtaaattatttttgtacgaactgatatattataatataattagttgaatgtaaatataaaatagaaaataaattatgtggaccatgtgatgttttattttaattacttgtgtgatgccatatcagtttgtatataatagttataaaacaaattgtaactgtatcactaatcatgcgtcattgacccacttaattttacgtatgagattgaattaatctgcagaaaatatatctcttgtggggagaga

SEQ ID NO: 9021 - DNA, 2648 bp, Citrus sinensis
  Intron number 4 from transcript orange1.1g022279m (locus o range1.1g022279m.g) derived from phytozome v7.0 (chr-ID sc affold00190; pos 199380 to 202027 reverse strand)
ggagttagttattcattcatctcatttgttggttgaaatctgttatgtagcaggaatttatggtcaagatcatcttatgacattatagtaaaattttaactctcattgcccatgtctatgatggttgtagttaatgttatttagctttctatccactattttacattcatgctgtgttggaccctcatgataaagttttgaatggtgaactagactgcagacagaatatcacccaaataataactaccatcaggcgtaatcatgtttgaataaacttttttttcacattgttattttgtttccttggtatcatgcatcagaaattaatgaaaatatttatacaatactgctattaatctacacgaagaaagctgcaatatctttcttgttagattcataggagagttggtctaccttagctgaggcccagtgatatgcaaatttctggatcaaaaaagcatgggatcgggagccaaacctgcaaaattttgatatttgatcagtatttaacttggattccttggttcctcttaactctaccatgtcttcaaatcctaggtattacaatataactctgaaaacctgacaaacaatcgtagacgtcaacaaacattctaacattccccattgtagattataccttaatctgctatgatatcatccccaaaagtcctctggaattgtgattatttcttgctcgcatttattggttgcctttaaattatgatcgtacagagagttgaatccttaaatctattgcatcattctttagtaattttctcaagtaatcctgaagatgcagacctccgcagggccttaacagtaattattagccccaagtatgaactgtgggattggcctctctcttgaaatgtaaaacttaggctctgtttcctattgaaaggaaaaggaaaatactaatctttttctttattttgtgtattttattgtcaaggaaaagtgtgaggtcaagtactttccgacaagaaaatgtttccttggaagtagtatgccaacgaccatgaccatttcacttgcttggaccctcactggcctccttccatgagatgtgtgcactcttttagggtcctccttccatgagatgtgtgcactctttttacttcttactttctaacctgcttacttgagactaaaaatccttctttcaaattagagttttgtcaatcttccacaccgttctgcggatcaaaacacaatacagatgcaattacttcaaatacctaaaatccatacaacttacagttcctcgaaataaacatccagttccacatcctcttagaaaacatcttatttattgacctcaagctggagaatccttgcctgcgaacccttacatctactcggtcatcactatcaaccctgcaaaagtgtgctatctttctagagtggtgaaaaagaaattaatttctgatatattgataatagcatatggtaattctgagagactcagttactttccagaattagctttgatgcatatttaggaggttgcagccattttcttaaaaaaataaaataaaataaaagctaaaaaaaaaaattaaaagctaaaaaaattaaaataattttttttaaaaagtacaaaaataagaaaaacgaaaagtttcctcgtatgttttctggtttatctttttctgtttcccaggaatgctttccactctctactggcatttggacaaaacattacattcagatcttttccaaaccggcaatgccttctgatgtatttctacagcagagtttggtttgttcctaggcagcatgttacaggcttgagattacatctgaagtgagattaatggctgtaaatttagttgaagacttctataactaacacatgatctgcttgttagtgaaacttgaatggttattcttatacctgacttatgtttaggcttgatctgaagcatatggatgtacggatgttgcatgaatgggagggtgctgatttgagagagtcattagaaatccaaattgcctaggataaaaactaatgacgaactttacagattggtggatatgaatccaagattggatttatatctggcagtgatatggtaaagtgcaacagttttgtctttgcttcttgtgtgctgtatcactggtgagtgaagattctgtttcactgtatttttgcaatgaaacatatggtaatacattatgttagagaaatgcaattattgagtccctttatccaggaatgaaagcttgtgagtgcgaaagtaacttatattgtatttttcaaccacgttataaatggaataaatatcttctagtgggggcaacctttctcttgtgtttctagtatatccgactgaataaaaatacatatgtaataagggacatttacataagttgacgatggaatgctctcctatatgaataaatatatttttttttaaattatgatttaaatattgttctactgccctatgtccataatgggatgtgacatttgtggcagtttagataataagttttgatattgacttcttttttacaaaccttatactaagttgctcctacgttcatgattctttataattgatttagggaaatttaaaaaaaaaaggagagatagctagaataaggatgctgacaccgtttcttttttcagtttacagctc

SEQ ID NO: 9022 - DNA, 1782 bp, Citrus sinensis
  Intron number 2 from transcript orange1.1g026335m (locus o range1.1g026335m.g) derived from phytozome v7.0 (chr-ID sc affold00161; pos 27558 to 29339 reverse strand)
tggtatgttgcagtttgctactaagtaatttatctgctttgccattcctttgcatttgtgttcaagtttcctctgctgtctatgtgcatgcaatttttgtacaaaagtacatctttaatatttagatccctccttgtcctgccattctgtgaaatttctaccatattgtttgttttggaggttttgccactttatcaactacttctacaaaaccccttacgaattttaaattataaccacaatgttactatcttggcgcaaatatgctaaactctattgcatgattgtggttggtattttgctccctaaattggggcctctttttacttctcaaatttccagttcttattctacagtcagttatagtgaatttttgtttgtattagagacttttgttacattcacatagcaccactaccacattgatgttagaagttaactctagcatttttacatgggttcattctggattctggtttttattgatttgaacatgtcacgctgcggtctaaatttcccctgctgtgatctgggtatgatgattcctacacaagtatagaaatgcgtgattattagttctaagctgtggaagatgcaataggaggaacgcatctaactgggatgtgggtgggcttgtttgataaagtaggttggaattgactgcgatctaaaaattacggaggaagtgaaatagtatgatatttctcctgttcatgaggagatctttgaatttgcagtttctatgtggagaacaaataaacatctgtactttttcagtaaagcatgatgtgacttgattgatttataggcaatttcatttaaagttcaaaattgtttgggctttgtaggcaagcaacatggttgattttgatacaacagtggtgatctttactttcgctgacttgataggatttccttagaaatttgcatgaaatccattcttgttaaactttttgttttgttagttttggggaaattttctatgatattgtttcctttgagggaaaggcttttgtatatctggtgcctaggaactgtgtggtaggagcgtccagtgggtttgtggagagaaaacaggaatgtcttggatctagttttgaaatgaatgattttagagctagtttagagttgctatgatttaaaaataatatggatgaactgcgttgaagaatgatctgtgaaaaaaagcagcaaaagtgtttggcaactataattgtgaaactgctagtagtctttataaattttgtacaatgttactgtgaaagttccacgacattgtttaatgaccacaatgagatatgctgaaattctgggtgttttgggcaggattagtacaagcttacattgtcataactcttttattgatggatttatatttgttttatgcctgtgtatgtagttgccctccatggttcaccttaaagagttcagaaatctatgactatatatatatagagagagagagcccaataatatcttgaaatcacagaacttctacttctgtgactgattttgctggtcactgctattttgttaaaatcttcatattaacaaatgaattcatatctcactttcatttatttcccatttccttattatttttaagctggatgcttcaagctgtaagcattttcactttcccaccgattgtatattgacatgaaaaataaagttgagcttgctggatgtgcagtcggtgatctattttattatggtaaagttgaatctgtatgattggtgcttcaatttatacatgtattgttgcaatttttctgcaggtgg

SEQ ID NO: 9023 - DNA, 406 bp, Citrus sinensis
  Intron number 1 from transcript orange1.1g037955m (locus o range1.1g037955m.g) derived from phytozome v7.0 (chr-ID sc affold00031; pos 526934 to 527339 reverse strand)
acgccatcgagaggttaaaataataataataataaatcatacaaaacaaatatgtgcacatatttatagcttaattagagtattcttaaacggtgaagctactgaaactaaaagcataaaaattttgaaatatttccggaaaatttggattagaataagttaattttgcagcctaggaagcggaatgattgatttttttgttacgtaatatatctaagtttgaattaattttttttaatacagtgaagcgggttggaagttaaatttttcaactttagcaatttgcattagtgtttgattcgtacagatgacactgtttctttttagttctaaattttgttatttaaagtcgttattaaaatttattgttgtcaggtccagtgaattggttaattatatatccgaa

SEQ ID NO: 9024 - DNA, 1111 bp, Citrus sinensis
  Intron number 1 from transcript orange1.1g007912m (locus o range1.1g007912m.g) derived from phytozome v7.0 (chr-ID sc affold00001; pos 5562648 to 5563758 reverse strand)
actcacggacttgctgccattgctgccgattgcaagtaaagtttcaatttttattttttaaaaaattgaatttttgagtttgttagttaagtagcaaaatgtgctaataattgatacggtgttgcatgttgttctcttttagctaattaagctaaaattcttttttttttctcttctttttttttcgagtgggtagcgatgatgaatgtgtgaaaagatctcatttttatttttgctttctttttctaactaaagttatcattttgttcatctttcataattatctttgcggaaataacctcattatgtttgcttgacttggtagatttttaggtttagtttgtagacgtaaaatgtgaaatctttgtgtcttatttggggttgccttattttattttatttttaatttgcttttttttttcagtttcatagatctgttattgtgtttgtttttggaactgttaatgtgtaaaatctggtcaagattgcttgttttcttccggtagtccatgttctgggcaaatgccttccggaatcatgttttgtttcagcttcttgggcaatgtaggttttctttggattcctcaattatagatttctttttcatatgctgatgaagtggggagaatagttctcttgagtttgcttccttctaattatgtttttgaagattctgatgatttaattacttcaaaattggttcttgttttctgagagaactttgggtgttgtttttatatatatatatatatatatatatgttgaattaaaccttgcataatggaattgacaattttgggtttagtgtgagattcctggttgagtgagtagagcaatcaaataaaaagggaggaaaaaaatagcttcattttcttggtgctgtggttgtaaagaaaattagctttaataaccagtataccatgacaatgatggaactgagctgctaaaatttttcagtattctactttctcttatattatttggttatttctgttagtgggtagtttatggatttatgattatgtcattaatattttatacttacatcaaccttgcaatgatgtttgccattgcaggaacttgaaagagttagacttgtgggagagtgacg

SEQ ID NO: 9025 - DNA, 1098 bp, Citrus sinensis
  Intron number 1 from transcript orange1.1g024178m (locus o range1.1g023147m.g) derived from phytozome v7.0 (chr-ID sc affold00348; pos 125699 to 126796)
ggtaattatcttttcatattgaaggtcctttctcagatccaaatcaatttctccttgcaaatatatattcttgatctgtttttgatattggttaatagtgaatatgtggatttaaacatgattctgaggctgtacagttaaatgggtttttgggaattaagttttcagtgatcagaatctgaaaattgttgtgttttgagctttcacggctgatttgtgaagtagggttttgttcttgtggcttgtagaggcctaaagtttgtatcttatttcttggggaattgagagtggatttcttttttggcaagttatgcatttttataattgaaatgtcgatcatgagaagaagttgaattgagtgatattaatgttaatgtaactgttgaatgtcttaggagacctactgaagtttaggatttggttttttcttgagaatgctcgacaatgacaacttcttgttgagatggatttggattcttgacaatgacaacttcttgttagatatgagatgccatttgataatcgtagctggtttacgatttttcgtatgtgtttgcatatcagtttctttgtacaatttatgcttgtttttgtattttgaattcattgacaccaaagtatatacaatttggtattttttgaatttacttctaagaaactagccctatattttcttagtgattttgctttgctttttcttttttgatttcgggtaactgtagtttgttacaccttctgcttcaatagtgaaatgttatcattattgagcagacacttgtgtctagttgtttcctacgaaagggtattctggaccttttgcttctgttgagttcttaatgcatgttgaacacagaagtgtcttcagcagtctaatttgaataatagaaattgttgtttacggtttttggtagaagctgtagtgatgaaagttcaatagaggagtcaggtactgtaagttcttttagggatttgaattttcttttgatttgatccctttcttcttcttcttattcaaatcacaagttaatgattctttcctctttgttggtcctaaatgatgcaggagctagggcttctagaggaagagaaagttcagta

SEQ ID NO: 9026 - DNA, 1474 bp, Citrus sinensis
  Intron number 1 from transcript orange1.1g020326m (locus o range1.1g020326m.g) derived from phytozome v7.0 (chr-ID sc affold00054; pos 304606 to 306079)
tggctatactgtcaaggcctctgttcgtgatcccagtcagttttttacttcttttcattctcattcatttttttaaaaaatatttatgcgtaaatgtgtatgatcaaaaaatatatctgtggtttaattttctgatggtttcgtgcattgtgtgaatcaattgtttggattaatgtgatgcgtattcatgcatgcaaaattagagcatgcccatatcaagattttgtcttattattattatcatcattattttttatcttaattataaatgtattgattgattggtgtcttacctgatatatccaatttaatcttaggtacacttttaatttttaattgtttgttctttttattgttcatgattggttgcggtgtacacgtgaaaagaatttagtggaaatatttctcaatacttgtatgtattggtacctctgtatgccagtgaatcatgtttactcgtttgatatcctggaatcaacatagaaatgcatatgggaggctctattatctttgaagattgcgaagatttaattttgacaaagacaagtcaaaatagagatagatcatacatttccagtttgttttgagtcaaagctcaattgtcgaacactttcttaataaatttgcattatacattagtgtgtcgatctttaaacatagtcgacctgtacagctaaaagcacttacaccattcagcactagtttctttagtaaatcttcatgctgtgtaagcgagattgaaacattgaggaaaagaaaatcctaattatatccattacttcatatttaaattctttcccctgctttggaatgctgtatcaatatggtatgtctggttgtagtcatgctttaccgtggcctctgaactaccagaaattgataaattcatggttagttgaggcaaaattgaatagtcattatgatttctgttcgctttctgataaacatgttccttttttctgtccattcagctctgttagtcattagtggtgctgtctccagtgaacacatggattatctttgatctttgaaggtttacaaaagttataaatgttaccatcagattagtgctgttgatttcaaggatcattgaggatccaacagtttcgaggatcagttttcttgcaagtccctaaccttcaatgggagggcgtcaacttgcaagtgcacatataaattttttgcttctaattatttcattatgctgtacttagagacaaatattatcgctctgaagttgctagtttctgaatgtatagtttatcaaaactggatgacttgtgtttttatttttcccttctttcgtccctttttgataagcaatgatcgggattacttttgcattcttcttttcagggaatatgagacctggaaattatttaaactttttcatagcataattttatctcgtaggcactaatttgctatttctggaataaattgctaattttattctgtttatatttttctgcag

SEQ ID NO: 9027 - DNA, 900 bp, Citrus sinensis
  Intron number 1 from transcript orange1.1g046895m (locus o range1.1g046895m.g) derived from phytozome v7.0 (chr-ID sc affold02069; pos 584 to 1483)
atactctttcaagcttttctttgtggattatttgggtaagttgatggaaatatataatgctgtattacaaaaacctcaaaaacctacaaaatccctagtgatctaaacatttttgtcgagcaaaaacttcatttagtggattgaagggaagaagagggctcaaatcaggaaataattctaattttgagattatttttggtaattgaataaagacattaaaagtaatgtgatgcacagctgtatcacggaaaatctctcctatgcatggccatgtagctgctgacctgctgtttaatagctttaagttacacttgtcacttctgtttcttttggaatctacaaagcatgcaaactctttctttaccaactcaagtatcttgaatgagacaacgaatcctaaacaatctttggtacgcggcattaatttagttaattaattttatcaaatataacatttatctttacagctaatttattattcttcagattttatttatttccttttaaaataatttaatctatttttacaaattggtttatgtcaatctgcatgcaggggatcactatctcaaaatctgtacttggagagcttggtcctgacatctgcaacatttgcttcagccatggctaatctcgttccagctattacctttgttttgtcaatatctattgggtacagttaattttaacgcactttaattcatggccatatcattttgatcatcgtaaatactttgatcatcctaaatgtggaggaaatgatagtaagactgcactgtcagaaacaaaataattaaaatcggtgttggctagtttattcaccgattttattttatgatctttaattacaatcgattgattgcagattagagaagcttggaataagaacacgggcaggga

SEQ ID NO: 9028 - DNA, 3399 bp, Citrus sinensis
  Intron number 3 from transcript orange1.1g001357m (locus o range1.1g001357m.g) derived from phytozome v7.0 (chr-ID sc affold00140; pos 263431 to 266829 reverse strand)
aaccttccacttgggttggcaaaggtgaaagttcttggcatctttctcgtttagacattgaagaaatattgaacttgttggccattttaagcttttaggttcacaagattggctaaaaaataaatagtccatttgataattcgttcattggtttttgtatttggaatatttttgtggataggccctcaagactaccttaattgttgatcatccttactttccttgtggatatcgtaacaacttcctgtgtagcaattaagagaagttttttgtgtaggtgttcttcattgttgttgttcgcttaaatattcatctttagttagatatcatactcaatagatgataccgtgcaacctttctggtttatcacttaaaatccttgctttagtggatgttgatgttcatatttaaattgccagtttgagtgtgtttggcacagtgtattttattacactatattgcattattttgatttaggtgtatggtattatgttgtattcgttagcactgcattataataatgttatccagcatttggtgctacattgtattgtattaattttttatattatggttggtgctgcagtccattgtattaatatttttggtgattatttgaaattatatatttagaaaataatatttattaatacttgggaaaatggtaaatatagaatttttaaattttacagctttatttttcttttagtataaaatttaaaaaatatatataattcttcataaaacaggtcaaattaacaaattttaaactttttggcggcataacatttattattttaacatttcctgaatatataacttgtggaaccaacagtaatagatgaagaaaataagcaaaagcaattcccataagtaaattgagactgtctcttttttttgctaagaaacaaagattaaatataactataagaaatatgtacaaggattaggaggattacaaatccacaaaaaaggacgagaagtcccaatataaacagaacacttagaaacggcaaagataaaatatcccaaaacccaaaaacactagctcactaagagtgcttcctgttaagatatagaagcttcccaattaagcaaaataaaaaagaaagagatgtctttgaattcagtagttatagatgcccagagggaagcccagaacttgactttgtcccataggtgtgaaggatcttccccagccttgttatcaaagattctttggtttctttcattccatacgacccaaaaaatagccaagactgcacagtcccataggacccttgctttttttgtctctcttaagcaagaaaaactttctaataggagggagtaacttgatacaggggctgaccagcttagattaaaggtcttatacaagttagaccacaaaaagtaagcagcagtgcagtgtaggaatagatgatcaacattctctgaagcgtttttacaaacgacacaccattctggaaataaagccatattaggtctccttctttgaaccatgtcatttgtgttgatttttctatgagcaacagaccaaaccatcatcttcaccttggtagggactttagctttccaaatctggtaagaaggagaaaatgagggggcatcggggttatctatgaggctaagaaagtaagatttcgtagagaaacttcctgatttatccaaattccaaactctcttatcctctttcagattattaagaaaaactccttgtaggatcccgagcatcttagcacattgttcagattctctatcattcaagtttctaatgaacttaaaatctcaactccactgcataatatagtacttacacatactagctatagagcaatcacgacctcgagaaagcctatgtaatcgagggaaaagatcacagagagcaacttctttaatccaacaatcctcccaaaatctaactctctgcccattaccaaccatcagcttaatattggataaaaatctgtttttccttttgaaataaacacccaaggacatctactactccctctagcaacatcagctacatcccaaccatttttatgcaacccatacttactttttataacactataccatagagaattaacttctaaaggaaacctccataaccacttcccaagcaaggccttatttctgttaataatatttcctaaccctagtcctcccctggattgtggttgagaaaccaccctccagctgatcaaattgagactgtctcttaacctaataagtttaaccatgtgattaaagtaatcaccaaagaatcataatagaggaagcagcagctaatgcttttattcattaaaacaatttaaagaataagtgtgtcaaagaatttttccaattatctagttctcttcttcctcttctttggtggctgaagggcttcttcatctttgtcttcttcatcctcttcgttgtctacttcttgcacttcatcctcatcctcgtcctcgtcttcgtccccatcatcatcgtcatcatcatcctcattgtcatcattgtcaccgaacccgccatctccatcctcatcatcatccccatcgttatcattgccatcatcttcctctgtgtcagatgtcttggcttgggtttctgtatcttccttgatttgtagaagcgagatctgaagatttgaagctctaaaactgaagaaaagaagcaaaagcaactgcgttcaaaaacccgcataaacccaactcctacacaggtttagtttatgtgggtttgaccgcataaagtaaatatttgaccgcattgcaatactacatggtgtaattacccaacatggtattataatactttaaaaccatggaggggctctaatacaatataagaggagcaccaaacatgccctttattcaaaacgttctccctcctggatttggcacgttttcctcattacttctgtccttacctctttcatgatttaacctttttactgagtatatcatgactattgatatatggtttgatttaggttaattttagattacccctcacaaaatggcaatctttaaaatatcctccaaactattttaaagctcaactgagggttaatctgaaattaacactttgatttattgatttacacgttgctgagatatttttttttgcaattttatgcttgtgcatgtattttctttttacatacaagttttgtgttatgtggactttgtattttacatccatcttggtattttattctatcgtttttcttggagtgaggcttataagattcgaaattggtcaggaataacatatgggtgggtgatagtttttgggtttctgggtaatagtgatttctggatttttggagcattggcgcacttaagccttcataatgtttgctgtacaggtcaacttttactggctaagggtgaagtagaacag

SEQ ID NO: 9029 - DNA, 930 bp, Citrus sinensis
  Intron number 5 from transcript orange1.1g031451m (locus o range1.1g027286m.g) derived from phytozome v7.0 (chr-ID sc affold00015; pos 1832193 to 1833122)
ctcgagagagagatcgaagaattcttctacgtgctgtaagctcctacactgctattcttgatctaaatatatgtgtttctttttgccaagtgaagaaaaatttcaaatgctttttcattttgtttgcaattgatctttaccaactgcttttttaaggaggcaacttgtctgaatgacacaagtcaagccacattcatacttcaatcaaaaatataaatgggccctttctcagcgatggaatatcaaaatcatgtccaaaaaagtaaattaaccatattgttgatgctaagttaaattgttgagttttactgcatttgagatttgaactactagtaaaatcaaggttaagaagggatattttggggtgttcaacttctattctcagtacttgaatttatataattgtctttctgacaatcatctgaaacaatgcaatagtaagacaagacagttttgagaatatctttctgaagttttatgttagatggactatgaagattggggcattatcttccatttcaactgctttctgtagttttgatttgcatggttgactatgaactattgattagacaccagtgtcttatcccgtcttcccttgatattagaggggtggtggcagtggagagggcatcttgtttgactgtctgactgagacatataacttgctacctcttacctagtaggccaaaatcacagtttgaatagattaagtttccgtaggcaagtcctgaaaaaattggttgaaacttcagaagttggattactatagcttcatgaaggtgtttgaatcatcatattaaccagtctgtgatcttgaacctttttaattctaggaataaattgccttttgtgctcatattgagttgtggcttttttttttttctaaagtttaatttgcttagcattgaatgctatttattctaatag

SEQ ID NO: 9030 - DNA, 3711 bp, Citrus sinensis
  Intron number 8 from transcript orange1.1g002310m (locus o range1.1g002310m.g) derived from phytozome v7.0 (chr-ID sc affold00336; pos 34437 to 38147 reverse strand)
gtagggaagctcctgtacaacgattggctgaccaggttcttcttttaacttttttactatgtataagtcatttttgttttagtagtgctaaggaattctgcaagatttagaattttcattttataatatgaattattggcatgttgggttgtgttgcaatgcaattttcctaaattttcagcatttcaccctatcgatgaacggtacaagatataaataaaatacgcttaatatctaaaatggcatcttaagagtatgtagatccttgaatgtgatctttcacttggatttatattttgcggggaaaaggacatctagacctcctaaatacaaagaaatatacttaaagacgcctatggttttgaaaataccttgagaacccgagtagactctttaagttgtatggtttatcaacttttatgttgtatttaccaatatatccctctaaccaactttaatatttaattgttctcttcaaaattaatagaggtataacaaatcaacttttcttcaaggtaataatattgttgcttagcttcgagggggcagcccagttcagttggttgagtgctcgggatttggtgcttggctatatcgaggtcttaggtttgatccctctggtgagcttaaaaattccacggtttgtggtctcatgggtcatagggttggggagcctaactgaccctccaattgtagggcctagccggggggatccgtggtctgggtcagtgtgggagtctgggttacacacacacacacacacacacacacacacacacagatatagagagagagatatatatacattagtatatcttttgttgcttggtatggtttcttataaaaaaataataatattaataataatattgttgcttggtttgtaagaataaaaatagctaaaattttatcctgcttacttttgtacaggatttggctgtctttttcgggttaaatcagacatttgcggattgatactgttttgtatagctttgattgatcatggttggatacctggtctactactcacatacaatatgtctgttatatattaatatgcgtactcgtagttcttataaaaaaaatgattaaattttatgactcataattcatattaaatcaagtatttatggtcatgattattttctctatactttaatatgataaataacagtgcatgccaattggcataactggtaaaacttcttgggtgttataagagatatgaggttcaaactttgtctcatggatagggtgaggatttaattagtacttttgtaataaagattgatacatgaaatgttatctatttatgaaagaatttttattaatatgtttatgtatattttgtttatgaaaaataataaattctgaatttcatgattcactgaattgttgagtcgttttctacagtaaagcaccagagggaggtaaatgtggtgaaacctgtggcagccattgtaatgctgctttcagtcaccgatgagtttcagtgtacattgacggcatcacagtggatgccatgggttttgcctcatttgaccttccattgcttagtacttagatctagaaaatctggggtttgatagtgtcacttgtgtgctgatttgacattgtcttgctagtgcacgacagagtttttcgattttttatttattttgttcacttataaaataagtaattaattattgagaactgttaggggaccagattgtgtcacatgtattgttacgatacattatgttatataatagtaagaatactacaaattctacaattgcctcatgattttcttaattgattttgatgagtagctgttaattgtttgacttgatggagatggcgctacatcatggcagcacagtggctgccttgtgtttcgccacaattgaccctcctccattgcttcattttaaaaatgactatcctatagcatagatcagaaaataccctcctgactaaactgactgaacttatttatgggctgggtcttgtcggatatttttgtatcatggctacttaaataaatttggccatgcttaagggcaatgaatatctttttccaattgtgcagcctgctgtgctggcaaaaatgccagctagcctgctagggagttttgaaataaatatatcatattgatgctacaatgactactatacaaaactttgcaagtactaaatactatttttgcctgcatgtattggatctattaattgtattgatgttgtataacatcactgaatgagaaagaggagtaattgctgcaatttgttcgtgttatggatataacattgctgcaattattgagttttgacttatatttgaattccctcccattttctcttgttttcttttatcattctatagactcgaatagcaatattttgaaataactttacagttatgtacatgattgtgatagcagaagaggtatgcgatgactggacattgtggttgtacaaacaaggggaattttttttttttttaaaaagaaagatccaagaattcttctgattctaagtagctgcattggaagtaaaagatgttatatacaagtaaaagttgtttaactaatcttggtgtctaaaacttgtagctggttagttaaatcattgaaatctcttttgagtatcaatcattgtttttgtggatttgtagtcccatcaatcgttgtacatctctcttataatacttctcattttctatgaacaaattaattcatagaaaccttacatgatgatttatattttgcgattgagtgctaagaaagtaatttcattgtaaaagtaatatgttcatgttgtttgatttgggaggagaaaagaaactgctgaaaagactcaacattttgcatctgttatgtcatagaattatatttgttgtgagcccagaaatcctctgttttctcttttccgcacttgcgttcttatgctcttagattaagggagtcccaattcaggcaaaaaagtgcgcacagaaagaattcttgattggtaaatccatcgtcaaaaggtcgagtgtcaatcatgctttcctaaaacgttagcaagacaaagtctagggagttagtgttgctaaatacttcctaaaagccgtaaaagtatttaaaaaaggtagttgcctatttttaagagtccattcactgcaatccgttcggcagtatatatttggtattttcaaaaggattttaaatattctactcattttaggctaccctgagtttctttttaagaaatctagcttcacgggtgtttagaatcagtcctagttaattgggacggtaggatgatcttactttatggttggctaaagtcctcggtcttttaccaaactgaagatatcatcaacttgattgatacttaaggactttgttggtattaattgcaacgcaatttttttaattttttttttatttaagtttcatttcaggttttcttgacttttggtaatccatgaacatctttatcctttttgctttttttttacaaggcattataaaattaataaggaaaatatttgaaagatataaatactgatagcgattggttgtctgatcaatttagtatggcaaaagctttgaagaattagttgagtttagtgaattggctgtgcttgttgacatttattttgttagcattgagcgtatttatttggtggactaccgttaatgtttattttttggtttcccaaggtatctgggcactttactt

SEQ ID NO: 9031 - DNA, 1068 bp, Citrus sinensis
  Intron number 1 from transcript orange1.1g044309m (locus o range1.1g044309m.g) derived from phytozome v7.0 (chr-ID sc affold00021; pos 173893 to 174960)
gacacgtggctgagactttgggcatcgatttagaggtactgattttgatttgattgttgaaatattgttaattttttgagtaattttgggggtttaattggagtacttttgggatttgctttttgatattttataatgattgactggttatgaatatgaattatgtagtaatttaggtttattgacgaattaagttttgattttatgcatttactttcagatttgaatgaattggctaataatgcattttttttttttttgctcttgtttatttgatgggaatattaaggcaaattggatagattatgaagagtttggcttatgtaactgatttagtgtcagttgactagggccttagtttttgagagtgcgggatgaggaataatttctgcttcagtcatcttgcaaggcacatggtgttacgttggtttgtttagttctcatgttatactttctgtttagtttgagaggtttgtggaaataaacttttggtgcttttgcatgtgtgtgttagtttgcctttgaaaatgtggattagttaacttatggaagtaatttacaaattgtgctttggaggatgaaatcaatttcaatacaggaaaattatgattcttatgattttatgttgtttttcaaaagagattggggttggcagagtagtcttatgtcctcttggatcccagtgttgaagaagcaagtttgagagattttagttttggatgtttcttattattttcatattttggaaattatgtaaacttgtagttggcggctttttcattgatcaatatttatgacttaaaaattacaattctttgaagcctaaagagagtttggacaaatctaatccatgcaacctgcttagttgttttagtgtttttagttgctgttgaacttgtacttgttattattatgcttattctcattggcttgtcaaagacttgctccacacaatttattgtttggggtttggtgcttctatcctgtctagcttagtgtatggttttttccccaaggtatcagttgattggccactgctaaatataagttttcaattgcaggaactgt

SEQ ID NO: 9032 - DNA, 3807 bp, Citrus sinensis
  Intron number 7 from transcript orange1.1g019091m (locus o range1.1g019091m.g) derived from phytozome v7.0 (chr-ID sc affold00097; pos 140139 to 143945 reverse strand)
tttggcaggtatggccttgcataccatatgcatatttacaagcttttggtagttcactcgtatatgtaacagcataataagttggattttgacaattgctaagttacattagtcagagatagggttggcaataggacgggatttgccaatcctagtgctgtcctgtttatgcagatgtgataaaaaaatgtctcaaccctgtccctttatttttttttttgggaaaaaaatttgtcttagtttcgtctcgttaaatattgtccatcgcattatcctgaataattttaaatgtaaatagataaaatttgacattgttttcttttaagaatcattataattcaatctagcaaaaatcgtgaataaatattattgacgcttgatttcggttaactaaaaaaattgagtaaatgggacgatataaagagcaaaatacagggaatttacgtggttcggcacttggcctacgtccacggaaatcaaaagagccaactttcttattcaataatgaatacaaggaaatttttcttttgactatttgcctctaaatttttttttcttgtccccccatacctctattgctttctaattataatacaatttttcttagtacctaagtcgtcattaattccttattttggtcgactttttctacttaattagaattttatttagagtgtatatttgtttccttgtcaaagtagactttcgaagtttttagatttttcttctaagatttctggttgcgttttgcttcctccatgctctattgttttctgcaaggccatgtttcattttactttgtatgtttcttgagccatactttctagttcctgcttcttggatcctgcttcctggttcttggttcccgcttcccgtgactttacgtttcatgttttttacccatactttacgtgaacttgcatgctttttattcttcacatgaacttgcacgctttttattcttcgcgtgaacaggcatgtcttttatttatgcttcacgtgcgcttactttgtatgctccttagtccagctccacttgactttattgcatatttcctggttaagttccttgcactcctctttaattaattattttactttgcacccttcttgcttcatgctccgactttaattgattattttacttttcatgctagctccatgctccatgctccaactttaattaattattttacttttcatgcttcctgctcaatgctcaatgctccatgctttcactttaattaattattttacttttcatgcttcttgcttcatttttgtgcatggatttgcatgcttcactttttctgatatcagttgcctcctaactctttggagcttgattttcaaggcttaaaaaagttattttatcacttatttttatatatatatatcctctagaggatattgaaatcttgagaatctgaagacattattgacaaagtataaaaaaagagagagagaaacaatagtaaatactcaccagaaaatttggataagcaaaacttgaaaagagatggaaagtaaaatttattgttgaacgagagagaagaccaatttttataagtgagaattggtttagttaatgttggtgggtagaagaggcaacaaccaatgtataaataggtgatgaaataactcttttaaactttgaaaattaagttccaaagagctggggtcaactaataacgggaaaagtgaagcatgcaaatccatgcacaaaaatggagcaggaagcatgaaaagaaaaataattaattaagtgcaagcatagagcattgagcaagaagcatgaaaaataaaataattaattaaagtgaaagcatggagcatgaagcaagcataaaaaataaaataattaattaaagtgggagcatggagtaagcatgaaaaggaaaataagtaattaaagtggaagcatggagcattgagcaagaagcatgaaaagtaaaataattaattaaagtggaaacatggagtaagcatgaaaagtataataattaattacggtagaagcatggagcaggaagcatgaaaagtaaaataattaattaaagagtttatagaactaaaccaggaaacatgcattccacttgactagggagcatataaagtaagcgcacgtaaaatataaataaaaggcatgtatgttcacgtgaacaataaaagacatgcaagttcacgtgaagaatacaaagcattcatgttcacgtggagcatatgtaaaaagtctgaaaagaaaagtcacaggaagcgggaattaggatccaagaagtaagaagcatgacccaagaaaaacttacaaaataaaaagaagcatggccctgcaggaaacaatagagcgtggaggaagcaaaacgcaattaagaatctaagaagaaaaatctaaaagcttccaaaacctactttgagaaggagacaaatatagactccgaataaaattctaattaagtagaaaaagtcgatcaaaataaggaattagtaacgacttaggtgctcaaaaaaattgtattataaatagaaagtactagaggtatggggggagacgagaaaaaaaaaatcagaggcaaatagcaaaagaaaaacttccttgtaatcattattgaaagttggctcttttgattcccgtaaacgtaggccaagtgctgaaccatgtaaattatctgtgttttgctcttcatatcatctcgtttactcaattttctagttgatggaaacgaagcgtcaacaaatacaaagtagaataatctaataatagttttattttgactatatgcatgttcgaatacaattttatactaacatttttaattgcatgtttgctttcattgcacattaatattaagatttacgcttcaaaagctatagatttggatagtaataataatatgggatgacaagaacctttataaatttgtctcattgactaatatatcacaggttacaacttttaaaagcaaatattactaaaacaaatataataatcattacaatacaataactttaactagatcatcatatataatataataatatttaacaaatatcaattatatggaaagagtgcaaaactgtgaacattaaaaagaaaaaaagccaaataatgaatgttaactaatggtgtggagggtgaaaagtgagaatcttgtgggtgaacgactggtagaggcgtagtggagaggtcataggtggctgcttggcaacttttgtggcaacgtgaattttttttttatggcgagggcgaggggcggcgacaataatggtgcaccattaatttgagaaagtggctgagttttgaagggttactactgctataaattattaattttaattatgccttttgcttgacacttcactttctaattatattatttttattatttaattttagcctttaggtttcaactttgaacgttacttaagttaaaattataaaatatttaaaaatttataatagttttaaaattatattattaatgggatatacatgacgagacgggattttacggctggtcctcctttcgtctcataaataaaggcagaactcatttttttgtccttgtttttttgtccttgttccatcccactttaatttgagatataaaaatgtctcaatcctatcccaaatgggatgggatcttgggggattccatcccaacaggaaaaattgccatccctagttagaaacgaaattctaaacatctaaacattggacatatgagctaatttgggtattatttgctagcaattatctaacattttctattctcactgtatagactgattgcattgctagaatctcac

SEQ ID NO: 9033 - DNA, 1273 bp, Citrus sinensis
  Intron number 2 from transcript orange1.1g017941m (locus o range1.1g016543m.g) derived from phytozome v7.0 (chr-ID sc affold00052; pos 241274 to 242546)
aaggccctcaacgccctctgcgtcgcattatccaggtaatcctctttcgccaattataacacaattaactttcctcttctttttcattaatccacaatttacaaaatgcgaattgtagcaatacagcgcccttagcactaaaccgaagcagtaaaatagaatcatacacactgcatatttggcaccgaaactttaacttagccgcaaagaaggtaataataactctttctatttagcgaacgtctacagtttaatgagttatgggattgcagcaatacaatcctgttgctcttctgttcagctaaattattgttagaaaatcttaattacaaatttttaggaacaaatcaaatatttgttgccccaaaagataaaataaatgtcatttcatataaaaataaatcaaatttataggttgaaggactaactaaggtttggtagattcgaaaactttaacaagtaaagttataattcgtgttatctcaataaagaagcaagcttctgtgtattcaaatttctttagtgccaaacaaagatagcgatagatagacgaatgacgggggagaatcccaagaaatcaaataatagtgagtgagctgacaatgatggagaaactgtcccatgctttaccggacacactcctttcttgaataatcaactcactgagttaggagtagcacgtgattatcttttgtgatgtcatattttgatcatgttcccacaaattacagtcatacatgggttttaagtattttttgggattgcaacttatactttgctttgctttttctttttggaactttggttcatatacagggttggatttagcgcattattgccccttcacttttcctgtcttttttcctctactttgttcgttctctaatagttcttgtacccaccccctgtatttcttttatatcttttttatttaagtgacgatcccaatctttgaacttaaggccaagtctctctctcttttatcaagctttaatggaagagaataaaaaaaaattttaatcgcctgaattactgaaaattttaatagaacttaagtttatatgttagtttataatatataattatttacatataaactcaacgttggattaaagatctaaatatattcgtgtctacaaaggataattttcaccttaacaaataaaaattttttatttaggatctagatatttgttattttataaaatattattgatcagtaataaatgcaattccagggcctagatccaaagatcacagccagcttatttgc

SEQ ID NO: 9034 - DNA, 469 bp, Citrus sinensis
  Intron number 1 from transcript orange1.1g007566m (locus o range1.1g007566m.g) derived from phytozome v7.0 (chr-ID sc affold00033; pos 565471 to 565939)
attaccctgttttcactcctgtaagttttgtttattttcttatttttttaaaacaagttgtaatcttttttaattacctttatgttatttattgaaacggaatgttttttctgttgttgctactccatttgtggtctaatattttgaaaagattctgtaacaaaaggaattttttaggtactttagtagttggcagcgattgaataaataaaaaccagaaatttgttttgttgtgatattaatatgccctttcgttttgtcaatgtatattgtattctgtataaactaacatgctcattcttttaaatttctacttattttaattttaatctcatgtgcattttcttgattttttaccgtgatgggataatataggccattttttaacatgctatgctttcaattttgttctagctttctcatgtagttggattttatattgagattttggggaatttttgacagagtt

SEQ ID NO: 9035 - DNA, 1945 bp, Citrus sinensis
  Intron number 2 from transcript orange1.1g015742m (locus o range1.1g015750m.g) derived from phytozome v7.0 (chr-ID sc affold00271; pos 15522 to 17466)
aagagtgtgtcttcttccgaatctagagcacccaggtgattttttgttttccccccgtttgtttctctatgtgattcattgcttctttctttctgctttggtagtcaaaatgggtgttcaatgctagtagattcgtttttgtttagtttttagctggtgaaaggtggttgtttaatgggctttggacctcgttgcttataaaggtttgttatattgttgaatgaagtagacattttattgctgtagtattttttttttttttgggttaaaaattcattactgaattgcttatgtgcgagcagttgtcatgtagaagtgatgaaagagattctttacttgactaaatgatgaaagcctttcaagacttggaatttagagtccgtatatataagggtttttgtgggttggctttactagtttcatgatatattaccatctcatagggaaacagaaaaagtagtgttgcttgctcttattagagactgccatgcatgcttctgatgatcagtttgagctgaaattttgttcgaatctgccttttccctgaggatagctaaccttctagaaatatattacttacaaggagtgtgagtgaagccttgtaattcatatggttgcttcggtctttggaaggactaacttagtattaccagaatagttcgaaagacatatctcagttgtgagtttaatagaaataagaattcgggcttgtacagcatcagtactgctctctatgaagttgtaagagtttttcagcttttggttttgtgaaggtgatgtagaaaatctaactcaagtctgaaattgcagaaaagtgcaaattctggttcatttggctaactctgagaagttgacatcctatgcattactatttttcttgttgaccagcatttacttggctcactccaatttgaccagaagctttactgttgtctgtttttgtgatgcattaattttggtagaaaagtttcagactgtttattcgtagcctcttctgcatcagttacaaggtctggtgattctgtaggttttaaaaaaactgcaaataaattgctgtaacagtccttgttagttttctttatggtttaaactagacaatcttgtaatacaaactaaaatattcagggatgttgaagttagctatgggtttttagatgtaatctttcaagtatctgctctcagatttaatagtgcccagtttcgcttttggttgggaaagcaatacagagaaacagtttcaggctttggggccgcctatttttgcgatttggaggactatgtgtagcacctagttttaagagcatgacttattgaatgtcaatgtggtgatctgaagttgatctgcttgttagcaaattcttggaacaaaggaatatgattttcctcattagctatactcatttcagtgttgaatggacttatgttgtaataatcgtcgtaacttcttgttatattcttattttcctgttactgtatatggttaatgcttggtttcagagtacctttatatctcctgcttgaatgcttttaagttttgagctttgaaatattatcatcctctcatgggtgcttagtccatgacatttgctctacatttcatgtgttgaataactaatcagtgaaatgaacctcgtccatggtattggtgatgatgtcctagtacaacctagatttgccatgaagctaactcaacatagaacggagcatgctagggtcttcccattttttattaaactagatgtaacaaaagttgatcctggttattggtctatgtgctctgtatgataactctagcctggcctgcgggaattttcatctgatgtctgtttttattcaatgaaatgaggatttggcttaaaaatgaaaatttgactgctgtatccactcttgttgcaatgcctaaaacaaaatacagactcatcaatagagggtgcaagttggttgg

SEQ ID NO: 9036 - DNA, 1354 bp, Citrus sinensis
  Intron number 1 from transcript orange1.1g002009m (locus o range1.1g002006m.g) derived from phytozome v7.0 (chr-ID sc affold00226; pos 19762 to 21115)
aactcgctgaaacttctaacctaggtgatttgtttgattaaacctggattagttaagtgatgaatttctggaatgattatatgatctctgcatctatactacgaggaattcaattttttttaaggatttctcaaacaagtgattctatttggtggaggattggtaatgtagctacggctatggaagttaagagcatcttaggacattgtgatattgtgatgattttatgggatttccctgaaatcattcatgtaccagaatatatgaaggaagaaataaagaaaagggaatgaataatattgtttttgttatggcgtcaaagttcttatgtgctttagggttcttgtccacatgatgaaagttcatcctatttgttttctttttatggttatcaaagacttgatgcattttcctagcttttcaaaattgtccttgtaacttgacatgaattgatgatgacatttgattattttatcatctcaaggattgagtaagaaactagaattcagttggcttaaacttgaagggagggtcctgtaggttaggagggaggatagcaacgatgaccttaaaatacattgaaagagtatataacactttataaagtcctgcaaaaaataatgggatggaagcttggttcatctgttcaaatgctatctgtttgatgtaaaaatgagataagataaaatgaagagatgatggatgttgcaaaaatcagcttgactcgctattaaaagcgtggcatgctaagagttttggttgaatctcagatctttagctaatgaccccatgaaaaggaagagacccaatctttttgagaaaatgaagtgtgttaaatgttaattaagtaaacattactgtagctggtgtgtcaaagtgaagtgccttgcttttcttttctgttacatttatcattctgagcctttaataatgttttttgattggatagttagccttgaaattagataaattatgatcctatcaaaagtgaaataagaaaaaaaaaattagcttaagtctgaaattacagtaaatccattactcctgtatttgtctttaagtgatgattgccgcaaaataggcaagttcattttgtgtattttctgtttgtagcttttgcttatctattatacaggcaagaaacatatatggtccacgagtatgattattttaatgtggtaggttgttcatttaatcataaaacattacagattgtgccattttccatcttgcaattaaacgatgaacctatgttgtgatatttagttatttgcatattcttgatcctcttataatcttttgtagtttatctgttgcagtgaatattacagtttcgaggtagcaaaatcatcga

SEQ ID NO: 9037 - DNA, 878 bp, Citrus sinensis
  Intron number 1 from transcript orange1.1g005819m (locus o range1.1g002570m.g) derived from phytozome v7.0 (chr-ID sc affold00010; pos 2196894 to 2197771 reverse strand)
tttctggaaccagggatttgcagaggctacaagtacagttctttcttctgctgtttgttaccttttgatatgtgtgtgtgtgtgtgtgtgtgtgtgtgtagtaatgtaattagtggagccggtgaatatttgtctaattattgtgttagctttctttcattttttgttttgttttgttttgttttgataatcttttatgactgtttattgtggcctgcaataattggagtaactctttgttaacttttggtgggttttgagttttgttaggaagcataagtttggtgtttaagcttttgaggttgttgaaattctttgaaattgaagttgtatgtgaaagttccaacagaaatagataaagaatgtactttgaatctttgttgtactgtataattctggtctctcacaatgttttaatcagaaatttcaattacggacaaaaatttaacacgcttccaatttggttgctcatagttatgatgcctttctacttgaatttaatatgtttgctagaatgaactttaagaaaattcaagttttatttagttgtcctccggaggctacttatataatagtaatgatttgtcaaattcctaatagaaaattcataattttttcttttgtgaagattgaatttatgtttggtgccttttttcatctgcaggaaaatctacaaaataagttttagatgtgaaagtaattgcttgttttaataagaatatgactttcagaagagaggctgctgttccttttttcaaattaaaattctcatatttttcactttctaaatctgttgatattgaaaagtctctgaacaatattaagatgttatttttggtgcaggttgagatattgcacaggtcaaaggagctcaattg

SEQ ID NO: 9038 - DNA, 2060 bp, Citrus sinensis
  Intron number 1 from transcript orange1.1g020822m (locus o range1.1g015601m.g) derived from phytozome v7.0 (chr-ID sc affold00018; pos 1158892 to 1160951 reverse strand)
agacccaacattgtttcggaggtaagctcagtcagatctaacacactacaactctgtgttgttagggtttcataattcgaataatcgtgattttttttattgcaaagtaaaaacgttactttctttcgtacttgccgagaaagtgtgagaaaatgtaacgaaatgaaagttcttggatcgtatctgttgttctttctaaaatttgtgcttctttatgttagtttctagcttgtgagcttcgttgtgttaatgctgttactcttctgatgtaaaattgtggattcgagttgctgttggtgttcgaaaagtgtgagtgattgtcaattttagaggattcttactgtagctaaagagctggtcgaaaaattaaaatgtgtttatgaatgaatgaatgaagtagagagatcaaggactcattggttttggtcagtttctttgagcttatagttgctcttttttttttaaatgctaaagttggatattaatttgtttaatgtttctaaaacatgtttgtaattgctgtgtttttacttaattttgaaagtaatgcagctgaagtgttagataaatgatccatgtatacttgacacctagtaattttatgtctcatagcaactatggatttgtcactgcaaccgaattccaaacatatccttaatcatatggagcttttagcatgaaggatgtgattgcttcttacgcctttatctgatactgtctttctataatgatctgagagtgtgcttttctcattcccatattagatgaaatgctaattaatgtgctaattattgtgcctctagaaatccatttctattgattggtctagacggggggttgttctgtcagtgtttttggttgaaaagaatatccgttacgaatagtttttcaactttatgtaattgatgtctcacttgaatcttaacttggtgtttattggtttatactttataggcggggttgtccaccagagcgaatcagtggtgggaaagtattccattctttacgtctgctgtggtgattgtttgtgggacaatttacttgatctgcctcttgtttggatatgattccttttatgaaatatgtttcctcccatctgcagttatatcacggtttcaaggtacattcatgcaatctgacaaagatgattatcattataaatatgtgggtacaaacacattgaaccttctctgtgatatgatcaaaagttggtcatgatcatgttggaaagatttttcctcattttgactgcatggctgtagtattttgcgagttatgtgaataattaggaataactccgaagaaacactatgtaattctttacactatttactgcatgatttgttgctccaatgtatcatttacctgttttttctgtgattgcactcgagctattttgttacgccaaaatggaattaatgattgctttggtaactgtgaattcttcaccctatgtcactatcttttttcatgcaattgcgctgtagttatgtcgatacgttaatatggaattaattatttcttcggtaacggtgaatagttcacacttttgattacataaatcaagcactaactctagctagcagctgagtagtatttgttggaaatgggagaacatggatcatggaaattttctggataataagctcccgttcttagttaggggtaaatagtcaacggactagtcacttatgcatacttcctaacttatgatggtagtttttagttatttcttctacgagcctatcatgggtcacaaaacaatgcgccattctacaaaaatatatgttctgacaaatcatatcattcgttatactgacttttttaaaaaatgtgtccctctgtacttttttatcacatgggatggtaattgtctgttgccgtttccttttgaatgtaacaattattgttcttcctcgtatatatatttttatcgtagcttttcattctgggatatgtacccttatgaaggagaaaaaaatgcaatctttgaacatgccacttggtaaattttggacttggccttttctaaccaagcaatggctgccacaggtctctgc

SEQ ID NO: 9039 - DNA, 3335 bp, Citrus sinensis
  Intron number 4 from transcript orange1.1g020851m (locus o range1.1g020450m.g) derived from phytozome v7.0 (chr-ID sc affold00516; pos 27257 to 30591)
ttcggagacatcaatgtatgtcaacacagatgaatcccttaactagtatttattagttgcatatgcccaacttttatctgttttctctgtgcatcatactattttctgttttgattgagggctgaaccgcaaataatgatatgtataccaacacaaggttgtgtatgacttctagttatactgattgctgcatcattttggagcatgttgctaagacgtggcaattattacgtgtgtgacttgatagagcatcggaggatggtttgcagttcccatgattgcagtttgtgcaagttttccagaatagtgagcgaaaaggtttaccagaataattagtgaaaaggcatgcacaacttgagggaaatgatatgataaactattatacatgagcttggatatagttagtaactttacagttcaatcaggattcaatatcaaaataatttttctacatgaagatgacagaactgaatcggttcaattgatttaaaacagtgccacgtgattctctcaattactggtggttccattagaagaagatgaagatgatatgatgctcagttttactaagaatttccaatttgtcaattccgtagactttcaagttttggaaagtaagaagagtattcttcttgtaaattgaagagatgtatcatttcatattatgttacaaagaagagatgtatttacttcttacctagtcatgttagaggatttgtttcattatttgaaattctgattttctgttctcattttttgtataccgacatagtaatcttatgttgttatcatttatagaagtgaaaatatctactgcagtattgttgaggcgcttccaatagattacccttgaccttgtgggtcctttatagtagttagaggcatcacctctttttatgggtagaaattggatttggattgcatgagaaaatgttggcatagagaatcaggaggcagacatggattggcgctgtgggagcaaggtgatggataattagattcacccaatggaatcatacagagaaaacttaaagttcacatccatgtactcttgtggagttatgcatagcatggtgatagtttaagacctcatttccgtgtaacttgtctagaagttatcttcctttctaagagttgaatttcaaaagtgtcatagtatcttccagtgagatttataccaggtttatgtacataaactttattctataaaagattaatacacctatggggatcaaaattaaagtgtttctgcatgatgaagagatgtgggacggataattatcactttaccatttttgtcagggttgaagagtttccttgatagggctaatttagttgatcaagctgtggtgaaggacaaaatagatgcatgttaatggggcttgtggatcttcaaattgactctcagaagcatagcagatatttaacagcatacaattaaagcacatgttgaagtaaaatctctcggtttgggaaacttaaaaatgttgatagagaaattaaggttggccattcttattccctctatttgttgctagattttggagatacataataccatggatggtgaattaatcctttatttattctgatctattgcgctggatcgattgtattttatcaggctgtgttaaatttgaattttttcaaaccatcaattggaacaagtgaatttgatgttttagaccaatctatttcttgagtgctttctttgttgggcttctagggcctataatcataacgttgggtgatggcaataggcagtcattgcccatatttcaacctcttccacttgtttcttttctccctgagattttgaaatagtttgtttcttgcgaggattttatattctgcttaattcatatcaaacagtgacgatataaggacagaagacaagtttggctctagtaatataaggatgggctattcatgaattgtcatggcacgttttcaaaaactagtatcttttaactattcttggaatttgaaagcaccatggtttaaatgatctacaatcagggttagtacatgctttgtttgggggcagaacactagttgttccagtccattttcaatccagcggctacacttgattcttattcacttttgattgatgagcatcatggtggtagaggcaatgggttcaatttgatcttggcttggagaatactgtgaaatcagcccttctgaggagatagagggctgggatggcagatattattggtattgaaaagtgtcaagtccttaggcattaaatggaggagcttacaaaaggtaataatgaagaatgaagcaaaacatcactctgctggaagggttgggaaaagattggtaggacgttgagggttgttatgaagttgaaggatatcaaacggaatgttagagattgaatgtccagagtaaggcaaatggcagctgaaaaaaaaggaaaaaaaatgaaaaaagagaccacaggcataaaggtgattcactgaaagccaatgatgttggactagagttagaaggatgcagttgctagctgagttttgtggaagcatattggttcatttctctttgtactttagatggtttcaattgtgtctttgtaggtatttgtagacctgctggcagtttggactgatccattgtgattgaaattgatttgtattggagatgtgggttttccctatgtgcaattgtggtgatggtatgtaaagactttcctattgaaggctgaaggatttatgaatcccttcggtgatggtggctttcactgatgattgttgatccatttcgtctagttgattggtagttggaaaatggccgtcttatttggtaaaacaataggttgtctctagaaaaacaactcatcttttgttgtctcttttcaaaaccatttatcaatctttattttagttttagcttgagctgtaataattatatttacttatttatttatttatttttttggtgacgaatttggataatcaaatttctctggttctttcctggtgtttgtaagtaaatggtcattgttctgtggaatgttaaaactggaaacattgtgttgctactttgcttagagtacagaaaccttctcggtgctgatagctttataaaaagaaacttgttgataaatgtttagaattgtttaacagcaacaataccagttaaatttgaatctaatgtttcagatatagcactaaaggtgttgttggaatatgaaaatgtggttttggttttcttcaatctgagcatttatcagttgcactacaaaattataatttttctttatgcatacctatcatttttttatggcagaccttccattcttgttagtgatatcttgtggcaat

SEQ ID NO: 9040 - DNA, 1745 bp, Citrus sinensis
  Intron number 3 from transcript orange1.1g025565m (locus o range1.1g025565m.g) derived from phytozome v7.0 (chr-ID sc affold00088; pos 471962 to 473706)
gagactttagaattggatttaccagctgtaatcacgtaagtactctaacctgacttttagtgttccagcacttgatatttttggggtatgcttgcttgcattttatatttctcctcataaaagcatgttgccaaggagaatacaacaatattctcttgttttctatttctgacacaaggcagtttttatatatggtcatatatgtaaaatgacagaaggcaatagtgtctatggtcctctaagtgaataccctcttcttgaattacgttctccaagataatactttctgtagttgttgagaaactaactggatttgttttcgaaacttattggtgggaatgaaaagtgaattgattacttgaagaatctgaggcctttctacggatgagtacttgtaggattgttaactaaaagtcattgttcctaagaggtaatggcctggccagagaataatatttaattgtagacagaagaatgtgtatttagtttgcctagaatactatattatttcatggatgtctgatgaatatttcaatggaaccagaaaggcttttggatcctgtgtatttggcaatactggcaaatatgattgaagttgattgtatgggaagtgatctggcttgtggacattggttggttttgaatttgatttggtctcacttgtgaaacattactaggaaaacctatttaccacaggacacagctttttaagggtgaaactaacctcctgttctcccagtgtttcatgctaccctaaggagttcctcggaaaagcattctgtggatttgtatctaattattttggacagcagaatgattacttatatcgtgtgatgctggtgctatgtgagcttaatcatgagtgccctactgagttgatcatataatcacttgggaattaacaaatagttttattgaagacataagcattggaaaacaagtaaaaccatcctgaattcccgaatttgttgaaagtactatgataaaaaccaagaggaaaccccatttctcattcaggagctccctaggtctttagttgtagtggggatcatttactaagggtatgtgtggacaggttgggaaaattgtggttgtatttgctaaatctccagcagttgaatgacaagtttaggattctaacaacttgagaaacataaaatcatattttagttcatcttgataatgctgccattgagcccttccctataaacttcagcttttactttagaatggcaactgaacatggtgtcactgccaatttgaccaaacagtctctgtttgaattctttttcaaattaattgaattataataaattgagcttgtgcttgtgtttgtagttggttctgtgtttatatatgtgacttgcaaatgagggggtgtgtttttatgtatgtaacttgcaaatgaagggtgtgtttgtagctagcaattttcacacagttgccctaaaagctgtaaaatcagttattctaaagtttgcctttcctcatcctggatgcatatacttttctttccatcaaagtttgttcaactcatgcaaggattccaaatgcttttattcttgtgagtatattgagatataaggcttcctgttgcactccatgtatatgtcttcccccaacatgcgtctgtctgcatgtggttgttttagtttgatccttttctacattgattacttttacttaatttgcactgctcatctcgtgcagcactgatttgagactcaaccaaccgaggtacgcaa

SEQ ID NO: 9041 - DNA, 1639 bp, Citrus sinensis
  Intron number 1 from transcript orange1.1g036207m (locus o range1.1g036207m.g) derived from phytozome v7.0 (chr-ID sc affold00701; pos 65046 to 66684)
taggtatgaattttacgttatttggacaatgtttaaactcatggctatttgaattgcaagagaaaacaaaatagcttaggtgctagggttacttcttggtagttctgaagtttaggactcacatttactccacttgcttagttagatgatgccttcagaatggggatgggcttaaacaccccttacaatacaattttgaggatgctgctccccccaaatttaaaatcatcagcattgttccagtttgattagcttaagccccgtccgaatcaccattaagtatttgcaaatttgagtctcagtagcctctaagaatctgcagaattagaggacatatttttcataggggtgtttagaacccaatctgattcgctcaatctgtctaatctgcaaaaattcgatctgtgattagtggataactggatataattgaattgaaaatttaaaaatccgtagttggtggattggatataaatttacttctttaaattcgcaaaaatccataaataaaaaaaattcaattttataaaaaaataaaacttataaatgtagtattgctacttactaataaataaataagttaaaatatagttaaattaatactatattatatcttattcgataataatataaaatataaaataattaaatatttgaataattaaataagcaaatatagctcaacattaaaaattctaaaacaaaacaaaaaaccctaaactaaatagaacactttagcacataacatcagacctctaccccactgcacacataagccatcgctgttttgcttcaccacttgaggtgattaagcttaatttcttactttcttttcgagtttttcaatctcttcaagtttcttaatttcttctgttacatccaagctctcaggtttcaatttatgtatatatttaaattcataattttagttaattttcatgtattgttctaaacaaatgagatttttttctttttagagtgttatattttgaaactttcgatgtattatcctaactttatctaaactaatttatctaaatcttattcaattttgactttaatcggtagtaaaattatttttatattagattttttaaatttaattacttcgtagattagacaaaattaaaaatttttaatttgcaaatcaatcagcaaaatggtggattgaatatggattgaatcaagtttgaatccgatccatcgacatataaattgaattttatcaatccgtggattggaaatttataatctgtaaaatcatggatcagatatagattgatgtccaatccacaaaatccgatccgcgaacacccctaattttttccaatgaagtgtggtgactaatttatccaactaatctagttctaaaacctttattattattattttttaaagatattagtgaaatgaaagttacgattgattttagattaaaaactattatgatggttcacattagtaggaaatgtcatttcaggctgacacaggattactctaaataatttatgttaaaaatcaacacctctaagagataccaagctccacttccaatgtgaaaaagaacacaacatgaaggcctaatagtagcagagttacccatttacgttttaactattgttcaccttttgcagaacta

SEQ ID NO: 9042 - DNA, 2579 bp, Citrus sinensis
  Intron number 4 from transcript orange1.1g008001m (locus o range1.1g005243m.g) derived from phytozome v7.0 (chr-ID sc affold00006; pos 1815608 to 1818186)
gatttgcccggggtgatctatttcaggcttttcaggttattaaatatttgttaatttactacatctaagacctttttttatgagtttgcgttatttctttaacttgtatccatcttcccataccacgagaatatggttatagtttccgtactcacaggtaactagtagcctggtgtgtacttaatatatgttatagcctgtgaaaatggttagagatgaccattgggccgtgccggaacggcagctaaatttgaggcctgacacaaccaggagcatggcacacgtgagctgtggggccacaattttttttccttgaataagcctgaatttttatttaaatttatcagtttatttattttatttgttttatttatttatttatttttggtacttggtagaactcaagactcctagaaaactagttgtccgtatccactaggctaagcaaatttaattgtcaagaatcataatgaaaatatataaagactaaactaaactattatgcttttaaattaatttattaatttgaaacatataaattgcttttaatggaacaaataaaaaattaaaaacatactataaccttaataagagtagaaaaacaacaaatctttcattaataatgcaaatttaaatctattttgatagcatgatttatagttttagaaatataaaacactaactagttatacaaatccaatttaaattactgaaacaataattaggatgacgatgaagtgtcctgtaccatgcttcaaaatttgcaaaatgatacaaatgttgatgatgaagacaatgatgatgtcatgatgttcatgttgaagttgatgatgacgacaacaatgacattgacgattaaaattgaggaatgcttttagtgaataaaattgttgtaatatgcaaatgatagatagttcagtcattagtggtgccaacctagttaagatgtgctgtaaactatagtaatgcaaattatgccatatttcattttatttgtaatttgtagcttttcatttcataaaaataaattttattttatttatctctcaaataatgttatttctaattcaattgagtaatatttgtagttattctttaaaaattaaattatcaataatgattcaaatcattcagttaaatttaaattaactcagttaatagatgtattggtttgagattagaaatttagaatacaaagcaaaatttcaaatttaagttttaaaatttgaactttaaattgttaaatttgtatttcatcctataacaaaacaaaataagaaattaacaaaaaaatatttcaaaaatattgaagtgggcacatgggctcttaatgggcttgtgcttctgtcatgcctgaccatggcatggctcatgggccaaaatgcttggcttggcacagcccattggtgggttatcctgtgttgatgtgccgtaggaacatgggccgtacccgtgggctggcacagccccttgctcatctctaaaattagttaacatgacttatgtaatatgtattatttaaaatgtgagagcgtgtttggttctctattgtgctcattcttcttctatcaatattccgctacatttgaggggataatctatatccacattgtcaaatttactcttagtaagaaagtgtgcaaaggaaagaagttttgtttcttgttccccatcacctgaaacattttttagacattggtcggattaatcatttagatcttgtctctttatccatgtacttattcctgtaattttgttttttggaattggaggcctttatggtgtctgagcaggagtttaagcttttttgaatgtttttaagaagaatatttccgatcaaccatttccaactcatgaatttttagtgtgaggtttctgcaagtataaatacccttgcttttgcattacaatattaaaacatatgatgcagtggccttcattgttgcaataaatggttgttgtatcttatgattaagcactcaacctcaagaggaatcttcaatgggatcttcataaacatctttccatataccctaacctaatttgccaggtcgttccaaaattcatttgtatctatagaactgcatatccctttttgcatttgttctttccacatttgaaaggatgaaattccaagagtataacagaataattgctgattcatccttttcaattgaaaatgcagttggtaatctttatgaacttgtatcactttgacagttacttaaaactggtgctttaacaaagagtcaatttctcatgaggaagccctctctttattaaagtgaggaacaaggtaaaagactagaaaaacacacattccaatgcagtgttttttgtccgttagtgcattggaattttctttttaaaatttttgggccttttaacttgaccttcattttattaatgaagtcttcctcattagagggctcatttgaccaattaactatcttagtgcaattccaaacaactaaagatgggcttcttgaggacttgttttatacttcattttatcaacttgagttggctggtatacactttgtatccaagttttaactgatatgtgtttttattgcaga

SEQ ID NO: 9043 - DNA, 1806 bp, Citrus sinensis
  Intron number 2 from transcript orange1.1g047760m (locus o range1.1g047760m.g) derived from phytozome v7.0 (chr-ID sc affold00002; pos 1821800 to 1823605 reverse strand)
ctattgtgagttgtagtttatggtatttaatatagttttgtttctgcttttcattgaagctgctgtcaagaaacttttgtactcacttctttttcaacatcattctgcattgattaagtcgttctttagaaaattttggaactaatcatggatactaagatttaaatctctttcttttgagtaattctcattagtcctttatgccattcatcagttacatctcatgtcaaacaccttgtctgttaaagccctagcttgaattctttatccttgttgcatctataacttgagcctcagtgctcattttggtggctctgtcttttattatgtaagatcgaaaagaggagttttgttgttcatcatccatttttctatctattacttctccatcttacttaagaatagttgtgcaatttatttggcagcatcttgcctcttgcaaggcaatcacccttatggacacctgatgctgtggtttgttcataaattggtgatgaagtcgttgctcaagaggatgtatcttataaagtggatgaaagtattctagagtgttgcttttaattcctaaattggtataatatactgaagtgaggttgaaatgcttgctttgaactgataagttgaattctcagctaacttttccctccatgcacgagcatacacacgaaatccatttgtttttcttcggcaacaattaggccagttgagcattttgtagttgtggactagggggtgttaatcacataaatctttaatctcctcatcttctgttctaattgagactatttgaagttgaatcacatactgcattatgcctgacaaatacatctgggtttatggtagtgattgtggttcttgtaataacgacttgagagatggttttataatgcagtaggcctgtcaactggtttaactgacaacagcctatatcagtttagctccacatatcatatcaaacttactgttctcagcttatttggtaaatgagtgtggttgagaccttaataacactgctcatttaaaacactgataccatgctaacagatttcatagattcatcactagtaggaacttcaacccaaaacaaggttaaacacatgtacctattaattcaagtaagttctttcattgtctgtagaataacgtaaaatcagtaaatatcaaacataaaattcatagacacaaaattttgcatttactttagattagtcaaactctggtttatgtcaatttcaaataaaggttagcccaagctcaatgtgtgaagctggccacctcagcccaattgacaatcctagtgtacagatgttcagaacagtttatgtgcacaagcagacagtcttgatctcaaagtcagtttggttctctgtctttgacttctggattctatattctttgaattgcaataataatttatttatttgtttccttttctatgaggagtggatgtttttccacagaaatgatggaaaaattgtattacacagattgtctcattagcttttgttggttttcttgacattgatagctagatccagtgggtgtttgtctagcgactggcatgtagatctgctggcaaagccttttgactgctttatctcccctccattatttgtcatttggaattctacttctatttatttatgttttctctaccttatttagcttgttcattatttgtcattttctcacacctccgcggatgtttttcatctaatgagatcaatatttgattgtccttaggacaaactaactgttttacttcgttctgaaggttgataggcatccccaatttggacactcaag

SEQ ID NO: 9044 - DNA, 974 bp, Citrus sinensis
  Intron number 1 from transcript orange1.1g012432m (locus o range1.1g012432m.g) derived from phytozome v7.0 (chr-ID sc affold00169; pos 208076 to 209049 reverse strand)
cagatccctcaaggtcacattttgctttgatttgattgttaacatttctttggaatcttttattttgcagtgtagggaagggttaatgatatttttagtttatagggagaaatgataactaatttatcttgttcaagtttgatgatccttggtaattgataacatgtagttatatttcttcatggaaacttaagagtcagcctttgttggtttaatgggtctccgaatgtcttaaagagtaatcattaatcctaaagacccttttattgctgtagttaattacatacatctattaaaaccatcaagaattttagtttggccataaaggcttttaggtttatctaaccacttgaactgattcttttgaagggaaaatttctgagatttaagtaatagaagagacagctcgtaagtgttgtatcaatttaagatttattttctctcccaaggctaatttgtttatcccacatgcattcaaatggcctaggatcttcatgctggccttttgtacttccctgtaatgtgccgtctttggcggcaaaaaccagctcacggcacctttagttggtcactattgttgctgttctatgttggggtgctagtagttaagttgatatcatttgtaattcacttttgtcagcttcttgtcttattcacttttgagattaaggtaaagctggtgaaatgcaataagtacctgtttgtcctgaaatggagctgatcaccaataatggttgtgtatgacttaatgattagcatggtggatttggttgtgtaattgaggcaatacaaacttgacctgttgatattatctattgattaatatttttgccagtatattaagctgtaaatgctcattttgggagttctgaaatttgtgattaaataagcattttcttcactgctatcaaaatcacttagacatattgcaattatttcttccaaatcgctaacttgtcatatttttataacag

SEQ ID NO: 9045 - DNA, 2593 bp, Citrus sinensis
  Intron number 1 from transcript orange1.1g000919m (locus o range1.1g000195m.g) derived from phytozome v7.0 (chr-ID sc affold00058; pos 387074 to 389666 reverse strand)
ggtagttatttttaattggagacttgaatttttttttttaattttttaatttttaatttttccttgtttttccctctatggtgaattgtcatgtcatgtaagtagtgggtccatagtcttctgcatgtaatgtgtagattgtcaaagagaaagttggtggacaacttgttatttaggaatggactacctgcataggctagtgagctcactccctttgcctacagtatagaggaccctgttcacaaagttggatgtatgaatactgtttgaacttccataggtatgttcatatttatctttgttttaatcctagttcttgactgtctttggtatccattgatatgtagtagtcccatgacgtgaccatgttaactgagactcgctgcatcttgatgttactgagtgctaaattttggatgtttatgttgattgccagcatacaggtgggttttcctctggtattgcacaaacattaaaatgttattgtcatggtatacatgtaaagaatcctttgaaagcctgtgaaaataacataattctggcagtggagaattaattaatgtttattgctgaatttgatgcttggaacagttttggcaatctctttttttaaaaagaaaagattatggtcttgaatctatgtatatgtcttcgaggtggatctccttagcataactgtaataattctaattcacagaacactaacatttaacctggatattatgtgaatacaacttggaaaaagatacaggagagcatgcttaatagtcgattggtagactattcagaatgaccctgaggatgtttgttcttcaaaccacgcccgcccccccctcccccccaacacaagaaaatttggaagctatttaattttcattgaaagttgctgtgcctttacgatgagtttagcctagtagactgctggtccacttttttctggaattcatttttggcatcaataaaattgtgttgtttctaaccagaaaaagaaaacaaaaactgcattagcggttaagtttttccttcttgcaaagaagttaaagctaagtataactcagattaagttcttcttctgccttctgtttgtgcaaatctcccccctgttttttgtgtatgtttgtgcagccttagctccagcccttaccaaatgtgaaccaaattctttcccaatcacagtgtgaatagattgaatctctggacctcttgtacacttggagaaacctaactaatcaaactaagtggtgcatgtgctatctatccaagcttggatactgaaggctgcaactactaaaataaggtaatggaagatcaaaaaataacaagcaagacgaaaagcggatcaaaaggagccagtcatctgctgtcattaacatttcacacccaagtagttttgcatttcatcgccatatttggtgtttcctactctgatttagaataatctgtctctgggttagttgtctattataaaaggctcatttctcaagctttgtaggcaggactgctagtgtttatagtgcctgagttctttggctttcttgtataatggtggtaacagcagatgacagcaaatattgtttctttatgcctaagttcttctcagcttctttgcactatatttgaaaatagtttcatgaagaaaatcaaagccaagtcctgctccctatcgatcaccagctgtaaatagggtgcacaccatgacccagtcatcctattgtcccatgaaaatgcttttctggatcgttgcaatcattttacagatattaaagcctgagaaataatagtgcctgccttcattgaatattatttggttgcagcattaggtctggacataacaaccctacaaaatattagtgccaatgaattttccctttttaggtttcctatcctttttcttcagcttgcctgcactttatctggcaatagtttattactgaacctagaagctccctgttgttcacagttgtgcaaccacgttgcatgtggtacacattgtggaatcttcctcttttttgataggaaacaaggaaactagtattaataagaacaataattacaaaatgtgaacaagaaatccacaaagaaagaaacaccccaaggattataaccaccaccttcagatgctcaaataactgtctgggcattgatggaaaattgtgacttctcagtccttgcttgaacctaaaaaatggtgattttatgcggaagtaatggtgacattgaattttccgcttcaggtcttttaacagtttttggacttcctgtgctgcaaatgagaatagcttcatatagaaatttgaagccaactccttgtagttgatgattatgctattaatgagtctgcatgtggaacggtcatgtttcccatgttttttcatgaaagattgcagggtatatgttgttatggtgataagacaaaaatttcatactcctttttcatttttacatttattcaaacttattgaagatcttctctctctctctctctctctctctctcttcaaacatgaatttgaaatttgcatttgttttatgggatttcttgaaattttactaagttcaatttccatatcacaggtgcaagaagtacccatca

SEQ ID NO: 9046 - DNA, 2371 bp, Citrus sinensis
  Intron number 2 from transcript orange1.1g003531m (locus o range1.1g003531m.g) derived from phytozome v7.0 (chr-ID sc affold01523; pos 16351 to 18721)
tcttctttctatttattcgtaagttttcaacaccgatcataattcttccatattaaaaattaggggactagtgttacattcaatgaaatttttcagttttttgatatttactttctaacaccgaatatagcttttcgatattgaaaactaggggattggtatttggggttagattttgctaatgtcactaagggggtagccaagctgacttgtcttagaattatagtagtgacaagatgggtgaaatttactagttcgacctgaaattctacttgttcaacctagaagccaatttgcccaacttgaaaatctactaatccgacttgaaaatctattagtccaacttagaaaccttaattgctgacctggagatctgccaagccgacctgaaaatatgtttgtccaagtcatgtcaaacctgctctaaacatgtcccattctttagcgaagttaagtgccatgaccttttaagccacccttaactggtacaatctgcttgcaactgttgaggaagtgagctaagatcaaggaaataactgactacggagataagtatctttaagctagaggggccatcataggttagcaaattcaactgagaactagcaaattcaactgagaactctacaaaacatcgaccgcatgaccatctacttctacatgatcttcaacaacacccaaaatcccatgaacttcagcttatttttagttttatcaattcattttccttcccctatataccaaatatctgatttaagtatcaggggatttaagccggaaccctcttcaatgtattctaaccatgttttgcggttggtaggtggagagttatgttcagatcaacgtttgagttagtattcgtctcgttgtcccctagataataaattcaacttttgagttcgtttttcaacatcaacaatttatgaccaaagttttatgttttataaataatagacatctcaagctttctattgaactactaaaattctgagcattaaattcattagaatttcggaagttgaaataccgtttctgtaaaataatgaatttctgcagtagttccaatttggatgatttttcttattggtaaaagatattcaacgattttgaaaatttattacgcatgcattaaaaaataaagtgatttctgaatgtaatttcgactctttataaggatgagaaaattttattttaaatcccacatggttgaatagaatctctacaaagttttggaattcaaaatgtttaggatgatcaaaattttaattgtttagcaggtttgatgttttcgtgtctaagatggttggggtataaaggaatactattaagttatgactacatgatgatattgatatgaatgttattctaatgattatattgcgtaggtgagctcatattattattgagatattgattgcttgattcaaattgagatgagtgaatttatacataaagtttaatatataaaaatgaaaatattagtgtttgtattatgaattggcattctatagttttcttattatgatatatctcattttttatttttttttcatgcgaacatatttttaagccgcgaagtttaatagagccaatttttaaacttattaaactgcatgactttatagtgtattgaaaattaactttattgttgtgcagcttaatagcgtgtcagcattaaaaaaatagggtgcctgcatatgatatgattttatatatttatagtctttttataatatagacatttttactttgttaaagtgagagtgttactaaaataccaaaaaaacacatattttaatacattgaaaattatgtttttttggtctgttagtgtattaaaatatgtgttttttaacctagtattctcactttaataaagtgaagatactctcaccgatgaatttctttttaaaattatacttttccaaaactgttttctaagtgactttaaaaaatactttattttctataaattgtagttgaaaaactttgttaattaattgtcttataagagcattttattgatagattatttaattactgatattgaaaaaaaaaagaaaattgtgtttaaagctttagctcgttgtccgtagttattattactggtatgattaaacagctagttgtattaccattgtgtatacctatattgactattattgaagggtatagtatcctgattgattaagagtccgtttaggagagtggtgaggtagctgggctgtcaaagcccagctactaaggtatttgataacacttgtagttgagctttaacagcttagcagattttttttttcagcttatacttcatagctatagcttttattccgcaggtgctgcagcttaaaagcaacaacacctcactccc

SEQ ID NO: 9047 - DNA, 1132 bp, Citrus sinensis
  Intron number 1 from transcript orange1.1g024160m (locus o range1.1g023147m.g) derived from phytozome v7.0 (chr-ID sc affold00348; pos 125665 to 126796)
catcaatctccgatattctgcggccaaactatccggtaattatcttttcatattgaaggtcctttctcagatccaaatcaatttctccttgcaaatatatattcttgatctgtttttgatattggttaatagtgaatatgtggatttaaacatgattctgaggctgtacagttaaatgggtttttgggaattaagttttcagtgatcagaatctgaaaattgttgtgttttgagctttcacggctgatttgtgaagtagggttttgttcttgtggcttgtagaggcctaaagtttgtatcttatttcttggggaattgagagtggatttcttttttggcaagttatgcatttttataattgaaatgtcgatcatgagaagaagttgaattgagtgatattaatgttaatgtaactgttgaatgtcttaggagacctactgaagtttaggatttggttttttcttgagaatgctcgacaatgacaacttcttgttgagatggatttggattcttgacaatgacaacttcttgttagatatgagatgccatttgataatcgtagctggtttacgatttttcgtatgtgtttgcatatcagtttctttgtacaatttatgcttgtttttgtattttgaattcattgacaccaaagtatatacaatttggtattttttgaatttacttctaagaaactagccctatattttcttagtgattttgctttgctttttcttttttgatttcgggtaactgtagtttgttacaccttctgcttcaatagtgaaatgttatcattattgagcagacacttgtgtctagttgtttcctacgaaagggtattctggaccttttgcttctgttgagttcttaatgcatgttgaacacagaagtgtcttcagcagtctaatttgaataatagaaattgttgtttacggtttttggtagaagctgtagtgatgaaagttcaatagaggagtcaggtactgtaagttcttttagggatttgaattttcttttgatttgatccctttcttcttcttcttattcaaatcacaagttaatgattctttcctctttgttggtcctaaatgatgcaggagctagggcttctagaggaagagaaagttcagta

SEQ ID NO: 9048 - DNA, 843 bp, Citrus sinensis
  Intron number 1 from transcript orange1.1g029998m (locus o range1.1g030037m.g) derived from phytozome v7.0 (chr-ID sc affold00020; pos 1264693 to 1265535 reverse strand)
ggttattcattttctgtgaatctggataagcttctgtaagaacctaaactctttttttttttttgaaatgattataaagtaaatttttattcgaggccatagatcttgatttaactttttgtttatatttttctctaatgaattgaaaaacaaggaattaggtactttttccttgaggatttaaatcttatttacaaatctaaattccttgcttttatttttgtgctcgctgtttctctcgcaattggaccaatgtgattgctgtggttgcgtcttggatcaggcaccatagtcctgtatttgatgatattctgataatatttatttgaattcatagtgcaaattttgtcctttatagtgaagtaaaattgtttgagggcagttaattatatttccattttaagttacgataattgtttggttctattcttagtcatttgtgttttgcaagttgatttatttatttatttctgataaccgtgagcttaattgggtacaactgtttaacttgattgtatcttaaattagatgttactcatatagttgtgtcatcaaatgtcttgacatactgatttcatttattttatcggcagacttgtcacctgttccttgtttgagcattggacaaaagtctgaggtttctgattctgtgatatttgttttactgtctcattttgctcggagcttgtgtatctctgtttggtaggtgcttattctttttattttatgaacttaaactgtataaagatcattacttcttcatttgcactgcctctgggatagagcgttgatctatataatggatatataacaggctgtgatttaaattgcataaagatcaaa

SEQ ID NO: 9049 - DNA, 4093 bp, Citrus sinensis
  Intron number 1 from transcript orange1.1g039592m (locus o range1.1g039592m.g) derived from phytozome v7.0 (chr-ID sc affold00238; pos 110285 to 114377)
acgctgaagggtttagcttgggagcattccttgtaattgtgctctacttatttctgtgtaaactagtagcatattaacaacaacagcagaatatgttgtcatgggtacagttctaatttagatactaactgattaattgactagatataacaagtcttgtgtgtgaaatttctcatccccatctaaatttaaagacgaaaaaaagagagagatggataatatataaaacaggaactatgtgctcctttttattataattaccaaagaaaagcaagaaacatcccaaagggcatgcaaagggttatattatgaaaggatgagctaataggtaatagctatcctccccaaatacagatcgaaaacacgcacattaacacaccgaggggagacaaacaaacaaacaagtttctcaccctttgaaaatagcaaaatagaaaaaaaaattttacaaaattaatccattgaactgttttttgttcgggtcaatttcgtattacctcttgaattgactatctttaaatttctctcactttcaaaaaatctcgagttatctctattttcattcaaaggataaagaaaaaaaatgaggtgggttaatgattttcttttcttttttcctcgtgaagataaattaaagctttcaaaaattaaaataataatttaaagatagttaagttaccagcaataatccaaaattagctctttttattttttatttttgacaaagaaaacaatatcacaacgtataactgcaacgcttcaaggggattgtcgtaaagcgatgtagcatgttcagggacatgaaaaagtaaataggcatatttaaaattttaagaccgtattgatagcagagaattttttttttttttattaagcatcatgttactgtattatattattgtattatatagatatttataactactatgacaattgatcattacacttatatttacaactaaatatataactagaacttacattattacatctgtcatagcattacactgatatttacaactaaatatataactagaacttatattattacatttaattatatgaagtacatacccagataaataatcctcactgaggaatgatgtctctactccaaatatataactagaacttacattattacattttgtttagggaaaaaatatgatagcagaacgccacgtgtcgatgtatggaataactccaatataatccgagatacccggcatgattcgaggtaccccgcacgaatagagaaaccctacatgattagaaatacccggcataattagaggtaccctgcatagatcgggataccccatataatttgaggtacccgacagatccgactcaggagaatcctctgaaaaagtctgttatgggaaatatctacatatcttgaaggataatatttgagtttgctagaattaaatattaaaacgtcgtactgaaaagggggggacaaccacctgccacatttgccaaaagtgaaggacattgtcccaaggacagtggtcctcagccgcctacccgacaaccactgcagaggtaccttggaccactctccagcgtgcgccacatttccaaaagatgagatacgccgcgaacatacacataacagcccaaaaatcataaaaaggtaaaaagacgttaaccaaaaaggatacgtcacgtggcagctgaggtactctatatctaaaggtggctaggttttagtctctatcatgttctcattcactcatgaacactcacactctacaaaataagttttcttcaaccttaaaccttgacttacagagggctggcaagctctctttgccataaaaaaagcttgagtttgctaacttgagtgtcggagtgtgaacgtcggggtaccccgacttcacctctaacctctatttcactgtttttcaggcgtgaagctcggttcgaaggacatctttcttggtttaaacctttcaccattgttaccactccctcttcctttctcacctccccgaaattcagatacaccgcacacaataaaccagtgaggtacctcgttttcctacaaatacaaattcattgttctagataggtttacctttttctaccccaaaatatgttgaaaacacatttaattatatgaagtacacattattaaatttaattatatgaagtacatactcagataaataattcttactgaggaatggtgtctctactccactcgcattctgtaacatttttttataaataatctccacacaattaaacttaattgagggaggtttttgagtccatgagatctcgaaccattaccctcaaagtcatgcttaactttaagggcaatgattcaccactggactaaaacccaagtagcatcgatagcagagaatttaatcatctttctaaactcaacataaatctttttgtccctaaaatttaaatcaatgtcaacaacccatcctctcaagcgcacaccttaacaatgggcatttatgtttgaaaaatatcgttaaaaaatacttaatcaaacacagctttgtaattgttctgaaaaacatttctatattaatattccatctattaccttgattactgcattttgtttagaattgatatttatcaagtattgtttttttattatttagctaacttatgattaatgacaagttcctttttttttttttgtcatttccgattaggccttattattattattatgattttataatctatatgcacctactataacaatatataattactatctaactgcaagttgttcttattgaataactactaattacaacattataagtacctatcagcacttaatccaaatgcattagaattacaaagttttatgcttagcctaatctttagctttctaacaaacttaacatgttttaaaactcacaaatttaacttgttctaaggtttctcgttttgtggttttcatttctctcactttgtattcttataaaccttattgagtttaggatatataagagatttactaaaacttttaaggtttaaatatatatataagaaatatatatatatatataagaaatgcacaatgagatcatgaaatgaacaaatatgcatgcgtgagtatatgaccagttagttatactaacctccatttcaaatcaattgacgacggcaagctgctgctgaataatatgctttcttctttgccgacattggatttggacttttatgggaaatattgaccaaaaaatttgttagattaataaatattgcaataaataattcaacccaatcttagccaatgaataatttcaccaaaaaaaagttagacaatgaataaaattaagaattaagaattatattgttacaattataaattacaaaaaggttctgtagattgaataatccataattgttatttgcacgtctaaattagtgtgtgtattagcatgtttaatttttaattctgtttgaagatttagaaaatatttattaaattataaaaaataaaagtgtatccatgaactcgagtattatctattaattattaagcaattagttatgatctacaaaattaaatcaatggtaaagattcaaacaattaagtccaaacatccataatgactccattgtcaatactgtaagaattcgtacaacacaaaaaaaatccaagatagagtcattataaatttataatcaaagggtgtaaatgttaaggaaaaaaaatgagtttctgtgacaatttttaaattatcgaagtctctgtgtagctactaaaccttgtgttgtaccattttcctaaaagaaaaagaaaaagaaaagaagaaagtgataacacatggagtgtacttgttccatgtgtgcaattatgccgataattcctcaatccgaaaaatcttttgaaaagcatgatgatcaaattcaatagcactttcccaggtttccattttgctttaaaatgtagtagaaatttaagaaacttcattgagtttaaagaacaaacaaagaagacaagttaattcaaagagacgtagcttaaaggtgtaatcagaattcagattaaataaatggatttcaaggcggcggcggcggcggcggcggcagcagcaaaaca

SEQ ID NO: 9050 - DNA, 1886 bp, Citrus sinensis
  Intron number 22 from transcript orange1.1g000257m (locus orange1.1g000257m.g) derived from phytozome v7.0 (chr-ID s caffold00013; pos 1134676 to 1136561)
gctcgtatacgggtatttccttcttttactgaaactgctgccttcttcttaggagagttatatcaataaattcttagctgaggtattaagggggatcacagtaatagtctttctaacagaaattggaaggctgacttttgttatctgacctaaccacaaaacgataaagttaggaagatgtaagatagttgctttttgccatgcttaggctagagctttccttaatttaagatgctttctgacttgtttaaaattgaacttgaggggaattacatacagaaaagggaaaaaagatgaaaaagatagaatcaatggcttcctttcaggaagttctatcaatggtttgtattcactgggttatccctctgctttgtttttatttgacacagttgactatattgcgtgttcttttagagaaatttcagactttacttttaaatttgctgtagtgtttagttctgtatttaaatctaagtgagaatgtaggatatgtacatcttgatatttcaccttaaaattctacattgtcatctacatagaagtgaacaagaatttcgtgaaaagagaaccctaggaagtcataaaatgatatatacaattgtatacagagcacctgtgcaaaataaagcaaatgatctacaggactgtataagcttagtaatagaggaatatcgaaattctttagtaataaaggcccaaagtgagagtagtaagatcatcctatcccacaaaaagttgatgtttaccttgtatcttcaactaacaagaattttgagcttaccttgtatttgtcttggggaaaaaaattattcaatgaaatagacaagaaatattttatccctttgattgcctgcttgaacattagatttacagggtgaatttacgtttatcagtttatgtaaaagagataatgatctttatgcggacacttttgctgtgatttttcattttctctcttatatttttgtttttgttgttcttattgaccattttgcttttatctttttaaatgtttttctgacaaatgtaattttaattaaagtttatttttatttttttcagagcatgctattctttagaattttttttggccccataatttttattgagattgtctatggtcagaaagatattttcatgtttccttaaaagtggtttgattacttatgactcttttttaccttaaatatgtgatatacctattcttccattagaaggttttgttatcctgttatgttgatcttgcaagctgttgtacaatgtgttaaataattcttccatggagttaaaattcatggaaattattctgttgaaacttttggctgaagagaatcatttttggcttcttgctgctgcacagtcatattttaatttgagacactgcatgctagttggtaacaaagatattgtctgactgtatctctcttggtttaaactgctattgcaaactttaaaataatatttgtcccttttgattgattcttttttccatgctttcctttgattcagacgctaatgtttagctgctttacgtagtttccggttgttgtgaactaggatatgcctaaatgtgttagtgggcccttttgctggttgactgcccagtagctacatcatgtgtatatgcttaattcaaacttttatgggaaagtaaatcatgagcattgctagatgcagaggcatggcttaatattatatatcagtgtgcatagacatttgtaccctgggacattgaaattttggaatgatcagatagactttgtatgtgctatcctaacaaaatggtgaacttctctaattgtgttccctaatgtgatgcttgctttctgccaattttattttagttgtgtgcaattaacgttgggactgatgtttctgctataggt

SEQ ID NO: 9051 - DNA, 771 bp, Citrus sinensis
  Intron number 4 from transcript orange1.1g030764m (locus o range1.1g029554m.g) derived from phytozome v7.0 (chr-ID sc affold00530; pos 57672 to 58442)
atacaggtaagcatatttttgttaccagattaagtgttaatatcaagtctcaacttttctatgcatcgattgtcacctagtattgaccagagtgagtacgatgcatggtacagatgcaatacaaatgctgttggaagttaaaactctatcatcaatggaaggttaggtggaccaaattcattggtcttatatacaataaactagagaatggatctggagttcaccaccatgccaactataatcttttaataacttacaagcatatgttaaataatttaatcgcggctgttagtggaataagattattatctcctattggccttctggaaaaactacgaagttctgctcataaaataataccaagcaattaataaatcaattaacttaaaagatcacgtaatagtaaatagtgatttctgcatatgctttatgatgaaagtaaagcagtaattctccacaagttgataagagtagcactctttttcaattatcctttttgatttgttttatattcttagattttgatcttgatttcttatgtaataagtttggctagtttttttataccttgtaccttctagtaatcgtactatgttgcaaaaattcaaaggtaccgctattggcatattttctctttcttgtcgatatacaactactatcatttttcacttcacatattcttattttcttagtgcaaaatctatgtacacgtctatgacacatcttcatgttctttgaatttatgacagtgtagattggcattgaagccgg

SEQ ID NO: 9052 - DNA, 2266 bp, Citrus sinensis
  Intron number 7 from transcript orange1.1g015359m (locus o range1.1g015359m.g) derived from phytozome v7.0 (chr-ID sc affold00370; pos 160862 to 163127 reverse strand)
gaggcaatctggctttccattcaggtatatgcaacttagacgcatttttaaaattagctacaaatttcttagaactgaaacttcaaagcaaatgacttagattgttacatatcagcaaagagtttttttttttaaattttaagaatcacattgtagttgcaaagaatagaaatgcttaattctgagatcatgatttcctgattcaagggtttatccaagtaaaaattacgcttgtgattggtaatcagtaaaatatatagaaaagggaacaacaaacgttgaaaaatccttcgaatctgaactgatccctaatcgagaggatcaaagttcttgacctctcttcttcgtcttgtcctatttccccatatgagattaagatattgataaacatgaggactctgttttggataggaacatctacaattagctgctggttggttaaaataattgattgaagagggtaataaacctttatgtgctctatatgcagaaagtcctttttattatcacactaacttcaggattgagatctttttgagaaatatatgaaaaaagaaagaaaaggcaaatagttgtggtgttagtgttattgggcttaaaagcaagattgaacttttttagggtggttgtgggaatcacctcaagtatagattttagtgttaagagattagtcatcattctcacaacatagctgtgcatttaccataatctcttggcagttaatcattttagtgtatatacttcaacttgatgtgttgaattggttttgattgttgtcgtcaagattgcctatacaagatgatgctctggcttaagaattggaatgaggtatcattctatgggcctctttcgggatttgtggttgccagaaattgtgcaaaatctcctattagagaagggctgtgcgtgcttgttcgtatcaagaaacatttagatggttcctagataactaccatgtattattgaaatatcataaaaggggcacaaggatgagcttacaatgtagcactttctgctttccttttggttgtaaatgaagttctaacatataaatatacaaaagtggcaattcatgtctgattatttgctttttatcaatttggtaaatttgttgggaaaatgtcaaatctgatttcgaatgggtagaatatattggctgacattctagaagagttgttggtgcatcataatcatctttatgaagatcttgattttcagagcattggatttacattggcatgaacaccaatattgacatacacttaatatgtatatgtatgtatacatgtatacatacatattagtatagggaaacttaatatgtatatgtatgtacacatgtatacatacatattagtatagggacatgtatgtatatttatatataactcttctcgttgtggacctctggaaccttctgaaattcggaccatgaatttacagtaaacaagtttttataaggacaaaaataacaaaactgtgacctgagaattacagatatatatttggtttcctagattttgacttttaatgtttcaggctttcctggtattgcgtattcaatctactggttggttcatgacatgtccctacagtttctttctgccttttgtttcttcctcagtccgtttttgtttcttttccaaagcagttgcaataatttgctccttgaggcagaataaaaagtctcttaatatgaagctactttgttggcatttgaccgtcagttttttctatgattggagatgattcatagattgtcgtgattgatttgcatggctggaattttaaaaccattctggaatgccaaatcatttattgggtgcaagatcccttggagcacgtaccattggggcggttcaataggaccttgatatatcatagctcagtttcttaatcagatgaagtttctggaggagtttatatttttgtacctttattttcttgtaaaaggaatttttgcttagagaaaatggccttatttcagtagagattttcatctgagctgaataatatgtgatgcctttaaacttgagggggaatcattctggaattgtagaaatgatcttttgtgtaaatttatggtacgaactgagaagagacactaaaacagcaccatgaaatctgaaattttacaattttaattattgttgaacgaatctacagctgtaattggcctagatgttctgacttctattttgttttcctcattatccaagttgctttgatactttgtaatttctgaaacataaacttttgcaggaga

SEQ ID NO: 9053 - DNA, 323 bp, Citrus sinensis
  Intron number 3 from transcript orange1.1g037202m (locus o range1.1g037202m.g) derived from phytozome v7.0 (chr-ID sc affold00002; pos 1035359 to 1035681)
tgaaggattctttggtatgcctttattctttttaacttaacttgattttacttcttctttttcttgactgacatggaaaattataatgtgctttatccgctgttattttgcatgggatcttaattatcatgtgctttatctgcagcttggctgccacatttgactgctttcttgttctaaactgttatttacttgctagccacttctttgtagttccacagtcacaaatgattatttcatagactcctagattttgtgtccaaatgcttatcttatcctggaatattctttggtctgtacaggctaggttgatcgtggaaaac

SEQ ID NO: 9054 - DNA, 706 bp, Citrus sinensis
  Intron number 5 from transcript orange1.1g016826m (locus o range1.1g014813m.g) derived from phytozome v7.0 (chr-ID sc affold00064; pos 372194 to 372899 reverse strand)
taaggacactttggcggatagttcttccactacaggcaagtatattgcttcatttattccttattgtaggtagtatatgcaaatgtattcattctgatgattttatattctaactgtgttagttgtggaaatcaaacaatgagtacaattattgttgtgctggccttatgtttgttagaattcaacctttttttttattgggggaaaatcctctttgatagggaaaagaaatcgtgttttctgatattaatagaatggctaaaactactaccttcgtgtaagtttctttctcaaagtaagtgaacaacgcctttcaagaaagaaatagaaggtgtacaatgtgcatgactgactgcatgtataaatgtttgcattatgattagagtgttgccaatcaaccagctgaagatggctggaagtacttgatcccatagcttccctagtggttttttgtgaaatgttgttgagcgactatattactaacaatagtctgactaggccagggcatttcttaacattaccgagcataatctccagtgggcctctgcatttttcgtagtacttggagaaaaatccattttctggtctcaattaatggtttgaattttaagtaattttaagtagttaatgtgccgtgttattcttaaatttctttaatgtgatgtatacaggcaatatctttttctgacttcttcttggctgatat

SEQ ID NO: 9055 - DNA, 467 bp, Citrus sinensis
  Intron number 3 from transcript orange1.1g020156m (locus o range1.1g015401m.g) derived from phytozome v7.0 (chr-ID sc affold00009; pos 1987777 to 1988243)
ttggggcaaatattcttattcgttatttgggtcatgtaagataatgatttatccatgctcaatttttggattgaggttcagaattttggatccatgttgcctcttcttgtctttgcataattgctgtgggcatagtgcaccacttgtgtttatgtttgctcatgagatagatcccttctaatgtaatacctattccattcctcaattatctccataaatttgcagccattcttttttctttaatatatcgttgtagatagaggtaatggtttccatgatttaagaattagcagaatgttcttcattattatgcattaaaaggtgctttgatctcaaagggtcctagaagagttggaatgttgtaaactgttctgtctacctggtctatataattgaggctttacttatattttcataatgtgctatttgcaggaatctcacagttgccctctttctggggctgtttc

SEQ ID NO: 9056 - DNA, 1798 bp, Citrus sinensis
  Intron number 1 from transcript orange1.1g019300m (locus o range1.1g010895m.g) derived from phytozome v7.0 (chr-ID sc affold00027; pos 1002583 to 1004380 reverse strand)
tcgataatctccccactgggtgggtaccatacagaacaaatcaataatatcaaaataaaaccaaaaaaaaaaatctacttttgtttcgtttcctatattatcggatttatttttgttagaaaagtattttttttgggactatgattatcattattttcatttatcgattttttattttgtcttatttggtcttgtctaatttaatcatctcatatttaataagtgattggtagataaatttttctcttggtgtttaccacacgacaacggaaaaaaggaacaaggaaaaaataaaaatctattctttttcccaccgtgttggattcttttaattaataataacttttatatcgataattttgttggttggttgcgtaattgatcattattcaagaccctttttttaaaaaaaaaaaaaattgggatattgattgtaagttgtaatttatcatttatggtattgtttttgtatgatttcaattggtatggttggaattagtcgtatttaatgtttgagctgatttatcagatttctgatttctatcaaattgatagattattattggaactgccaaaaatttatttttattcttgtttgagagctcttattatatgatggaaaaatgagaattctttgtatgttgttctgcaactcttctgtgtgaaagaatcttttttggattgaaagaaccactacccatgctgtggttcattcaaaacttgctgcaaatgggtccggttaattgttctaatggacatttctgatcggaaaagcatattccatttctttttcaaaacttacttttttgtttgcttgggatttgggcaatttctcttttgaaggttagtaaatgtagcatttgctttttcagctgcctaaacactgcccaattggtttccttttcttatcgttcatcaaataccaaccatcacttattttattttttaaattaagagatcttttactttctgaggtatagatcaccatccgattattcgtttccttttccattttaagcatataattggtaattgattgtaagattcttgtagttttcctacagctttggttctctcttttggctgtttatatgataacgtgatggtttggtatagaggtacttttaaaagaacacttaagtggaacgacacttcacactttgaaagataagcatcaattggcataatttgtgatgttctggtttttccttttttctgtatgtttatgttgtatttgttaaggactacctcgtcatttctctttataaaaaatggctctaattttcaaatttatttgtaccttatatactgaaatatgagattccgtcagtaatttctattacattggaacactttggctgagggtctttaactaatgatagtttttgcaattgactgggatgaaagaactgctatgccctagatgcgtttttctgttatttttacattgaatatatgtagtgtgagagggtaaacgtccttgatttgagcaattattgctctttgcagagaaacacgagcggtctcctagccttggtagtagggttcctcataattaccatatcaatggttgtggatgaaatatgttataacctctaaatgaaaagtaaggatggaaaaggatgggataaaattggaaattattaaagagaagtggcaagtgttttttaaataggacaattgttttcttacgcacagttttttcctgctgaaaatgtaattttagttagatgatttttatttttgctgatgatagctgttgaatatgcccatcactgccacccttaattttacaggg

SEQ ID NO: 9057 - DNA, 4645 bp, Citrus sinensis
  Intron number 1 from transcript orange1.1g010476m (locus o range1.1g010476m.g) derived from phytozome v7.0 (chr-ID sc affold00047; pos 210364 to 215008)
aaatgtatgccggtttctgcgccgccaccggacaacttgttgaaaatcataaaatcctgagttggagcttctccaattaattttcctttgatcattttcttaaaaatatgtgcgaataagaatcctttttgttggatcatgatgaatattagaataagaagtattctttccatatatataatcttcttctctcatggtttactaactgcacttgttattttttttttaaaaaaaaataataacatctattattagggtcaagaaagaacaacaatacaccatcataaaggtacaaaaataaggttagtcttaggtataatatataggacaatgctcaagggtcaagcttaagttaaagaacacccaacaacaaagtaattaagaattataattttaaaaccgaaaagaagtatatttattttagcagtatatacaaagtaaacatgtcaaaatgctttctgaaaagaaaactaattagcacatacttattcttcgtagactaatctaaaagggtagtttttagagatctcttctaagattaggcgtattaacacttagataaaaagtatgatcgtggttacatatacttcctgtatcgtctgtacttaatttcgtatatagattagccaatataggagggtaaattagtaaaagctcatttaaaattgaaataaacaaaaagccgctttaaagatgataaacccactgaaacactaaaaaaatccggatgaaaatcagtaagccattagccaacggatgggagaatgcttgttgttctctttcattaagctaactcatctcaataccattttctctttcaatcaaccgaagcatacgcacattcctcatctctaaatgctttgaagatggaaaaaaaaaatcaaattttaattgccaagtcccgcaaatttagcttcttagatttattaacaacaaaagcatcggtggtggcttaattgtggtgtcaggtgaaaatcactggcgttcggcgtcatacgtgactgtcattaacttgaattgaaagaaggttagtctttgaaaaaaatttagatttaatttttttgttttaatatgtattatatttttaaattaattagaattttattttgttcaatcacagatcgggctttttttattggttgaaaatgaaaatgggcttgttgaagtgttagagaaatttttggcattgtgttgttgttcattaaaaaatgatactagtttgtggatgtattgaagaagatgcgtgttgtttgttactttcagactttagctatctgatttgtcaagttatgagctaatcaaaacatatgatgttagaaattagtgatttttaggtgagttctttgtcaaataaaaatggattagcactgttatgaaggatatggatgctatttgggagaattgacttcttaatatgtgcttgaactaaatataccaatgcacattagaaattagtgaagttgttgtttgtgttgtgatgctttgaagaagttgaaaaggatattgcttgtgctccttaaatgaagaattttttgttgcttgataagaaaagcattagtgacaaataaaatgaagaaattttggatgatgtttgtgtaaaagatttaaattatttgtcttattgaagctgtcctgtgtttttatttgcgacttaaccattaaaatgactatgtaacattgattagaggctgcatgtgctctttttatgaaggaagcagtagtggcattcctgatggggtaatgagatgctaagatgggaatgtatgaccttttaatcatgttttcgctttaaatcgaagtgactacaatccctatgtcttctaaaaagaaacttaatttttctttaaagatgtaaaaacacatcatttccatttttaagtgactatgataatgcttcaaatgaaagttggtgttggtttttgtcaaaatcttttgttaagcacggtgaaatgattcaattttcatcgaatatgcgaaagttcctaagtgaataacttgtggtctcatgttatttttttagatgatgctcttgtggaggtcaaaaaggaaaagagagtctttgtgaaaaaacaaaagcagagaacaattatgcctttctctaattgtctttcttttgacatgtatatcaggactagtgtgcacaactcacctttattgactaaataatttaaccatgaacaagtaaaaatttaatacttttcctactgatcgtatgtgaattgaatcaactgcattgaaaattttgatcaaagcaaaaaaaaaaaaaaggctttcagccttcattacattcgaaaatagcaagtaggaattttgcaagcccaactgaaaaggattaaggtaacctgactcttcttgttctagattcttttttctttctttgttctacttcccatttcatcttcagctcattcactaattggcaagaataactggaaaggaagaaggtagaatatgctgaaaatatgaaaaataacgtagctacatatcacaaagaagtagaagaggaaaggcaatggttgaagttagtgattaagaataaattctgaagctaaagaagatggttgaaaaatatcatgcaactaagatcactttaaagatcaatggaactgaacaaatgttaacaatgggatgttgtgcattagaaataccaaatttgcttttgaactgttgtattatgttcaatttttaaaatttatttcactgtatagtatcactagccctagttttccagcaatatatttattttctttttacaattgatgaatatttgatgtcaaatttttatttcccaagggtgttaagtgtaatgattaatttaatatttagcaccaagggtgtttaattctttttctagaaccaagggtatttttgacatatcactgatcaactaacggtcaaggaaactgagcacagacggcaagggaggtctctgtgattatgatgatactttctatctaaatgtcaatacgccaaatctcgggggaggtacctaaatctaaaaggggagtcttttgtttcatttttttggccattttctcggttttataactattcttatcccaaactgaaaatccagatagatacgaatggtaactagctctctatcgcttcgtcatatatcacaatgaaaaagcagttatgcaacttcatttttcttgttcattcattgcccattcactgatctcaaatgtttgctgataaattcactgtccatgatctaacaagtcaacttgtatgtttttgctttggttacagaatccttcaaccatagtgctttgaggtgattgtttacatatgcactttgagagcttatattttcgcaatacgcaagaatttttctatcatcgcgaagcattcatttaacctgtttcaatggtaatttcattcacgggtcatataggaatatgttttcctctttaaccatactagcaaacttatttggtcagttttgttaatgattataagggttgcagtgattgcatttggaatacattcagtacactaaaacatacatagtacgtgaaaatggagttagaatttctgtaaaatcagactagcctttgcgttcttattttattttcctagatatcgtctctagtacaaattcaaccatgctcttagcaattaggaaaatagttcaggtcctgctaatgtaggcaataaattaatttgatttgtctaaattattattaaaaaaattttaatgatacatcaagaacaatacaatttatattcagtacatcaaagcaatatgataaaatttgaaaaattttggctagattgatttgtctacaaattttatctacatttagtctaacggcagctcaatctcctcccacctcaagtgggcagagttgaaacgtcaaatctctttttttcaactcgagattttaccatctcaactaaatggcacctacctctacaaatcttatttgtaaggtattatgtatttatcaatcggcaatgagtactttgtcattgctcatttggagcagagttgaattaatgagaatccatgaatactgctcgaagatatctaatgtgccctagtagtttggtctactcttcaaaccacccctccccttttgcattattttccttatttctcaaaaaaaaaaaattctctcttggtaattagtgaataactttctccctactgtttgtgacatcttttgctttatcttatccagctctttaccatgataactttctcccctgccttgtgatccttccagtttgccaaaagtatcctcccaccaaagaatttgatgcaaaaatacgggatgaagaagccagaaagtgcatattgtcacaattaaagcatgtttttcagtatcagtaaagaaattttatagtttcagtttgactttgttggaaatagtgcttcatatcaaaattgattgcttgctggatttgattattgggttatgattacattttagttgggtaatcgcataatgagatcattgttggaaatttttatttgttttattttttattttcggggctttcatttggtggacagctcaatgtgatatttttctgttcttcccaattcatatcatgctaggtgataaataatgtatatatatattttttaaatcttgtaggcaaggaggaagcaagagccagagagtggaccttg

SEQ ID NO: 9058 - DNA, 1107 bp, Citrus sinensis
  Intron number 3 from transcript orange1.1g018220m (locus o range1.1g018220m.g) derived from phytozome v7.0 (chr-ID sc affold00138; pos 260784 to 261890 reverse strand)
agcagtttagacaagctgctttccaggtattctttgggtattttttgaaactttgattcaattagaagcgatctactttgacctccttagtaaagaaattgaaggattgtcattgttgcacttaagacacactactggttcttcttcttctgttatcagtaggatttgaattttggatctaatcacttggtaataacatgttgcatgaccatggctgctaatgactggttttagaagacacaatgttgcatttttcatatgtttcatgttgttttgattgtttcttttgcagttttgaatgttctgtgaatttcacatccataatctgtactattgagaagtttatcagtaatttgatcaggaacatggaagtagttggcatttgagtggtgatttattttttccattcaatgctttccttccttagaaagaaaataattttttgctgtcgctggttctgaatttttaacatcagttggtgttcaatctcgtctgccacctataaaaagtatctcttcatccacaaccattccttttgactgttatatagggaggactgtgcactgtttcccatagaaacagagcggaaagatgtcatccaagtttgaaggtggatagtttttgtagaacagtcaaatttatatgctttgactattttaggtctatggttttcactgccatagtcacgaatatcgaatcgtacatgagcagtgtatctgcgcctgcatttgtttcctgttttgaactgtctcttctgttgggtgtgggcacccttttttttttaataaataagtagcaattataattcattttatccaagcaactgagcagtagacctgcgaaatggctgtaaaagagttttcaagatactttgttatattggtgcgttaaaacatttgggatatattggtgcgttaaaacatttgggaagatctttctgagttatttaggaaattgattgattgatgctgtgcaaattctttagattttcacctgtggagagttgtgtcattctttgcaaggttatgtatttgtatttggacctaattttcttcttataatctaattgcaggttccattctgtcagcaacctctgagctttgatta

SEQ ID NO: 9059 - DNA, 2121 bp, Citrus sinensis
  Intron number 1 from transcript orange1.1g023166m (locus o range1.1g023166m.g) derived from phytozome v7.0 (chr-ID sc affold00008; pos 2273219 to 2275339 reverse strand)
cagcagcagcagcagaatcagcaacaacagtgagggtattgtttctatttcataatcgcaattactctggatttactgtttggattattgtactttctttgcacgttttttattaattattggaaagcttatatgtgatattggcaagttgatgtggctgtacattgctaccttgttgcgatgatatgggctattatctttgtgtgtccaattattatcttcttgttcaaatatgttttctttttaaaatatttgctatcatcataaaaaattaacatgctttgtttagggatcagctttgagaaatttagatgttcgtgacttgcatttgcaggtccttctttttcatatattaattttaaattctctatggatgtttaattttcactggatctataccttttcttccatggtagttattctgtgtatttctgatcaatgatgctgtgggtgtgttttgttttacttttgtctctgttgtatcatgtcttgtccccttttcctagtccaaaaaaaaaaaaaaagtcataacttgacaaaaaagtcatacaagatagatctattctaagcatgtaatccttgacaaatacttgagaaaatgagatggggagatgacatatgatagcctgacttgaatggtgcttcataacttttccatatatagatagttctgctatgaaacctaactttactgaagtacaagtacattaattctcctttctttctttcaagttctagcttctgctgtactttgatattcctacccatgtattttgggtgctagtgtttttgcagttgcttttgtattatgtcttctccgtcttctcactgaagtatacaatagtaatgtggtacgtttattctgcatttcgcttgacctctgcaaactgtatggcgtagcaatatggttgaaagtctaaataatatacactaggaaatatcttctattgtaggcaaaatttctaggttttgagatgctttcacaccaatatgtactagtacttaccttctcacaaaggctagatattcacaactgtctgtaatttaaagactctgatcttcttacttaaatacactttagatgttggtcacatagtagttttgtcatgtctggctctatgttttcctctgatgtcatccctgatttgtttagaatccggaagaaagatatttcgaaagcattcatgaggccctaattagcgtctcttctaattaatggctgtaaaattctgtatctctttggcaatgtcccagcaagggtccaaagatattctttaggttttctgaggtgtttgattgaggtgtctcaattgtgccttaaagtctaaaaatgcagtcaatacttctaaggttgcaaatcagcaatagaagccaaaattttgccataaggccttctcttttttaccatgctggtagagaatatcaaaggacaaactcagttttcttaattgtactccatggaaaattagccccctcaattaatttactccacaaatcagaggccatgacgtagaatagaagatgattaatgcttcagtcacttcttttgcacagtacaacacaagtacgaattggcacatattcttgttattcccttcataaccatattttattccattcatagccatataatgagagatttctagtaatttgacacttgaggttgtggcgcatgatcaaactctaagtattttgccctgtttcgttgggtataatgcccaaggaattttgggtgtaatgccttatagctatattacattttttatacttttgtgagtagttttaacactagagaccttgtttatacagcatcaatgttaaatcatacaaagccctgtctttgataaccgtaaatcaatctgtcaccatttatgtccaaacacattgaaaagctgccaaataactgtccaaaatactgggatggcctgctacgtttgttccttttgttagttatctaccacattcgccaacttaatttgataatgagctctccatgtttttcagtttccatttgttatttttagtttttattttaacagtagaagttctaaatatgggcatggttccaagttgtcttgttgattatctgaatctcatacagtcatactccgcaaatacttt

SEQ ID NO: 9060 - DNA, 557 bp, Citrus sinensis
  Intron number 3 from transcript orange1.1g017986m (locus o range1.1g017986m.g) derived from phytozome v7.0 (chr-ID sc affold00026; pos 903959 to 904515 reverse strand)
ctggagtaatagcgttggccgaacacaacttgaaggtatgaatactgagaacatagtgaatcatttcaggcaaaattcaggtcagctgactgcagaacctaattaatcattttgtatcacattcttgacttttggcttattgtcaacttttcatgcagttatgcaatctaattatttaataatggaagctagtctagtatctgtatatcatagttgaataattcaattgattgggtgtgaattctagcaagttctgaccgcagatatgtagaaatcttggggataatgcgtgcattttactgtaattcttttgcattcaaaatttcccatgcgctgcatttcttttttatatttttaacaatagtagaaacgttatcgtgtgaagttatatttcttttaaatgcaaaacatagagtaacaaatccaaatgagaagaataaatttttatttatcggagataaaaattaaagcaatcagcatcttttaagcttctttttctatatatatcaattaggtagattaaagactacttattttatcttcaaaggctattccag

SEQ ID NO: 9061 - DNA, 3425 bp, Citrus sinensis
  Intron number 4 from transcript orange1.1g028282m (locus o range1.1g022239m.g) derived from phytozome v7.0 (chr-ID sc affold00391; pos 68238 to 71662)
gggagggtttggacgagcattttgtcatacacgtaatcatgaactttccattttactattttcttttttttttctctctcgttgcattaatataccgtttgtctctttttggaaaattttagttctttctttagaatatgtttttcatagatggatttcttcctcttgttgctttgttagattttatatttttattatttcgaactgtccggatgattgctatttacatagaactcatctgtgtgctcagaatttcctcatattgaaactttgatgtttgatagccttaaggaattttttattttttttttaaagtggctcagaagctaatagaagtatattagtaacagggaatgtacataggagagagactagagaagtccactaaaaataaggacaaaattgccaatgacaaaagctagaacactctaagatgagactttctatccctattaagataaaattgcctcccaagtggttgatacattctgaggcttttttgtacacaagatatatcaatcctattgatattggtatgaagaaacagccttcaaaattgagtgagttcagacgcataagtttagtgacaagtctttataagatcatttctaaagtcctctctcttggactcaaagaggtgttaggggaggccatttcttactctcaaggggcttttgtgagggatagacagattttggatgcagttttagttgctaatgaaggcttggaggagtatagaaaatgcaaaagacctggttttattttcaaaattgactttgagaaagcttatgatcacattgattgggactttttagattttgtgttggaagctaggggttttgggcaaaagtggagaagttggatgagggactgcttaaattctgtcagtttttctatcttcttgaatggtagacctagaggcaagattcatgcttctagaggtctttgacaaggggaccctttctgtccctcctattcacaattgtggttgatgtactcagcagattagtggacaaagcttaagaatccaggctgactgagggtttctcaatcggtaaagataaaattttggtttctcatctccaatttgctgatgacacaattttcttccattccgatgatgtaggaaaatttcacaatcttctcaaagttgtggatttcttttgtgcagtttcaggcttgaaaattaatttgaggaagagttcaattgtaggcataaatttccaggatcaaaagttgattgacttggcttcttcagtggggtgtgagattgggaattggcctctaaagtacttaggattaccacttggggggaactgtaggaaagctgatttttgggctccagtcttggagaaagttgagaggagattggatgggtggaagaaagcttgtctttacaaaggagggaggctaactcttatccaatctgttctgtccagcctttgttcttattttatgtctttatttcaaattcctgtttcagtggctaaaaggatagaagaggctatgagggatttcttgtgggaaggcataggggagggtaaaaaagatcatttggtcagctggagggtagtttctcaaccgcaatccaagggaggactagggttaggaaatattattaacagaaataaggccttgcttgggaagtggttatggaggtttccattagaagttaattctctttggtattgtgttataaaaagtaagtatgggttgtataaaaatggaagtatgggttgcataaaaatggttgggatgtagctgatgttgttaggcggagtactagatgtccttgggtgtttatttcaaaaaggaaaacagattttttatccaaaactaagctgatagtaggtaatgggcagagagttagattttgggaggattgttggattagggaggctgctctctgtgatcttttccctcaattatatagcctttctcaaggtcgtgagtgctccatagctagtctgtttaagtactctgttatgcagtggagttgggattttaagttccttagaaacttgaatgatagagaatctgaacaatgtgctgagatgcttgggatcctacggggatctgagagaggataagagagtttggattttagataaatcaggatgtttctcactgaatctcattgataaccacaatgctccctcattttctctttctcacctaatttagaatgctaaagtccctaccaaggtgaagatgatggtttggtctgttgctcatagaaaaatcaacacaaacatcatggttcaaaaaagaagacctaatatggcaatatttcctgaatggtgtgtcttttataaaaaagcatcagagaatgtcaatcatttatttctacactgcactgctgcttactttttgtggtctaagttgtttaagaccttcaatctaagctggtcagctcctgcctcatgttactccctcctattggaaagtttttcttgcttaaaaggagaaaaaaacaagggttctatggcactgtgagtcttggctaatttttgggttgtatggaatgaaagaaaccaaagaatctttgataacaaagctgggaaagatccttcacacctatgggacaaagtgaagttttgggcttccctctgggcatctattactgctgaattccaagacatctctttcttttttattttgcttaattgggaagcttttttatcttaagatggatgcattcttagtgagctattgtttgtgggttttgggatatttatctttgcagttttttagtgagctattgtttatgggttttgggatatttatctttgcagttttttgagtgttttgtttagattgggacttctcgtccttatttttgtggatttttagtcccaccaatccttgtacatatttcatgtagttatatatataatcttttgtttcttggttttgtggttgggggggggggggggggggaggaatcctattgatattggtattctcttttgatcactaaagcaattttatgttttttaaattggctttagttacaaggatggattttgtattcacctatgctttgtaggtttttaccatccccttgtgcacatgagttccttcttgtttttgaatgagcattagcactgatgggggaggagaaaacaaaatcgagctaaacattgattggaagcctctatagttgttgtaactcttatttagatgtataattctcgaaaagtattcaaagcattgcttccagttttaaacaataaattttgctatatcttgtattgtgaaattgtttgacaaataccaattatttggctgacatggaccattcagtttgttttacttgtttgcatgactttcagattgctatcagtattgatgtaatttaactacatattcactctccaaatctattttattgcaggaaggagttaatatcttggctgtcaatt

SEQ ID NO: 9062 - DNA, 5247 bp, Citrus sinensis
  Intron number 1 from transcript orange1.1g032936m (locus o range1.1g032924m.g) derived from phytozome v7.0 (chr-ID sc affold00005; pos 1444730 to 1449976 reverse strand)
atttcttggctgtttttgagttattggaggcgaaggtatttttattttatacactgatgtattggatcgaagttgtttcgcttctcttctctttgttcaattattgggtacaggatcttgaatctgtgctgttcgttaccgatcgggcatccgctgttgtttcttggattaatgaactgagattgattggtgactttcttaactaatttgtcgaggaattttgagggctaggattttattataaagatgatatatataatattcgattcttgacttgcttgtcggtggtttgtgaaatagattgagatctcggattattcatgcttttgagaagtattatgcagagaatcgaacagagtatatagtacatatttttttttttgctgttggtggcgaagatattatcttgaaatttgtgccgttcaataaataggcaggcggcaatttgttggtttgtgtagcgctcattggtaattgatctattgctcattattatgaagctttatatattcatataattggaatttcatggttccatttaatttattggtgacaaggtgtcattgtaggctgagattgtggattggagttgttttgccttcaattttcttttctcttcattcaattcttggttacagaatcttgaattcctgtgcggagagtggaggtttgagataccggtagggtgtctgctctaagtctcctgtgttaattaacttggaactgtcaattaatcaggaggtgtctgactcattatttgcttctttttctgcgtgtacaacagtacaaatggtcgtcgtgcatttagaggagtattggggctctaagtttcatggattaataaacttggaactgtcaagtaatctggaggtttctggcttgttatttgctcctttttttttttgcatgtacaaccgtgcaaatagtggtcatggatttagaggagtattggcgctatctatcaaccggtttttaggactcttttatgttttctcctcctttttagcttccacaattgcctttctgaatactatgatgtccagctcatattttgatcttgcgtttttgcatatgctgcagcgatgtggaaatggtttgagtttttctggaagattgggattctggggatgtgttaaagagcttttctgaccccttcttagttccttattgaaaatttctagtcaggttatgctgggctatctcactacagcagggggtttttatggcttctttattgtttttccttgtctcacttccatccatcctattcgagtgctataaagttacagctcataattttgtctttcatttttgccaatttctgttgcagtgatgtggaaattctttgggtttcggtggaagattgggattctgctaatacttgagggtgtctaatgagtttttgtccatccttccttagttaatcacttctatctatgaaacttaaaatcaaattgcgttttgatcttttgatttacgcatacttttgtgtggcagtgttaaagagtatttgaggaataccgtgactctgcatctgggtgatgtttcatgagtttttttttttccctttggaacctgctcttagtttatcacttttatctatgaatacttcagtgcagattgtattcgggccatttcatttttgtaatttttacgtttcagtgttctagaaatggtttgggtagctgaggaacatttgggctctgttacgaaggtggcattcatgactttttcttagtttactgtccgtattgttgagcaaatcttttcagttttgcaatgttctgtggcagcaatagggaaacattccaagttccaagtaacgctgggagcaagttttgaaagaatactaggactattctactcagggggttttctattgtcctattttagtaatttttgcagtttaattcttctgtctttacctaactgaatccttgaggttcgtattaactctgtcttcattttttgcaaatttcttgagagtgatgaataagtgttttagcttgccaactctccaccttaggagtttctgacaactcccttgttctttcttgttggtagcttccatctatgcctgtttgaatactataagttcagctttcatttttgtgaacttctttcctatgatgtgggttttttccccctttttcaaaggtttgggtaggatttggggatgtcattcgtccctttcttagctgatcgcatctacaaatttatctatgaaaaacccaattgtattttggtcatttgatttttgtaagtgttatgttgcagttcttgagaaatggtctgggtatttgaccacttctaggggctgatctaatgaattttttcgaactttttttaatcacttctattcatgaatattttagagcatattgtaatctggctgtttcattttttgcaatgtttaatgttgcagagtttcagaaatggatttagtagttgaggaatatctggactgctgcaaagggagcttctatgattgaggaattttctgagttttcgaagaatcaattgaccatttcacttgaggagttgtctattgtgttgttcagtcatttttccagttggtttcttttatctctgcctaactgaatgctctgaagtgtaactatgtttgttgcaaatttcttgagcagcgatggcaaagtgtgttcagtttttttggagtattaaggctttctctccactgcaggggcttctgatgactctaattctttcttcttgcttctagcttctagcttccacatggctacctgaatactatgaggtttatctcatattttggtctttcatttgtgcatctctgttggagtgaggtgaatatgtttgaattgcttgtggatcgtttttaaatagattgaaattttgagtgttatggatttatgagtacatcttcgtgtttttgagaagtgttgcagaacgctattcaaggggcttctagtaaatgatttagcttctcaatgccttgctttagagtgtaatttgatcagtcatattgccaaattgttgttgcagcttgccagtagagaattgtttgtggacatctgcgaataaagagttttgttagtgttttgcggtttgcttgttatcttatttgtttaatttgttgatgagattacatcctgcaggtttgtgttggaatcttgtttgtttgatttcaatgaggttatatgcttcaggtttctgttggaaaatactctggccaatggtcaatatagtgagtggtttgtcttccgggttgtgattggctacagcaaggcttctgcaagtttgtagggcacaaaattccttgccatttgttgattatcacttttgaagcagctgctggaatcaactatttggcaacaataaatgggggtgtaagggaaacattctaccactagttattgagcctttatggattatccatataccaagtaaatatacttctgatgtttgtcaatattttgccctatcatcagattattcagtgtgttgaactttttagcaaatattctacatggaagggtgtccacgtgtggggatcataatgctggcacgcttatcttgcgtacttattttcccctttttttctctttgatgcatcgctctgttttttgagttgatcctgtgatccgttctatgatttgtttggttacagagaattgttatagctgttccattgccccccttttctctagttgaaagagagttttggtgtggtcgaattccgagtgttgttgggcagatattgcctattggttctatacctcctggactttgttttccctttttagcttgtcttggttgctagttagccctgtgctcattttttttttttggtttgattacagagaatgatgcttcagaatgatgttgctcggttgatgtttgtagtttttatggaataccaggacttttgtctcgtggtgtctatgaacattgagaacatattcgtgctttggtaatgccattttacaaatttttttgttgcagtgttacttaaatggtcagtgttttgaggagtattgggactgctactgctgtgtctttaatgggctttttctgacctttttttagcttatcacttctactcgtaatctgtaagagaggattgtatttggtttgttttctctcttaacaaatttttgagaagtatcgtggagcattttttagacattttacttagtttttaccactttatctttgaatactttaccttcattgtgcccctttagtttggcaattttttgttgcagtgagagaaaaaaatgttccaagttttcaaggagtataaggactattctacttgggtgattttctgacagatttttagtcctttcctaagtttatttgttctattctaacagtccagtttttaattatgttttccatctgttgcaaaattttggagcagtgatggttgaatgttacaaattttgagtgttggggctagctatcatctaagggggtgtttgatggcttttaaaaattttcctctaattccttcacaattttttgttgcataggtatggggaacttagttttcaggaacattgggactgttgacgtgggggtacctatgaacttagttttcaggaacattgggactgttgacgtgggggtatcttccgtgatttttagtcttttctctaatttattatatctatattcttatcttactctgttaaaatttaagatacattggggctagatattgactacctatgtcttgctattttggaaaattgtgttgcagtgatggcagtatgcactgagtttttgaggaatttgaggctatacattgaggagtgccccgatgagtgttttgtctcttatagtttctcacttctgtctatgtttatcctgagtacttgaagaatatatctcttatcatttatttggcacaattgtgttgcagtgttacagagttgccaatttttttgaggaactttggaacttgtacgtgtgaaatccataactaaaattttctctttctcttctgcaaacatatgttgcagtgatatcattcctgtgttttcaaggaatagtgggactatgctgcttgtagtgaccaatgggtttttcttccttcactaatttattattggtgtctcagactatctttcatttcttcatgaggttcaatttgtaattttgtctttcataattgtagtattccatttttgcaaatttatattgcagtgatggtgaatgttttgaggtatttcgggattatctgctgcttggggttttttg

SEQ ID NO: 9063 - DNA, 1647 bp, Citrus sinensis
  Intron number 7 from transcript orange1.1g000533m (locus o range1.1g000533m.g) derived from phytozome v7.0 (chr-ID sc affold00151; pos 34307 to 35953)
gcccctgaggtacgccttttgtcttttaatttattatttttatattattattattattatttgcgtcatagatttatggccattgttgctttctttctattttcaaatttccctttttttatcccagatgaggttctatcaatagttgccaccattcaaggtgcatgtgacgctgaatttagaattgtttcaaaagaatatatgtttctaggcagaagatttctaaatcgaaattatggattcattttagaactatttgatctggttggaagagtagttgagaagcatgagtgtttgtgacaggtaggatataggtccagtttcctcctatggtatttgtgtacaatttgtaacagactcatttgtgaggataagatgcatttttttaactttttattttatcttcattcttttcccttatagtataagaaaaatcagacaattttattaataagaaaacacaagtcacaaagaagatgggtcattagtccaccataaaggttttgaggaaaacaacaaaaaccaaaaatcataaatctcgagccaatgcagcattcccgttgtaccttacagattttacatgatggagtttcgtaggttattctagtggctgggttccattatttgttgagacattgtgcagttgcgggagattaaaaaacgatggttataaagagacattgttttcttgatattttgtataatttggcatgaaaggaataatgaactctgaagatgctcgatgagaagatggttgggggggggggggggtgaattttaaatgatatagagcttgggtttaacgccttcttgagcttagattagaatggggtttccaggagtctctttgttcttcatatgtgcacatcggtatgctgttttgttttagctgatttttgtgctcaattgcgcttgtaacactttattttattatcgctgttctttataattgtattataaagaaacatatagattcttgtttggatgtaagatatttgcattttcattcagtctggtcaactgcctgaccagctctttagctcatcccttgtcaacactagtacttgaagtctttgtagttgaggcctttctaaatgagagctgaatcttatttttgttttgtatgtatgggcattcttctcttctatcctctttctgtagaaatttctaactaagactgtagcttggataaggatgaatgcttgattgcatgaatctcatccaggtgaaacttctcttggtgtgagactgtggcttactactcattgcttaaaatctgttgcttgctgcgaaagaacgcagaactgataatcccattgtaataaagcttgggaaggtctcaattcctaaaatggtttttaaaaatgaaaaccatagtctacctaaaacttgattattttctttttcttgactgcaatgtttggtttcagtagcatagttcaaatataaaaatagctgtatgcaacacgaatttgttttaggtgtggtgatcagttgcatatctatcaagtgtgaagtagtctatttttgctccattagtttgcgacaattgtctctgctgtgacttttaaagtagttaaaataaacaacttagatatgtgttggtatctggggatcatgaacgaaaacatgttgcaggtgattgag

SEQ ID NO: 9064 - DNA, 1309 bp, Citrus sinensis
  Intron number 1 from transcript orange1.1g010826m (locus o range1.1g010197m.g) derived from phytozome v7.0 (chr-ID sc affold00021; pos 1495105 to 1496413 reverse strand)
gtaatagatttgaatttgatcgttggtgtttacaggtaagttgaaagcattcggtttcattgttttgatattttgattcgtaattgtggtggattttgtgttctaatgctgaatctgatgatcatgtgataagaattgtgatgagaagtgaatttcgattttgatttgtgatcatgatccgatcttcaagctgaggttttgtggaattcgatgagttgatcgagaattttgattctgtgggagttgaacgatcctgatttcgaatcacttttttcgtaaatgaattgctcatttttgtttaaacaatgatatgaaacttttcaatgtgttactgtcatgatttttttttttttgaaaaaaatgaattttggtgggaatttacattggatagtggataatttcattaattttgttggttttgaaattttcttttaacataattgatcttattgttgaattgcttgctatgatcgggatttcatgaaattcaagctcaattccttacatgtgatggttatggatttggaaatctcaagtgtatctgaatggtgatcaattgcaactatagttttttcggttgatgactgattgggctttgggatctgcttcgtagatacccatcgaggatatcttattcatatatatatatatattttttttttccattttggtttctgcttgtagcggtctacttgaaacgggatttggttctggggtttaagttatggatctaattcagcagcaaagaatttgagggaaaatttttagaataaaatcagagaaatgcatgcatgtttttattttgaaaaaacattatatggaacctcttttttccagtcaaattattggagtttggatcattcagactcactgaggaagtcatgagttgaattggttctgtctgtaattcatgattttttggttctttctgtaatttatgattttatgtaccatacttaggttattttgttatatagtgatcattttacaggtctctaaagcataggttggggtgaattggatcgttttaaaattttccctttctcaaagagtgattaaaattgtcatgctggcaacaatttctggctttggcattcatatagagtttatatgagtgaaatgctttatttcaacctttgtttttgtggctgtatgtttgataatattccttatgtgttagctccattaaacaagtggatttgaggaaccccattattataaatttattccaaatcgctcaaaccaccattaagattacactgacacacggttaccttttggactaataacagtgaagtggaaccagggg

SEQ ID NO: 9065 - DNA, 1022 bp, Citrus sinensis
  Intron number 2 from transcript orange1.1g040615m (locus o range1.1g040615m.g) derived from phytozome v7.0 (chr-ID sc affold00482; pos 56510 to 57531)
ggaatattactaatcaagtggaggtatcgatctgcttaatttcttaagtcttattgagtggtctctctctctctctatatatatagatatatatgagtaattaaaccacgtaattttatatagcattgaaaactcatctatttatgaaactacatagtttagtaatgtgtctactaaaaataaaagaacgcacgcacctaaatttttgtattacaaaaatttaattttgaatgtttaatcctagattctgagtaaagtaatgttaatttaaaagggtagtataataattaggccggcaaattctgtttggcgccggcgacatcaagttttatccttttagtcttgtttgagcttaatgtagctccactgcagattaattaatttttttaaccaaaatagtattcagtttgacaagttgcctataaaatacattaacatgcccagataatcggcataaaagaacacattgaatgtatgcaatccatttttaacttagtgtagaagtagaaaatatactcaattttattacaatagccgcccacccattcatatcacgaatcttttagataaacttcttaaagaattagaaatcttagtatattgccatatgtgatttgatcgaaattttgatttgatttagtagatatatgaaactatcatattagacaatcgaattgggatgccctgcacatggcatatctcttgggaggtttgaagctcagactgatggatgtattcaatactcttccgcgaatttttcaggtgtgattaaaaattcacaataagtctctaaaatgaaaattaaaaaaaaaaaaaaacacacacacacacactcacaaattgaatcagattactagtttttgcatactgctaaaagaattagaatgagtttacattgttcataatcagataatcagcttacagtgttataaaactataatattattcgatttcttctatatgtaactctctgcaatgattttgcagaacattttgttgtgtgcccggggaagtctcaagaa

SEQ ID NO: 9066 - DNA, 237 bp, Citrus sinensis
  Intron number 4 from transcript orange1.1g025634m (locus o range1.1g025634m.g) derived from phytozome v7.0 (chr-ID sc affold00005; pos 1070127 to 1070363 reverse strand)
gaagttctcaagagcctagaggtgcttcttctcttaattcgattactgaaaccgcagaatattggattttttttttcatttttcatatttgtagtattttaatttttgaattgctcaatagctaactgctgaacacttgtaattgttacttgatttttttatttgggaatttatttcctgatcactagtaattaattaattatttatttttttcataaccaggagaaaaggttccag

SEQ ID NO: 9067 - DNA, 861 bp, Citrus sinensis
  Intron number 22 from transcript orange1.1g000208m (locus orange1.1g000208m.g) derived from phytozome v7.0 (chr-ID s caffold00095; pos 260801 to 261661)
tgttggccaaaagcccagttcctgagctgactgaagtaagctgtcaaacttattaacttatgtttatgcagatttaatttaatacattccagtttttaacattactttgagttaattctttgcaattgactatacagttagctgatatgactttgttgctctgctggggtctgggaaattggggtttcacgtagtaggaatttcttctcttatatcaaattaaagggcatagagttgaaaaatgtaatttcaatcaatcacacgcttatggatcacttgaatgccgtaccttaaattttagagatatctgttgatgtcttttgtagtaaaggaggaacactagcacaatcctcgtaaactcaaaacacgcgaaaagacgatggagtctgaatgtagaatgttatagtgcttcttgttccacagcatgtttatggatgccaatcattcagagattcttttgattatttggcttgtaacagttagttattgtcaaaatattccacaatttttcctattaatcaaaattaccttggtcaattgggtgactgcagattgcttgataaaataatagtcagttagtaacaatatgctcatggtcattctattgtgtggaaaatgcaaagtgattgagtgaataatgctttggattccaatttgtataccaactgacacggcattcatttattggatggtataatagtaattttactagttatgaaattcaccatccaatagatgagtaacacatgtagttggtatacaaattgggatcaaaatgtcgggatccctattttctgaaattttcagattaaggcttaattggcggtttttcttttcaggcatttatcaacacagagttgt

SEQ ID NO: 9068 - DNA, 2335 bp, Citrus sinensis
  Intron number 1 from transcript orange1.1g000956m (locus o range1.1g000195m.g) derived from phytozome v7.0 (chr-ID sc affold00058; pos 387074 to 389408 reverse strand)
aatactgtttgaacttccataggtatgttcatatttatctttgttttaatcctagttcttgactgtctttggtatccattgatatgtagtagtcccatgacgtgaccatgttaactgagactcgctgcatcttgatgttactgagtgctaaattttggatgtttatgttgattgccagcatacaggtgggttttcctctggtattgcacaaacattaaaatgttattgtcatggtatacatgtaaagaatcctttgaaagcctgtgaaaataacataattctggcagtggagaattaattaatgtttattgctgaatttgatgcttggaacagttttggcaatctctttttttaaaaagaaaagattatggtcttgaatctatgtatatgtcttcgaggtggatctccttagcataactgtaataattctaattcacagaacactaacatttaacctggatattatgtgaatacaacttggaaaaagatacaggagagcatgcttaatagtcgattggtagactattcagaatgaccctgaggatgtttgttcttcaaaccacgcccgcccccccctcccccccaacacaagaaaatttggaagctatttaattttcattgaaagttgctgtgcctttacgatgagtttagcctagtagactgctggtccacttttttctggaattcatttttggcatcaataaaattgtgttgtttctaaccagaaaaagaaaacaaaaactgcattagcggttaagtttttccttcttgcaaagaagttaaagctaagtataactcagattaagttcttcttctgccttctgtttgtgcaaatctcccccctgttttttgtgtatgtttgtgcagccttagctccagcccttaccaaatgtgaaccaaattctttcccaatcacagtgtgaatagattgaatctctggacctcttgtacacttggagaaacctaactaatcaaactaagtggtgcatgtgctatctatccaagcttggatactgaaggctgcaactactaaaataaggtaatggaagatcaaaaaataacaagcaagacgaaaagcggatcaaaaggagccagtcatctgctgtcattaacatttcacacccaagtagttttgcatttcatcgccatatttggtgtttcctactctgatttagaataatctgtctctgggttagttgtctattataaaaggctcatttctcaagctttgtaggcaggactgctagtgtttatagtgcctgagttctttggctttcttgtataatggtggtaacagcagatgacagcaaatattgtttctttatgcctaagttcttctcagcttctttgcactatatttgaaaatagtttcatgaagaaaatcaaagccaagtcctgctccctatcgatcaccagctgtaaatagggtgcacaccatgacccagtcatcctattgtcccatgaaaatgcttttctggatcgttgcaatcattttacagatattaaagcctgagaaataatagtgcctgccttcattgaatattatttggttgcagcattaggtctggacataacaaccctacaaaatattagtgccaatgaattttccctttttaggtttcctatcctttttcttcagcttgcctgcactttatctggcaatagtttattactgaacctagaagctccctgttgttcacagttgtgcaaccacgttgcatgtggtacacattgtggaatcttcctcttttttgataggaaacaaggaaactagtattaataagaacaataattacaaaatgtgaacaagaaatccacaaagaaagaaacaccccaaggattataaccaccaccttcagatgctcaaataactgtctgggcattgatggaaaattgtgacttctcagtccttgcttgaacctaaaaaatggtgattttatgcggaagtaatggtgacattgaattttccgcttcaggtcttttaacagtttttggacttcctgtgctgcaaatgagaatagcttcatatagaaatttgaagccaactccttgtagttgatgattatgctattaatgagtctgcatgtggaacggtcatgtttcccatgttttttcatgaaagattgcagggtatatgttgttatggtgataagacaaaaatttcatactcctttttcatttttacatttattcaaacttattgaagatcttctctctctctctctctctctctctctcttcaaacatgaatttgaaatttgcatttgttttatgggatttcttgaaattttactaagttcaatttccatatcacaggtgcaagaagtacccatca

SEQ ID NO: 9069 - DNA, 2037 bp, Citrus sinensis
  Intron number 4 from transcript orange1.1g005081m (locus o range1.1g005081m.g) derived from phytozome v7.0 (chr-ID sc affold00041; pos 10783 to 12819)
gggaattcaccaaggacttgacaaattctattcaggtaaggtcataccgcctgccttttgttgcatggtctgagttttgtttttccttggcctttgctgattcagcttttttgttcattttcttgatttataaatgtaatgattcagcttttttcttcattttcttgatttataaatgtatctttagtgaagcggtcatgagtgaatgcacatggttttgtaaagtttatactcttagtgatgatttccactatgactgcagtatgaccgatagcaattccccccctccttttgagcacttatggtgacagttgatggtaatgatggacagtataggatgatcaccagtatgagactgttgtgaaaaccagcttgtatgaactttggtaggggatatgtaggtgaataactgcagactgtttttcctaaccacatgttgatttatggcatagaagtttggtgttctttaagtgtgtgtgtatctgtatctgtaggttttggtgtggaaatttaacatgtaagccaaatattttgggattttcatcattagtgaaatttgagttttaccttttctgatggttatattctatgatggggggtatgttagatgtaattttaggagcttctgtcaggatctttttctgaaattgttctttttgtaaatgaaggttaaagaatacttaactaagataccatattttattcacctctttttatgcatacctgcatccagttgactttgtggtgaccttttccttcattttctagcactgacattttgtaaccatttgtatcaagtttgtcaactaaattattgtttggaatttatttttatgatatgtagaggaagaaatgccctgcatggaattgtaaacccctctgtgatatgccatcccttatttttccttaatgtatttgtagacgatgttgcaatagcatgtttagtttattaagaaatcttctccattttgagctctaaaagagagtgaccagaaactatatgagatttgccagtcatatgttatgctctaagctgtttattagtgttactgagacagttgttgctcttctattcaaataatagcaatgtgtaactccttatataatctcaagatgggatagcaatcttttcttataatggtttggtaatagcagtcatggtccttctgtaagataacttgggtcatggggttagatgtgatagacatttgaccgttgctctaaactgtcttgttcattttgcataaaaacaatcccatcttgaaaaacctgaatatttttttgtttctggaagaatcgagattaggacctatgatgttttgttagtggcttggctggtagttctttaacgtgagaagagcagataaattgttgtatgtggtaaaaattatgaatgttattttattttaacaatgacaagttatttttggtatttgctggcttgttatgttgccagtaataagttttttagtcttcatttggagtttctttctttctttcttcttcttcttattttataatttattatcattattattattattattgttttagctggaaaaaatggaaagtatcgattaacatttgtgtttggatatgacattgtgttgtagttagttcaagaatgaatacctttcaaaattaaggcactgcaaagtataaaatccatcatgattttgcttagacttgtgaaaaaattagtttttttttaatattctcatagatgttgcatatttacatcatagactgtctccgaagaatagtagatttgatttgtttatacaagttttcttgaacttcttgtgagtggtgtcaattaagaattaagcatgttgagttttgatattgtggccttctggggaagttatattgatttgtcattgtccattagcttgctcattctgccatcgacaatgctgcttttgattctgtgcttgataaattacaaatctcaaatcagttagataccgtgtccccaattactaatcttgctgtttacacttttctttttatggcagatttcagactttagcatag

SEQ ID NO: 9070 - DNA, 547 bp, Citrus sinensis
  Intron number 2 from transcript orange1.1g009578m (locus o range1.1g009578m.g) derived from phytozome v7.0 (chr-ID sc affold00126; pos 317781 to 318327)
tgttttccctttaacaagtctgcaaattgggtatggttttatttattctttgtatttattgaattcgatcgttgaacaatgattttattgagttaaatttggtggaaatgccgtattgatttgactgttaattgtttactaaaatttgaactgtttcattagcaagagaatagctcgcagggccccgtgcagtaatattctatgtggattttgaaactgggaattgtagtcgatttacttattaactaattggagtggaaagttaactatgatgattatttggtttcttcttgtttcattgaaatttttttgagctaattgacattttccgggaaatcaccaagcttaaggttgtatatattttgagagtagggattttatggtcatgttaaagcttgtgtttggctatatggcttgatttggttgttaataatggaggattgataatcatttgttgtctacttttggcttgcctgaaaaatttatgcattttctgctatttatccctgcagagacttgcaatcatatctttcagatcttagtctct

SEQ ID NO: 9071 - DNA, 1950 bp, Citrus sinensis
  Intron number 2 from transcript orange1.1g023192m (locus o range1.1g023192m.g) derived from phytozome v7.0 (chr-ID sc affold00394; pos 101992 to 103941 reverse strand)
gcaggggttcgatattgggacaaactcattttgaggtgactactgcatcttttatgattggtgtagcatatgtaggataaattatggattcctctgcgacatgctttttgcattatagtgcctttttagcttgtttgttgtagagctctaatattcgtatcaagtatatagtgtgatatttgcaattttgttaggtattaggtgcattgctagttaaaatttaataatctctgttctcaaacctttgagaattgacttggggttatcttatgaatatatatttggtttttgtataactttagggcgtttgttaaaaggatagacataaaaaattatcatggtgattttcgttaggtgctgatagtatgaggtataagttactttatctagttgaagagcctttgttgcaactgttccggaacttatcatgttttgatgttgaaatgttaagaatgaaggaactttctcttttgtgatgtttagttcaactctaataatcttccaataggagatattctaaaccctagggaggaaggtttttagtttcaacatgcttcaaaagagattcctcttgatgctcctaaactacaaaaggaaaactaaaatgtatctttcaccgtgtgggagaaatatgtttgtttgaactgttcttcatgccagctcctatattcctctttgactctgtttcattcttgtgtggggttgatgagggtagagttcttggaagttgctttgggttagaatttttattatgtgtgtgaagttagagcattgaaataatatatgaggatagtgtgaatatatttgtcctttctgggaagatattcagattactttgtcaataggattttatttcctaagaattcagagggttcctcctttccatcatcagcatgggtgccagttatggttccatctagtagtaagccttcaggcttctcctcccttaccatagttgagtagctgttttaatctaggttgctaccattttggttgggcaatgatatgccaaaaattgtaaagcatatttgcatcttttgtagtctccgacaactagcttttaggtaaaagaaaacaaatgtatatatgatctctggtttcaactgtttagaatggaaaaaaaagaggagtctcaaaagtctcacctagtgtgctgcttttaattgtttagtactttgatatcaaagattgtctttgaagtaagaaacactgtttacccatcttgagatattttaacactatggctgttgcctcagctgaaagtagcaaggttctcagcctaagtgtaaaccgaaacagttgcttttatttggaaaaaaaaaaaaaaggaggtggttttctgggtaagtgggattccctaatttggagggacaattaacggctgcttccttcaatagcgatcagtttcctctttgcatccttagaatttcattgtctgaatgagttattattctttttcttacttttttcttgtctcagaaaggggggcagtggttaattttcctttccttcttttctctgttagtttcgggttttttattcagattttatgggatgattgctaaacaagagagtgttggttactgttgttttccaaaattttattttgtctgaggtatctgttcccttatttcattattatcattgatacatattttgttacatgttttatattacccaaaggaaatacctttctttgggggtgaaaaaaaatcccatttatgtatatgcaaaatgctcgtataagctcacatgacctgctatataaatacatggtggagttttctatcccctttttttccccgtcacccacatgctgatgagatgcccatatactcatgatccagatatgattactagggttgcataccagaatcatcatgcttcaaatactttgctttgctacctccaaactgaatcccgggtgcttatttaaatgcaggtcctctg

SEQ ID NO: 9072 - DNA, 4721 bp, Citrus sinensis
  Intron number 3 from transcript orange1.1g023312m (locus o range1.1g022239m.g) derived from phytozome v7.0 (chr-ID sc affold00391; pos 66942 to 71662)
ctggtagggattacattatttcatccgtgaaagcagtaagttgctcaattaattcattgttttatactcaattgctatttcatttgcttgcatcaatttacaagattgttttataaggtatcaattgttatgtgtaaaatgtcattaagtacaagaaaccaaaagagaggagagtacaagtatatgggatgtgtattaaacagactaatttattgcggcaaatgagttactacaatctaaagaatcagtaaaaaaccccccaaaaaaatgaaagaaaagaataaggaagtgcaaaatggaggggaaaaaaataggactcttttgatgaatgaaattccaaagggttagaaattggtttgctaacatttacataatcaagtaaaagtctgaatcatcctttaaaaagggaaaaggagcgaaagatttgcaaatttaaaatgtctggatcatacttcaattaaatttaatgtttcactcttcatattcgcaaagttgaaagttcagtctgttttaagtttttttcatgtttattgttatcatgtatgctcctgtctaatatcaggtttttgtaggttacagaagcaatcattagccctgattttatccttggttgttgttaagaatttgtgtatttcaaatttgtaaattttgtcatctgattataaatactgggtctaaccaattttacaaggctacaacataaacttccactagggatatctgcttccatcatataaaagtaaacgaatgaggagaaatggaggtcaaagtacatccaaagactgctattactaactggcaaatagaggcagtaccccttcagtttgtagaggaaaggtatttagagtaaaaagggaaaccttgccatcggttgcaggtctctgaaacttcccatgccaatcagctaacaaaacgaagttcttgatataatattttcaatgctctgtgttactgttctttcatttttaaattttgtggccaatcttttaaatttttcacgttgacaattgttccgtatatgttgaagagtttaagcatttaccaagttttcaatcatcggggccaaaagagttctcctgcatgctgatggtattataaaagaaatgctagtttggcattgataaataaatctttgatgtacactttggttgttttgctctagtggtgttgctatttctgttctttgttacaagccgtttcacagtaaccccaaaaagtaaagaaagaaaatattgaaaaatctcatatgcaacactaactttccttctctctaattacagagatgtcttccacgggagggtttggacgagcattttgtcatacacatggtaatcatgaactttccattttactattttcttttttttttctctctcgttgcattaatataccgtttgtctctttttggaaaattttagttctttctttagaatatgtttttcatagatggatttcttcctcttgttgctttgttagattttatatttttattatttcgaactgtccggatgattgctatttacatagaactcatctgtgtgctcagaatttcctcatattgaaactttgatgtttgatagccttaaggaattttttattttttttttaaagtggctcagaagctaatagaagtatattagtaacagggaatgtacataggagagagactagagaagtccactaaaaataaggacaaaattgccaatgacaaaagctagaacactctaagatgagactttctatccctattaagataaaattgcctcccaagtggttgatacattctgaggcttttttgtacacaagatatatcaatcctattgatattggtatgaagaaacagccttcaaaattgagtgagttcagacgcataagtttagtgacaagtctttataagatcatttctaaagtcctctctcttggactcaaagaggtgttaggggaggccatttcttactctcaaggggcttttgtgagggatagacagattttggatgcagttttagttgctaatgaaggcttggaggagtatagaaaatgcaaaagacctggttttattttcaaaattgactttgagaaagcttatgatcacattgattgggactttttagattttgtgttggaagctaggggttttgggcaaaagtggagaagttggatgagggactgcttaaattctgtcagtttttctatcttcttgaatggtagacctagaggcaagattcatgcttctagaggtctttgacaaggggaccctttctgtccctcctattcacaattgtggttgatgtactcagcagattagtggacaaagcttaagaatccaggctgactgagggtttctcaatcggtaaagataaaattttggtttctcatctccaatttgctgatgacacaattttcttccattccgatgatgtaggaaaatttcacaatcttctcaaagttgtggatttcttttgtgcagtttcaggcttgaaaattaatttgaggaagagttcaattgtaggcataaatttccaggatcaaaagttgattgacttggcttcttcagtggggtgtgagattgggaattggcctctaaagtacttaggattaccacttggggggaactgtaggaaagctgatttttgggctccagtcttggagaaagttgagaggagattggatgggtggaagaaagcttgtctttacaaaggagggaggctaactcttatccaatctgttctgtccagcctttgttcttattttatgtctttatttcaaattcctgtttcagtggctaaaaggatagaagaggctatgagggatttcttgtgggaaggcataggggagggtaaaaaagatcatttggtcagctggagggtagtttctcaaccgcaatccaagggaggactagggttaggaaatattattaacagaaataaggccttgcttgggaagtggttatggaggtttccattagaagttaattctctttggtattgtgttataaaaagtaagtatgggttgtataaaaatggaagtatgggttgcataaaaatggttgggatgtagctgatgttgttaggcggagtactagatgtccttgggtgtttatttcaaaaaggaaaacagattttttatccaaaactaagctgatagtaggtaatgggcagagagttagattttgggaggattgttggattagggaggctgctctctgtgatcttttccctcaattatatagcctttctcaaggtcgtgagtgctccatagctagtctgtttaagtactctgttatgcagtggagttgggattttaagttccttagaaacttgaatgatagagaatctgaacaatgtgctgagatgcttgggatcctacggggatctgagagaggataagagagtttggattttagataaatcaggatgtttctcactgaatctcattgataaccacaatgctccctcattttctctttctcacctaatttagaatgctaaagtccctaccaaggtgaagatgatggtttggtctgttgctcatagaaaaatcaacacaaacatcatggttcaaaaaagaagacctaatatggcaatatttcctgaatggtgtgtcttttataaaaaagcatcagagaatgtcaatcatttatttctacactgcactgctgcttactttttgtggtctaagttgtttaagaccttcaatctaagctggtcagctcctgcctcatgttactccctcctattggaaagtttttcttgcttaaaaggagaaaaaaacaagggttctatggcactgtgagtcttggctaatttttgggttgtatggaatgaaagaaaccaaagaatctttgataacaaagctgggaaagatccttcacacctatgggacaaagtgaagttttgggcttccctctgggcatctattactgctgaattccaagacatctctttcttttttattttgcttaattgggaagcttttttatcttaagatggatgcattcttagtgagctattgtttgtgggttttgggatatttatctttgcagttttttagtgagctattgtttatgggttttgggatatttatctttgcagttttttgagtgttttgtttagattgggacttctcgtccttatttttgtggatttttagtcccaccaatccttgtacatatttcatgtagttatatatataatcttttgtttcttggttttgtggttgggggggggggggggggggaggaatcctattgatattggtattctcttttgatcactaaagcaattttatgttttttaaattggctttagttacaaggatggattttgtattcacctatgctttgtaggtttttaccatccccttgtgcacatgagttccttcttgtttttgaatgagcattagcactgatgggggaggagaaaacaaaatcgagctaaacattgattggaagcctctatagttgttgtaactcttatttagatgtataattctcgaaaagtattcaaagcattgcttccagttttaaacaataaattttgctatatcttgtattgtgaaattgtttgacaaataccaattatttggctgacatggaccattcagtttgttttacttgtttgcatgactttcagattgctatcagtattgatgtaatttaactacatattcactctccaaatctattttattgcaggaaggagttaatatcttggctgtcaatt

SEQ ID NO: 9073 - DNA, 1583 bp, Citrus sinensis
  Intron number 1 from transcript orange1.1g023891m (locus o range1.1g023948m.g) derived from phytozome v7.0 (chr-ID sc affold00254; pos 148523 to 150105 reverse strand)
agaagcaaaaatataaaacaaaaatatcgaagaaggtaaggcgaattcttgttgatttcttttttcaaatttacgcaccccgtgtaatttttagtgctttttagttgtatgttcatcttttttaaatggattattttgattgtatgttattaatcagttcagttcagtattttgttaaatttaggttgtgtgtgagttgcttgataaaatgccacagagagagtatataggctatgttttgtttgagattgaggtgttgtagcttttaattcgcaactgtttactaaaaagttgtgtagaagcatagcggttatgaacctagccttagtcatgtgcacggtgtaccgagtataataaataatatgtgtgatcaaatgtgtatgaatattcaaaaatttttatgtttatggatttttcttgcatgcgtttaaatgttggcgttttagcttttctgaattagcaatttgggttctaatagatcttttgtcttgacaactgtgttgtccatttgataatatatgtaattgttttgaattgccgtgttcactctgatgtattgattagaaatggtttcaattgccttgtttagaatggaagacagactttttaagttctaacttttagtgagtgaatgtttgaaattggattgttcttattgattgcaaaaataaaaagttaaaactaccacagaaaagagcggttgattggaatttcataggtttaaggaagcagactggagtatttttgaaattgttaccaaatatatatttagtgcaccctgaagtttgtttaatcgaaattgactggagttgttctgaaggatttgaatacatgataaaatgatgagaagcaatctgaagccttaacctttcattctccaaacaaagcaaatatttgcatctatgtaagaactgttttttgtatcacgaaaaattagatcatgccatgttactacgttataaaacataaaacatcaaattgaaatccccgtgtcaggacataattttgctgaactgtgttcatgtttattctgtttcatttgtacgggacatggtgccttttgttctgactttttgatctggagcagttgcatgaaagaaaattgtggaactttttttttttgtgttgggggaggggggggggggtgaggtttccttataggagatcaaatcatctttgctcttctctttggggttgcctcttaattttctactgttcttttggaatatcttgattctttgtattgtaactcttgatatgtctttagaggaacagctgttgttatactcctatgtacatcaacttttgcctcttggattgtttgcctgtaaaaattttcgctttgctcgaagaattataatttatcttttcttaaattcttatttaatgttggatttgaagtttgagctcaatagctctccatcaccgaattcagaatcatctgaatgaaatatttctttcattactgagaggttggtgatggcaagatttactgatttgtgctgttaatttattggatctatttcctgtgactttcagtcctgttaggttctctactcaacttgatttgccaaatagtgcag

SEQ ID NO: 9074 - DNA, 2747 bp, Citrus sinensis
  Intron number 4 from transcript orange1.1g019682m (locus o range1.1g019682m.g) derived from phytozome v7.0 (chr-ID sc affold00071; pos 256931 to 259677 reverse strand)
caaagctaaaacctgagcaagaggtatgtattatatattcttgagaacttattatttaaggaaattttattctttatttttttttccttagggcaatgacacatcaatactctattgctttctttttgcaccaagcataaccaccattgtgcttgtgttcatgaatctttctacttccagcatgtgtatagatgtactgcataggcacaactgtgttgattttttaattaataattctgcttctaaagacagtgactatcaaagaaatcctgatctattgattttagagacagtacatgttgagtccttccaaagtgggggactgagaatagatggatctgaaatctggtccctagatccacagtgcccacaacttatctacgagtatcatgctattttaaaatcttcaaaaaagaaaagaatttgtatgttttacaaacacaaataattgaaatgttgccctaagtttgatgggcacatacatgtgtcccaattgtacaaataatccaaaaagtagcctaacttgttcttctccaagtggcctgctttccagcaaatctagttacatttgtccgcgcttttgcaaagcaattttttttcttttttcttttttcgaaggcgacttaccaaagaatttttttcagagtcctaagagaacagctagaaactacaaaatccatatgcctaagatttcttgcggttatttctcttctctttgttttatatgagccactaaagatgcttaactgcaaaaatgttcaaaaatgaaccttcgcttttgcttttaaccctactttattactccatggttctttggttaactcaatgaaaatgcccaatcactgccgtatttcaacaccttcccaaaaatagcaactatatatttcaggcctcttctgcgtcacaacattatgttaccatgcaatatgattttgctggatcatttggacttgccattcacatcactgccgccccattggccactgatacttaattattgttgttgtttttgtgcctgccgttgactgttgagacttgagtgggagaatataatgtaacacatagtacacaattgttttagagaagaaaaaaaaaaaaggttgctggtgggatcgtcaggtacttacaggatgtacactactttggtgaaaccaaagtattgtagtattgtaatttgaaacgtcacacttgtaacttctgtgatatgaccgtcaatattaccatgaaatagtcgttttctacgacggtaattagtagataatctagtgtggcccctattttagagattaaagttttgtagggagagtactgatctttccataggatggatgtaatctatgttgtgtaattaattattttagagaaaaaaagctttcttaatagagtctagtatttgtttactagtactaaaatataaagaagggaactatcgaatagttagatagtaaatcacttacttcaagtgacctagtctgcattacctgagtggctgagtttgattattcttcaaatatttaaaggtggttcctcttcaatcgagtccagatatctagactgcctcatgacaatattaatgggataaggatcccctcgtgatctagctctcgtgagtttttaaagaatttgtgtcatgtgtttttaagtgatagagtatgggtagtatttaacttttttattttttctttatttattaactaccgatcacccacgtgtatttttacttaagaatagatcggatcatgacggaatcttaatccacattaatctaggaagttttaaacattttgacagatttatgatcataaatgtccgtaaacataaaatgtagtattaaaaaaatagtgatgttatgtttttttagttaaaatacttagttgtgttctaattgatgtgttactaataaaaatttattacttgaattaaaaagaataaggattagtaattatttatcacttaaatcaattatatagtagcacatcatttactacattaattgaaatataaactaactatcatttactacattaatcaaaatataaattaagtatagcattattcttaaaaaaattggtaaaagcaatgtacaagaaacacatgaaacctgtactgaaaatgacccgtttttgctcacctttcattaaagttgaggtttgtggcgttcttgaaaatgacccttcattcaagacgacttaaaatgagtgctgataaagttttttaaaaaatattaataaatttacatatgtttttttagtggttacactctaagatacattagaatttgggacacaatctaaaaaatttattaaaacatccaaattaatgctctcaatattattgagagacattagctcaccattcggcaacaatctaaaaaaaaatgatatttgaaaaaagacacagaaaatagcgacaacaaaaatttcattttcttatgagttatgggatttcattttaacgatttatgcagttttcttattacagcattatcagtaaaatgtagatatcttgctcttctatatctttcggaataaaatatacatcagttttaactttgtggcgttaacattaacccccttaatcacaatgggtgaaaaaagcaccccactaagcatgcttgaatatcaaaatttgcgggcataattgcagcaacgaaattctttttaggcaaaatttcaatatcgccctaatgtaggtcatattgattgatgatattgatgtcattgttggttattgagttgcaggttgaa

SEQ ID NO: 9075 - DNA, 1329 bp, Citrus sinensis
  Intron number 6 from transcript orange1.1g024881m (locus o range1.1g016486m.g) derived from phytozome v7.0 (chr-ID sc affold00212; pos 137591 to 138919 reverse strand)
ggtaaattacttcgagtttttgttctttcgcttcacttgagatcagttacttcctattttgtccgtctagaatttgtttccagcttttccagaaccaatgaacacattatggcaaggaagcctgctgtaatgaaaacacttgtcacaaaaggttgctaggaaagatttatgactgtaatcaaagcaaaccaacagaagtaagttgtctatgcacatgtaggcagtaatagggctatgtctgggcttctccttttgtcataaattaagaccaccgctaaattttttgcttaaataatctggacaggttcagataatttactcatttattcatattctaaagtagagaacatatttcaaaaatgccaggtgctcagcattcatgacacattcagaattctaagcaagaatttatacttaggattgtatctctgcgtccaaatgctactagcggtgtaagctgccatatgcatgaataatcatatggtcaaccatttggtgatcttggaacccagctttttgaagttgtttaactagtgaatttcttttatcaaacacctattattgttttatatagtgttacttttctaaaagtagcaaatcttggataacaggtgcatagaggagactagcatggtttagaaaaccctaggtgaatgatgtgatttcactgtcaagatggatggcggaaaaattaaaaagaataataaaataagataaatttaaaaaaataaaaagggagagatgatcaggaatcgtcaaatcggattttgatatgtagttgtggtagtttgcaagctccgctcaccacttcttgtttcagtagcagacatggttgctttactaatggtaggacatgtctgttaatcatctagaacaagcaataagataagttaaagatctaaaagggtccttttagtgattgatctttaaggaaatgtggatgtgcagtcatagtgcttaggatcttatgctctattatgtcaggagtttttctacaaacttaagattttgattgaaatctaactccgtttgatatcaaagccagttcaacaaagagttttattgttatcttcccacatatttctatttgtatttaaagaaatatctgtatctgcattcatttctgtatggttatgatccatatgagaagccgctgataaattcccgtcatgcacttgaggaagcttatttgtatcttaaaacttttgattcaaataactagtaactcaacacttaaaacttgggttccaaatgaaatcaaacagctttgttgattgcttatatattttaacatcttgataagcaattaattaaagctattcaatacag

SEQ ID NO: 9076 - DNA, 2464 bp, Citrus sinensis
  Intron number 1 from transcript orange1.1g017565m (locus o range1.1g007940m.g) derived from phytozome v7.0 (chr-ID sc affold00003; pos 916600 to 919063 reverse strand)
aaggttcgtggtcacagttaaatttcagattttactttactttgttactgttgttattacttggtttggtttaactgtatgatatatccacttcctcatctgcgtttcttgttttttcttaatgatcctcgactgctcactgaactaatttgctacatcaagttcttataatttcttttgttataattgctgatccgtgagacgtttttttttgttccctcctccgcctgcatggattattagtgaagtttccaaaaatggcttgtgaggctttgttttttattttttattttttccttgtttttgttttggttgagtttttgaaatttgcttcaatattatgcaattagtttatgtagacctcaaaatcgagctttgcatgtatttctgatttaccaataaaacagtggaagaaatgaagttcggtttgatgttaaggttatgataaccattgttgttttgtaatttcttcttattcttctttgtttttatgccttttttggtaattttatgtgatggtttcttgcaaaaggcaaggattttctagatgcaaggctcaaatttgtgagcttattcatctagttttgggtaaaaatatataagtgagaatgtaatgaattcagaaggaaaaaaagaagtgaatatatagtttcaattaagcatattatttgaagcttcttttcaattaattgctaggtttggtccatgtgctgagcagtttatagtcatggaagcatgtttgctagttcttggtatgatatgttgatttctgaatggatagaccactatcacccgtatgcttctggttaagaagccctgtgctcgtctcaaaagagacttgtttaaaatattttgcaagggaaaaaagaaatgcaaaagcactatagtggatgactactgaaattgaggggacttattggatctcatcttaaatagctcatacacaaaaggcctgttagaaaccagtaaatggatgcattttattgcgtgcgcatccgtctttttattgtacgatgttgtgctgtttcttaagcttaaacactttgcattggcaagacacgttcgccatctaatcatctttagggcttggcttggtaagatgcctttatcaatcaaatcaatcaatctaagcttaaaccttgaggttctgtacctttttttattaaaaaaaaaaattgaatatgaactacaaactaattctttctttaggcttgaggactaggaaaattttaaatggcggtcttgagcttccgaactttagcaagcactttgcttcttcattgacggccttcgtcagtgttaatccttgcaatccaattaagcagaatcaggtggcttctgaaatatttgagttagatatcatgctgatgaatggtccactggtaatataattttgattttgagatacaacattatgaagaatttatcaaatatgttgcgataaaataaaatagcatgcctgttctggtggatctctatataatgatgaatatatgtaagatgtggtatagcaccatattgatttcacctcgaataagcttggttttgggcggaagtgatattgaaggttgaatgctaataattctcaacatgagatcgtatggaagcatgagattagcttgagaacaatctaagttcagcaaagagagaattgaacagaccaaaccttggcttcgattaagattatcccatttctgtcctagggttgtctatgaggatgatgctcctcataatattcattctagggcaccattgatgctaatatgtctggctctttgcatttaattcagtcagcgtgctttttggctttttaccattcatgaagagattttcctagaatatgtgttcttattttatacatttatttttctgctggtgcagccaaaggtctttattacagatattcaaaccaccttatttttcctttcaatttatttcctattactgctacatatttcggagagttctcttgattactttcttgatttcagaacatttttcatttcagcttcagagaatcttttgctaatccagcttgtattattctcaatgaacaacctgaaatatatttttatactttgtgaatttgaaattatattattgagctcagttgagcatcccttttacccttatggtcctttataaagttatcggtgacaacggatttttttacattcgtagtatcttataattttaatgaaatttatcttgtgtcctatttgtgcaatggcataacacatagttcttctggccatgaaactgttagatttgacaaaactgaagttcacttaaaaacttgattatggttttataccatcagattttttcagctaattaattttgtcggatttttttctttttttcatttttgatgcaaaattttgttttcccaacttactgtccttgtgtttctgataccattctgacaactatttcttctgctattgcatgtttcagtcaccac

SEQ ID NO: 9077 - DNA, 1443 bp, Citrus sinensis
  Intron number 1 from transcript orange1.1g004761m (locus o range1.1g004078m.g) derived from phytozome v7.0 (chr-ID sc affold00060; pos 529875 to 531317 reverse strand)
gatttaagaaaccagctctggccacttcgacacaggtatgttttaatgaaataaagcttcaaatgtgtatgtaaagttctgatctttctttttaatatgctattttgtgaatgttttcaatcaaactttgtgggttggtgattatattggtaaaagttttttttttttttaatttggatttgctaactttagagctcttgtgttttgttgtgtgatcaagaaatgaggtttgttgtttttggagcaaattggcttttgatcatttgtagttttagtcttcatgggtttggtttttatagaatttttggttaatagattgggtggaaattgtttctactgagtaaatttgcaaactttctgtttggttccagattgggtggacattgttttggttgagtaaattaccaagctttctgtttggttcctgtggtaattcagggaaagaggagggaatgaagttttggatctcacaaggattcagtttcctgaaaatgtgttttcaaatttcaacttgtgtactagttaaactatgaaacttctattagctacgccattggtagaattactctctggttaccgaaggctcttccactctataataaagtagtgagaaatctgagatgcagagattttattttattttcattttgaagattttgaatgtgaggaactatgatcgctttccaaatccttattgagatgccgtgtcttgagtctgagtgatagacgtgcaagagtcaaaaatgaaaatcagcagagctttttgctttctttgataatctagtcaaatgggttcctcaaataatgggagaaagtcaacatggaaagcgccatggagtagctttatttatatatatttttaataagcgatggcaaaaggataccttcatttactcataacggctgtcttttgttagtaattggtctaagtctctttgtctcttgcacaagtctggctgtggaattctgttgatttttgtccaagctccctgccttcagcatatctttttcagtgggatcaatcttgaattttcagcaacaacatgcttattggttgtttctattttccatgaactacttgctgattaatattctaaacaaaagcctagtaagggacacttggtagtgtaccatcgaattctgtggaagctcagtttatatgctcttatgctattattgcgagtttagaattatacttgctccaaatggaagtcagtatgatgggtggttactattctgaagaactgttgggtgaatttcgtttatgtaacaagtaaaattgtttcctctaaaatcacgaaaccatgctgttgttacgatgaaagagagtttgtagagacactttcagtattaactgattttgccaagacagcacaaaattgttttgtaattgttctattcaagaaactaatattttgttatgcttgatcaaaagcaggtcag

SEQ ID NO: 9078 - DNA, 869 bp, Citrus sinensis
  Intron number 1 from transcript orange1.1g016464m (locus o range1.1g006877m.g) derived from phytozome v7.0 (chr-ID sc affold00259; pos 55735 to 56603 reverse strand)
acggaagtaagctgtatcaggtaccggctcttggttcagttttctgtttagattcttaaaaattttatatattttgtagttttgggatgaaaataatgtgctgagattaaaacttattaagtagttttattgtgatatttaggtgaaggttgtggatatagggcttaattgtagttttggagattggaaaattatcaaggttgcttaattgctacatttcctggttgagattgtgtgcagttgttgtgtgttttgttgttggatagttggaatgaaagagcataaattaaaatttaaaaccgtatttaacgatctttagccattttataatcatctagtttcctgttgttatgtatgaagtataaaatggtgaagctgaatggagtaccgaactgcaactagtttggaaccatattgaacttaaaattgactataattttgattctgttttgtcccggggataaatgtggttctgatatgactgattcttcttcactgcctttctggagtatgcatgttgcttcagttctatctcattcaaatatgaaagcagtgctgcaaattttcaaaactttagcttatgcttttcaccttcttttatcttaaaatatcatgtgagaaagttatcattgttctacttgttcatttgtgtaaatttgtccatgttaactttcactagtactcttgtcatcagaacttcaaaaacttatatttttatcccttaaatgtaccccactttcattttctgaattcctttgtgcttcaaattctttcattctgttcgcaaagcactctataagttaccgtagctgagcgttgattccaattttatagtgtttgcaaagggataagattgcagcacagtttca

SEQ ID NO: 9079 - DNA, 940 bp, Citrus sinensis
  Intron number 1 from transcript orange1.1g021579m (locus o range1.1g021579m.g) derived from phytozome v7.0 (chr-ID sc affold00395; pos 66917 to 67856 reverse strand)
atcaggtgatctatgtcttcctttctctttttattttttaaaattttaacatttaattttcgttccctaattatcgttttaattctgattgctgatgatgatgtggtttacttgctaataattgtccctttacttttaatttagggtttgttaatcagatttgactctctctgatttttttttttaacttatcattatttattcgtgtggtttgattaatttcgaaaaatcacttttttgttagggtgcaagtattttagggtttgtgatgaatttggctagtttgttgaatgaatgtacttggaatgaattccccagctagaaaatcatagaattttagggaaaaaaattagtttttctatttttgtagcttattggaggcattcatgagctgaagtgagtttgtttagatcatatttaaatctactcctagcttttgtgtaatgttttgtgaatcatgtttcagtattgtgctatttgggaggagttaaattgctgaaatggttttaaagtattgagtttttttactgatcttcttattttaaaaaaaatgtgttaatttaatcttacaacatcgtaaacatggtctttcatttaagcattcatttgtacgcaagatcttctcttgaggttctttgtaatttcccttaatatattacttcagttcagaacttaaataacattgggttggaaatgcaaatacattataaggtgatgtaattttaatttaattagtatgataattatgttgctatgactctgtttttggactaatgagtaaccccttgaaacatacatataattttttttcctttttgtgagggttagtattgttcattattgaaatttgaatgaagatgtttttcttcatgtttattctgaactcttgattgatttgatgccagaaatcatcctatataccttttgccgcttttgtggt

SEQ ID NO: 9080 - DNA, 1027 bp, Citrus sinensis
  Intron number 1 from transcript orange1.1g007525m (locus o range1.1g007525m.g) derived from phytozome v7.0 (chr-ID sc affold00012; pos 1041940 to 1042966)
ggaggactggtagaaagggaccaatctcgcggtctatacacacccatttcgacattttgctttaatttgccagtttggtacctttttttcagatttttggttcatgatatgtatagctttatatgttatacttatatgtaagtaaattaaaaaggatttagggttcctgttttgactttatctttttgcaatcttttaagtacgtgtgtatatatatgatattgaggaaatgaaaattgtacaaacattttggtggtggcacgaaaattatttgaatattcaaagaagcaaaatgatgctgctggttaacaaacactggcacatgttgttttcagaacttcgactgttttggtgggacgatcatgcatgtcattatttgaatggctagaaggataaatgattcaataagattctgaaaattccaaaatttggtcacaacccaagtttgaaaattttccaaattcattgtcttagattggacttttgcttacagtttcacatttgagagtaaagagtcgctatgacaagttggtagtcaaaaagttttgagtggaaaaactaatagccatttttaataccagcgtactaattggggccaaagtcaatttcacactcagcaactttgcctctcatttgaaggttataaattcagaaattatcttgtttgagaacagcagaatttgacaggaagataaaaacataacaataatctcagctcttataacaaacaagaaaaatgagataattaatgagattacatgccaacactcttcttgatatgtgctacctatagttctaataaaattggcaaactatgtatgtcatttacgtgctttccataatatttctgttagttgcacaccataacctacaaaaagattttgcttttgaaaaaaaaaaaaatgaaacttaattccttaaaccctcttaaaacccaccttatccaaaattgtctaacactctaactggtcaaaaaaaccaaaaatgggtagcaccaaactgttactgagaccaaaccctctccctt

SEQ ID NO: 9081 - DNA, 1145 bp, Citrus sinensis
  Intron number 1 from transcript orange1.1g013391m (locus o range1.1g013391m.g) derived from phytozome v7.0 (chr-ID sc affold00010; pos 125337 to 126481)
tagaaaggaagctgagaattgtgattgcttgcagggtaaattaaacgaaacatacctccgctttttttattttttattttttttgcttatggttttgattgattgatttgatttggagttgatttttcgttttaggttatttttgttcttcgattatagctttaaattctaatttgttatattatttaccgttctttcattggatatatttactgttcttgcatttgactttccacaagttgccattttgaagctatgtatgtttaggctggactggaaattgtttgtcaaatgttttggtcgatgggcaaaggctagcctgagatggtttataagtcttatgttcacagaatcagtttcttaaatcttgattaatttttttggctttgtataaacaatgaaatcacaatcgtccacattctttctttttgcctgtttcgcgaatttagaggttgtttgtttttatgtctgaagtcttaatttagcttaatttaagatctttagatattttaacttttgtttgtgtatctgaaagcttattgtaattttatttgaatggaaaaagttcaatttcctgacttttatctgaatagaattttttttttcacacaaataccctcactaaatgtatttgtttcctgcacaactattaaatgttatattagaatttctcttgatctcaaattttactcggtattaactacttaacatacattcaatttgaatttaagcaaattcttttattattagataacaattttttttagataaatattatggtaaactgtaaaatataatgttatcaaaattatttttggaaattatatatcaaatgtttaccttataaatatttataataaataaaaactatggtaccatataacatcttaaatatatacatattaacttcaagtatgtataacactcttaaggtcataagtgtacaattattagattcaagatggtttgagtttataaaaacaaacaacttatcctttacactaagacgataagaaataaaaaacaaacacgttattctgacatatgcctttagacccattcagtaacatttagacccatttagattttagattaataaacaactgctaccttactcgttaatttttttttataggatttcaagt

SEQ ID NO: 9082 - DNA, 1515 bp, Citrus sinensis
  Intron number 6 from transcript orange1.1g008111m (locus o range1.1g008111m.g) derived from phytozome v7.0 (chr-ID sc affold00120; pos 77986 to 79500 reverse strand)
aaaggaaaacgtaagcatcaattttcctcattctgaattaatgtagatctacctgaattatctttctttttctattcaaggttatgattgtatcccctaactaatactcctatccatcaaatgtgaatatcagttaacattttcctctgcattcctgtggatatgctagcacatagtttactttgcttgtcgaatcatgtattccaatgtgatattctctatctcagaatcaaataagaaaattgcaatcatctgaaattgtgccctttaacctttgagttatggtaaaatgccaataaacctcctttactttgttttctatgaaacccaaatgataagacatgtttgtttatcatcaagaaacatgattctctgccacaaaaaattcttgtttgaaaaatttgtcatctatggatcattcaattttgtgtagctgctaataatgaatgatgtccatatacttcatgttatgaaaagcaccagcttctctctagactaatggatcttaaattctaggttcgttagattcatagttgcctttcttatccatagctattagcttgctaggacactgaaatgatgcatgccccaagttgatgcatctttacctagaatgctaaccacaatttgcctgggaagacaagtgacttcagagttttggaattttagagatttgagaagattaaaatttcatttgatagtagaaagtgaaaaaaaaaaaaatgttgactgaggatcaagaagaagaaagatatgatgcaaatcaagaagaccaaccatacaaatcaataaaactctttgtaataaaatgtcaaatgcttttaatatcaactctccataatccataagcctagatttttgtacaatcactaccatgtccaaaagcataagatctaggaatcttgtctggaaatgcttttgctaaatcagctaaagacaatatttaaaatctgttacgtcctcatagccccaaataacccagtggactcaataaggccattccaccaaagcagcagattgtcaaataccccaactaataaatgctataataaaggaccactgagtaaactatctacttaggatatttattccttctctaaaagcatgctttctctatggtttgccataggtccacatcgtggtctccaaagaggatatttcttcgctaagcaagtgatatgtcagtactaatagtttggaatttcttttctattcatattacaattttattttcattttttaactgaaatattgtgcattcacagttcttcgttcgcttcttgttcttctttttcttatttctaagtggctttgtgggggtttaaaaaaaaagaagaaaagaaaagaaaaaaagaacaagagggggaagccatcatagcatcctaacccaaaagtttgtgtagtccattgtagttgttagtagtttccaatatttgatggctctgtatgtatatatttgtttccttacctttcatagacttcataggcttaacattttaataggtggcaaacatt

SEQ ID NO: 9083 - DNA, 1835 bp, Citrus sinensis
  Intron number 2 from transcript orange1.1g002757m (locus o range1.1g002757m.g) derived from phytozome v7.0 (chr-ID sc affold00254; pos 121531 to 123365 reverse strand)
tggctgcaggctctcaagtcagtgtttcaattgtcatttggtaatgttgggatctttattgtgaatacatgcctatttgtgtgtgttctttgatgctaatgtttcttaatgatcaatgttttcaatggtttgtctggtgcttgaaatttttctgatttgttaaggacgtatatttaactggaaattttacgtttttgaatttgtggtgatagatattttgactaggtgctggtaatttttaataaattaaaaagctcgtttcaaaattcctatggtgctagattttttgtgatattggcaatggttgtttaaagtgcctgagacttctggctagtaaatggaaagaaattaaagcagaatattaaccagtgcatctactagcagaaagtgtttactttttgctgtgtgagttgtgcttcatactcatccattctctttagcatccgaacatgtatttctgcattttcgatgtttgctgttgcaccattgtggttgattcatgtgacaccaccagtgtgttaggaaatggatgcatgtaaatagaagagtttgattattgtgcctttttgccgactccagaattgaacccacgattgccaacctctgtgatttctgagatggattaatttttcctgattttggtgattgacaaatatttgcccacaaattttgtgcttttagtagtccatttgatttgaattctttttagcacttctaaaaaatgggcgcacatcatatttagggagtctttaatagtgaaatgattatggatgcaaattactagttcttagtatcatttttacttgtgttgagaaattaattcttagaatgtaaatatgtgatattatatttaataactgagctcatccatgcagtttaatctataatatgctttaagcaaataaagctaattatttaatctctgagttggcattctgtgcatgatacataaataaattttctcactgaaggaatttattgattgcatttgaagttttggttgttctaagtgaattttctttagcggtcatttgatggaggcttacatcctgagtaatctagtagacttttaagtcaaatccaatctagagggacctagatagtcttctcagttcagaaatcttcaccagacgctacaagttgtagcaactgtggaatctgagaatgctgccaaatctatatcaattatttacttcccccctcatggctatcacatttttctggtatcaatacactgttgagcaaatagtaaaccttctgaaatgtgggaagtctatctgagttgtctgcattttattttgtttatcacaatttgttgcttaacatttcctaatgacccataaagatttataaaagaacagagataatttttcactagctcttgaaaatttttaacgagatatggcattagatgtgtgaaccatagaagcaatattctattggtccttatagaagatctacagtggataatttattttccattcatggggttggcaggtggatgggttgggggtgaggaaaggtactgaggataggtggagaagcagggtattggggtcaggtggggatggagcctttcacttttttatcatttcccgctcatgatatttttagcttatgattaaatttgtagaatgcaaatctattgattctattgcgagaattaaagcttaatgaaacgttgttttcagagttgtgtggtagtaatttatgaatcaatttgatatatttttatactaatgttatcatttttttggtaagctacaaaaggaagttgtttaataactgtatttcatttaggcacagtgatactaaagttgcagcaaagaatagaa

SEQ ID NO: 9084 - DNA, 2041 bp, Citrus sinensis
  Intron number 6 from transcript orange1.1g047033m (locus o range1.1g047033m.g) derived from phytozome v7.0 (chr-ID sc affold00208; pos 170825 to 172865 reverse strand)
atagaccacttctcagtgaaactgataccgtagaggtatgtgcgtctctaagatttgcttaaaattccatcctaacatggcattttgttgcgtaagttagcaaatgtactagtcgacacaagaattacaatgaagagtagagtattgtcccacagagattgtataccctattagctaccaaaattattctaaccctaatttatgtgaataaccgattaagtgaatttagattgaaaactaaaataaaatataaagtaactgaaaattaaataaaaatacagacagtaataaaaatcaccaagagattaagacactaggacatccgattttaccataaccaatctaatttaatcctccatctattctattaaagtttaatacccatgttgacagtgaatttccctaatctattcaatatcctctctcgagtaatatgaaaaataccttcacatattaacctattatatctctatgtgaatttaaatctactaagattcattaacctttatagaaattcttagaaaaactgtgcgaatcacgttggcacatctctgtctttcattcaattcatggcattcattacacagagcgaagatacataaatctcctcttggtcacattatgtatcttcaaatcattcaaatatgggtcagatatttaaaagtattaaatacaataatgaacactcaatcatgaaataatatacaaaaagtaactcagatttatggaattaaattttcatagttaggctacatcgttgcctttgtaaattaaattagttcatgggaatataaagagaacccataaatatgataggaaacattcaagcaaaacacttggaaaagaaaagagaaagaataaactcaggaagctatctctctctctaatctatgcaattcatcttctccaaaattctgctctcggttttgcggctgctgcttcttctcccaattcggttctgctcatgccttttttttttttaatattgcttcaatcggtgaccttcccttttaataatgctgaccgcctctttaatatgctaatgctgggcctcaaatccttaactcaaaaggatttaaaagaaatcaagccaagccgccaacattaggcccaccacatgctttccatttaaattgtcaattaattctttaatgctccccacatgattgcatgcatgatgattaattaaattaaatcttccttagtttgtttcaattaaatttctttatttttttcctttttgattccttcaagcagatttcttcctgaatgttcctatttaattactctttaatcctagattgtacctaaaatagcaaaatataaaaattaagattaaaattaacaaaataaaatataatttaacacaaaattaagttagggaaaaataaaaataatatataaattactagcacatcacatttctgtgttttctcttatgtgagcttgtttatgagatattggtgcagagaaagatgtgcttttaaatggaacagaaaaactgtttgcgaaatttcttgtgatatcctgctgccagattttatttaccgttacataatacacacctgtaatgctttaatttcttggttattgtaatttttcattcatttgtcttcatgttagattacgaatgttttattattggttggggacagatgtgtgtgcttggaaatgaatgtccactaattaactactggagacctgttaacgacaattcttgttatgtatttacttttccacatatccatcctatcgcctatgttgtatttatgtttggaatggacaccattgccctgttcaaatgtcctgtcacgtggatattcacacttccattcttgggtttctatacttgtccataatgaaaccataagttggttttaatggatcttgcttgttctggtgaatattaactttcaaattaatctcttgtttgttcttttgcatcaatcctagcttcttgtcttatatattgtttaattgatcttatgtaactcatttatggattgagcatttgatattctttttttgtttgtgaagggag

SEQ ID NO: 9085 - DNA, 1316 bp, Citrus sinensis
  Intron number 5 from transcript orange1.1g007472m (locus o range1.1g004628m.g) derived from phytozome v7.0 (chr-ID sc affold00023; pos 1260192 to 1261507 reverse strand)
ccaccctggagcagtttgaggttggttcacatgcttgtgattatatctttcaaaaacctgatattttctccctctccctctgtcagtttgttctttactgtttcgatatttatttggaatacagtttgtactttgctttccaaatgcagtatctattggaacaaagcattggctgttttcctgtttgaagttagattttcttcttcttgatgaaaatttgatgttgtgcatactattagcgagcaaggtcttgctagattattcatagatttgtacaattcttaaatattagttcatgccacctgcatttaggtggaactatttcttgcttaagttaattgaaataatctactctgattcccatggtttgttgtgccaatgattcttctgattttatcctttattgctaatggcttatgtatctacaagctaatatgatgttccggaatttcctgatataagcttaactgctgtgaactctttgcttttggtttgccaatccctcatgaatgccgatgctatttgtagttgtatttttttaacatgcattggagatattcaaacggtagaataacgacattttatgtcggttttcgtgtaagatcctagaagccccgtttcaacatgacagctcactacctggctttttttattgaggttactgtgtctccatttggtaattgtgtatcatgttttaggaagtactgtttccttgatcagcgggagtaagtcacataatccaacatggaatagcaatcttctactactttactccgtagctccatcttcatctgtgatttggcctcagtgtacttaactgcgcatgagaaaagataaatgattggccttgacatattttgtgcataatgttgtcatagatattaacttgcttcctctgattcatttacccctttatattctttttgtcacaattctgagatgcaatttatttttcctttaagatttaggatgattaaaaggatttactgttagctaatttagtgctagttattggcttctcgtgggcataaagggttggccaaggatagtttttaagttttgaatctgcctaagtgatttgctttcatcttaatgctgaataacaaatctaggatttgctgaaatccttttctgctcaagattgaatggatgtgctttcttatttggtatggctagagtagttattaatcttgatttgttagcctttgaatttacttactaagtaatgaataatatctctttaagccatatatgtgtcagaaactggatttgcagttattgagaactgatgtttggttgcattctcacgcagaaag

SEQ ID NO: 9086 - DNA, 4077 bp, Citrus sinensis
  Intron number 3 from transcript orange1.1g009486m (locus o range1.1g008048m.g) derived from phytozome v7.0 (chr-ID sc affold00054; pos 223392 to 227468)
ggagagggcacggaatctgcggttggagaataaaggtttttaatcattgaacaacgaaaataaattgtgacattctttaaagtttaatattttataaaaaaaattaattctcaatttaacaaaggattatctatacttagtgagttcagctaaaccggatcttcttcactgagtgttatttgaggcaatttatctactgctattgtagtttccttgttttgctcatactctgcttcacctttagtgttggagttctataggtaatgcaatggtactttttggtgtggcacattgtctagctgtatatagctgatgttcagtggctgaattgattggttttaagattcttctgtattctgttttaccacttttatttaattgacagtttgttcttaacaatcattattctgaatgataatggataaaacaccgaaggccttatagcttgtgtgtgaagtgattttaaatttgtttcaacataatcttgtttatctagtatttgggtggataagaagagggattactttttggagtgtactcagttgaattctaaaaataatggtctcacatcattatcagaagttttccttttagattcattgatgtctacagcatgtataagcagtagacattcaatctaaagatatagactatgtatctcgtaggtttggtagtgaggttatttctctggaaattggtcgatcaaccttgtccgcttttagtggtggaattttacttagaccagattagacagacctgctgagaaacatgtatctctttgcttttcttgagtgccattccctggctgtgctcaaataaaagaatctgtatagagtgactttttaaaatttcaaattcctgtatagcattgggttaagtgcgatgcctgtatttgagctgtatttgtttcaaacacttcattatgggattaattgaagactgatagattgcatttatggcactgcaattagatgtcaattcaaatggacaccttcaatcatttggatttgatggtcaacataaacactgtaaaaatcccgttttgtgaataacctattgaacactataaagactttgttagtgaaacaaactcgttccaaatcaatgctatgcgtaaatgttgactatgcgatatatacattccatttagatatattaacctaaacccttgtgagaaatcgtaagtacaatatctttgcataatctcaagtgtgatatattagaagagaagcataagctcaagtgtgatatattacaagagaaggaactaacaccagctctttctggttccatttagatctattaaaaagaaggatctattaaaaagaagaaactattatgtacctcatacttcaacattcctaaatgatcaagcattatatttcttatctatttgatcaagcagtattacataagtatgaaacaaatgattttacatatattttcttatgcaattcatacttcattcttcccttcctcttggtgacattctatttcgtttatttataattatatcgaatattagtttctttagtttttctcgtcccctttttgttttttatttttctcctcacagacactcaattgccctctttactcaagcattttctcttctgtgcaacaattaaagtgttccctatcatttcaaagaagaaatattttgcattgcttttcttgtttatattcatatctttaagacttctattattactgtttcaccaatccgagaactgaagagatgtgtcatttgtctggttttggtgagcttgctaatcaagtttagactcattatcatcagattccactatcaggcaatggtatatgtgaaaagctcagaagttggtggatgcagacctctgtaaataatggaatgggactgataagattagtacttccatgtcttttatgctgggaaatttggaaagaacaggatagacgactatatgaaggtagtggcttttaacttgtgcagaattataagtcacattgattttggtcaaagaaattagtctttgttttttttggggggggggggggaatgattgttcttttttcaataattgtaattggttactgtgtaaaacataatggcattccaaaactgtccaactgtatattaaattctctttgcaaatgatgtggaggatagaagcatctaagtttcacgagtgttcaaaaaccaattaaaggtttggatttcagattttatacaacttttacgtgcaattagattttattaatttttgaacattaattcttctgaaaatgaaatgttgctctgaaaagatgaaaagacagtttttttttttttgggttttggtttttagggggaatgggggagggaggtctcttccaccaatatgactctcatgcaagttgagaagttggaacttaagagaaaagcttggtcttaggcttttttatagtgtctttcgaacttcattatactatctgttattattggatgtgtatttcaattcaatcggccttcttgtcctatgtagtattgcgttttcattctgagctttgatgtaaactgaaaattactcataatgacgcttaaaatgtatgtatgtaggcacattcatgagttgattatatgagtgaaaatgttaatagtcaaatgtgttagactggtcaggcctgtttaagaatcagcatctccacaaaaggatgctgaagatatggttgttaagatggaaagacggtgagggaaagatggttgataaatgtatgttgaaaatccagctgtgtgaggaatagacacctagagacaagctcataggattatatgtaaaacagggatgataagatgaaggattagaaaagcaaaaaaggctaagcaataagttgatttgcagggagctagtagtatcaattactgagatctggatcacagaaagttgataaaggttccttgatttggtttgatgatgttaagggtttcataagagagggtgtgtggttttagtgaagttctacaagcacagaaggaagtttgatatttgtggcacatatgaggggaaaatcagatagcttttggatggagatggccttaatggtgcagatgggccaataaaatctgctaactctatatatttgtgatacgttataatgtcatatttaatatcaactaattttttatcaataattggtagtatagagagcctctgatgtctgcactggactgatccctttgaccatctcagttccagcaatgggtgatttgtaacattaagaatacgggatagtgagtcaatggctccttggttatgtagtatgaacttgcctgctcaaataggtgttctgcttttatcaacaagaatgtggagcttgttttcactttactattgaaaattttgtgcctaaaggggtacttcaagttgagctgcctggtatgagctggtttggactaaattaccagagattaactcttcagcctgatgaagggctcactgttattggatgtaaattgcatttatttatttcttccagcaaatacaaggccttcccccacttcctttttcgattttccttcttgttgcagtttgggcactaaactacacttgaatcttatgaataaatttgtgaagcacctacacggtttgatcacaattgtacaagtctccattcatccataattccatctggttttggtcttggtgggctaattttcaagttgatgtgcaagaagattcttttgccccaagttgaggacactaaaatgtaaactggaaattaacagacgggttttatggacttggtcagaatagtagttttctttgtattttatagcatttatggtcttgtggatatccaagtagctgatttgagattataaagtataatttgctgtagaaacacaaactgatatttgggaaactcttgagatggtgcatggtggaatgacagaacaatatacttactagataacagtgtcttctttctcatttcgtgttcttatacatatttcgtctccgtcatattttaagcaacttcatctttttacttgttgtgaagaaaatcattcattctattgcagaacagtcttttaaagagaataatagtgtttctgag

SEQ ID NO: 9087 - DNA, 949 bp, Citrus sinensis
  Intron number 1 from transcript orange1.1g038580m (locus o range1.1g038580m.g) derived from phytozome v7.0 (chr-ID sc affold00394; pos 92100 to 93048 reverse strand)
ttataagcgtgggaatctggctcagtgtattagaggtgagattctcagcttttgttactttcattatctgtttggctcctaagaaagtggattattatttttttttcccactcatttcctctgcaaccaaccagaaggctatgatttttatcatctgagtaatgccttggattggatagtttctgttgtttgtggcataaattagaataaaatgatcaaatcaggataatattgcttgatctttactaaaatttagatttttttccttttttttggtagattgctcctgcaagatcttagcattttgggacattttatctctgggattttgctttgattttccaagcaagattgattgcatattttgctttatctgggttctttcctcccccccttatttttaatacaaaatctgtaacgtcaattagctagtggttgcttattggtgttcattctggcatcttttaactactgccaaatcatgaacttaactcagttgtttgcttcatttagatttctagttatgatgtatgtagcatttttgaagtctatttgtgtcttcttcgtagcatctttagcctgagttcataacttgattcagactgatttgtcttcattatttagatttcttcaatgcttatagtcaactatagatggtctctttgttgcataatttgcagtgtcggtacctacatatgttcttttcccttccctttcacctttatttaaaagtgatggcacttgttcaaattattttcctccatcttttaaatttttgctgaaaatggtaaggtttaaaattaaaatatctaaatgcctcttgagtttcaactttctcattcattgccaagtaagtgaaactacttttccactcaattttaagttgccatttgttacatattgaaaagaccttttttaattggataggtggaagtggtgaggctcacaa

SEQ ID NO: 9088 - DNA, 888 bp, Citrus sinensis
  Intron number 1 from transcript orange1.1g038044m (locus o range1.1g038044m.g) derived from phytozome v7.0 (chr-ID sc affold00367; pos 163148 to 164035 reverse strand)
atcggttcaaagtctgcttgttttctcggaaagaggtaattttgaactttatcagaattttaattgtatagtgtcttctattttcccatggaaccctgatcatgagctagtcttattagagtgaactcaaaattctcttcacagatctcaaacatcagcatatgaactaaactattgttctgtttctctctttagtatgcacaataatgtgatatagctcttttcttttaattttattgtggtaaagtatcttcctttgtgaatagcctggactactcatgcactttccaatttatgttcagttcccatcctttctgtgctggaatgtattgccatatttctctcaagctctttcttaggttcatatatatattgttcttgtttttatccagaagctttgatcttggagaatgttgtggactcaatactaattttgaattttctgctatattatgtggagctctttctatgtatgctcaactggcagtgatattagaaatttagaatgttagattcctatctgacacaagatctgttttgatcatttggaactagttcagtctgtttcaaagtcttaattggcattcaggagtcctccgaaatacagatccgattgtgttacttcagcttagatttttgtatgtgatttttcaattgcattttaatgagtcttgaacacttctccaaataaatgaggataatttcaattagggacctcatttctattctattgtggtaacttgcaatggtttgtgtagttatgcgcccattctgagatggaattgattgaaatggtccaagatattttaaatctttacgtgttagcttgttgatgttgattgcctctgaacttggcatttgtgttctttttgctaacatagttttctg

SEQ ID NO: 9089 - DNA, 679 bp, Citrus sinensis
  Intron number 1 from transcript orange1.1g021863m (locus o range1.1g016060m.g) derived from phytozome v7.0 (chr-ID sc affold00044; pos 96435 to 97113)
aagtatttgccgcaaggggaaaggaccagagtatgtcaatttgaaaattttctttttccttctttcggttatgggaatcaaaacgaggatataattagaagaatattcgaaattctgattggggttttgcattgcttctccttcttgaatttctaacgtaacggacatgtgtgattggatggaaatgaccaaaatgcccttgagttctgtttggtatgataaatgatgaattgtggatggaatttggtgggaaatttttgtaattgtacttaattggatgataaacatatctaatgataaagctactctttttaccgtctcagaattgtgcattttacaaaattctattaagctgttatgaacatatcatgacttcaacaaccattttagctgagtttctaagggtattttcaggactaacatgctgaagcctcactttgaaagcacgacaacttagagtttgctaagtgcccctcttttcttggtagctgatatttactgccctcgtggacacttgacagctagtgatttcagccattctttttggaaatattcatgcccattttaatttaactgtcatctgtatttaaatgatttcactgaagaagacactttataatttgatttgaaatttcctgtgttaggttcagagacatagggattaccggcagaagataat

SEQ ID NO: 9090 - DNA, 1403 bp, Citrus sinensis
  Intron number 2 from transcript orange1.1g034050m (locus o range1.1g031618m.g) derived from phytozome v7.0 (chr-ID sc affold05138; pos 1776 to 3178 reverse strand)
gttggggtttttttcaggtaagctgatcattttatatttcatttatttatatatagtgttttttgatagaaaacatagaaacttgtattaagaagaaaaaagtgtacagaaagtgaacgagtccacaaataaagaaccccaaaagatcaaaaaaagtctatgcagttcaatgctgatcagatgacaaaaaaagtataggatctatatgactaaatgatctcacaacaaaaacaagctcaaaagcacagaattaagccaacaccccttacaatttagatgaatgaagaataaagaagaatcttgaaattcctttgtaatgatgcccaaagaaaagccagtaatcccactctctaccacaaaaagatgatgtcttcctcagaatcttaaaaacaatctttaatttctttaaagccaaatcacccaaaaagtggccagaactgaacatttccataacactctagttttttacctttcccaaaagcatcaataatctctgaaagctgagaaatgctagaagctggaatcactcaagaaattctagctgcctgaagcaatgaacggcattgtgacaatgcaaaaacaaatgatctgcactttgctatttctcttgcatatgacacaccaagaaggacaagcacacattatgattccatctctgaatagcatagtttacctagagccaaggaccaaacaaaaagtggaactttactagggtctttagcattccaaatcactggataagttgatctattttcactaaggttaatatttgttaaattaaaaccttgatgagccagttttcaaactctaatctcagtgctacgactcaaaaggaaggtttatgaataataacaatactaggcactgcgatcagttgtcaaaaagaatggtagattctgctgtttcagttactttgataggaaacttttttatccaaatttttacctgccaataatgtaaaaataagtgtataacgatattataatgcaaggaaaccatgataatgtgagatgcaaagtttccataaaaaattactgttagtcatccacaggaatttttggcctaaaaaatcaatagctggagaaatggcccatgtggttgatatcttctatcaaatattcttgacttagtgaactcccttgaatgttttctctgtggaggaattatctttgtttggtctaattggtactccaaagatctcagagaatttaacatatcgctcattttctagtttagggaagtgaaaaagagtagtgcttttagcacttttatttgatagaaaactgaaaaaaggtttagtaacagcaggagaccatctgttcttgttactgatcctaattctggtagtttaacaaacatcttttccagtgcagttgcttgtaccttcggctcttataccaaca

SEQ ID NO: 9091 - DNA, 1323 bp, Citrus sinensis
  Intron number 1 from transcript orange1.1g000725m (locus o range1.1g000725m.g) derived from phytozome v7.0 (chr-ID sc affold00019; pos 1532345 to 1533667)
gtccctgggaaaagaagtactggagctcctccagggttcgatttctacctcgcttctcaatttgagttctgaaaatttcaatttcagtttcgccttcaattttacaaatattttgtgatgtatggttttgttaatcaaactattgcatttagaatttgagacgattagataacaagataattgaaatcgcagtttgtttattcttcattttgaaatattttgcatctgttagtatgaaatacatgcggtaaccaaagacagcatgaatttaaaatttaagaaggaaactgtaaggggcgtttgatttgcgttttgaatactgtgttctaaccaggatgctatttggagtgtttggatagaaaatgaaaaaaattagctctgtattgttattagatttttaattattgtctagaattatatctaaaattgttccttccaaactcccccaaacggatttatataaaataataataatataataaaagaaagaaaaggattgtatttttatctagaatcgaattagatagcccttttttttttttcttttttcttttttttgagactttcagtgtgtctgaaataatttccagaactccaaaccattctactggataactcggaacaagataaatgtttattctatgaccatagtgttactggatcccaggccattgatgcctattttgttaaggattgctgctgtagtctgccttgacatatctgattgcccattgtttttgaaaattgagaaattctttgtcatcttcggacaattgaaaagttgtatacaggtgtcagcgtctgtttggaactttattttatttttattctcatttcttattttttatgttttatgaatacagtcgttgaggcgataggtttgatcaagatttgttaaatttcttgaataagaagaatgggcgtagtatgttcataataaatcaatagcaattgcggagtgaataagattggggttttttttcttttttccccttcagacacaggttttattgaattctaatgaagctggtccgtgagcatgaaatcctgcattaaaaacttttgtgaacaaggttttggagactaaatatggtagataaactggattaaacagcaagaatttactccgtagggcttgtgtctggttttcgttagaatgttgtgccaaggtgttggctattatccttggggaatatggaattaggcatggcagtcatatactaagtgctatatgctcaaattaatatttcagatcacaattgcagttggctgaatcatattaatgtagggtaaagatcgatatccttatcctgtgggatacca

SEQ ID NO: 9092 - DNA, 1000 bp, Citrus sinensis
  Intron number 30 from transcript orange1.1g000446m (locus orange1.1g000334m.g) derived from phytozome v7.0 (chr-ID s caffold00219; pos 229253 to 230252 reverse strand)
acaattaatatattttctattgcttctggacacctgtaagtctactgttttatcttgctaattattatctctgtcagcattctatttgcacaatgtctcactgtgcactttctcttgtgggttttatttgtatttgtggttcatgttcagttttcacattacatatttgttgtatcgtaatagataaaagctacaaaatgcataagtaacctaaccttctgggactagttatattataatattccatgtttcaatgtgacaatgaggtaccttcaattcaaattttgctttgctgtctattattttgtcctcattaaggtggaagccagcaacgaaagccgctgaatgttaattatttctattttttacagttacatactttttccggtcatattactttgtcttcaaatagtaccgcatagcaaagtgaagaaatacaaatatgtgcagtggttgcacagataaccttccttttgaattgcactcatcctgcaattttgatttgatttgttctttggttgtcttgaatttcatgtaatgatgaggctggtcaagggctaaacttggtgtaggaagatgcaactgcatacaacttagctaggcatcagagttagaacatgacaagctggtcttttttggaaagaaaatggtgtactattttagaaatgtgctatcttctgttttccatatacagtagttggcctgtagataaaactgtttcttgtgtttctttccagtcgaagaatatctagtgtgagatttccatttaggaagggatttcttttgttggatgtgtctaacaataaggaaaagtccatgcaatcaacacaaatcctccaagaatacgtggattgtgtagtgcacccatccacatatcccatcccatacagccctgtcagcattatttgttcagatacttttgtattttggattcttttgttttctttcttaatcaggttttgctaaaaaaaattatgtttaatgatgtattatggcagat

SEQ ID NO: 9093 - DNA, 158 bp, Citrus sinensis
  Intron number 2 from transcript orange1.1g018137m (locus o range1.1g018137m.g) derived from phytozome v7.0 (chr-ID sc affold00107; pos 456276 to 456433)
gattacgtcgacgttatttattgtcacaggtaatttaatttaatttttttcctacgaaaaccaaaaaaaagagaaaaatttgaagaattttgagatgatttgataatttttgttaattattaggccggacacgtcgacaccgatagaggagacggtga

SEQ ID NO: 9094 - DNA, 1291 bp, Citrus sinensis
  Intron number 4 from transcript orange1.1g032400m (locus o range1.1g029962m.g) derived from phytozome v7.0 (chr-ID sc affold00009; pos 803722 to 805012 reverse strand)
tttggtaaaccttccattttattcccttccacgcatgtaactatttgccaaatgttgcagagttcctataattaatttatttcttttaactattgtttctcacttggttgttaattagtgttgcctgtcagaaattggccaccaattttctctttcttttccttaaatgcctttgcagatttggttaatgtgtttgaagtatttcttcctcaacttctcttgtatcctaacccatccgatccattgaatggagaagctgctgccctgatgatgcgtgatcgaacagcctatgaccaaagagtgaaaggcaataatccttctcaatcatatgtgccatagctacttacaccttctcaagtagtaaccgtattgaaatcggatgctttattctgtattctctaccttttatggctacttcatgtaggagtttagtggtagtgactcattatattctcatttgttactaatttgttatatgaaactaactaagaaagccatgagcgtgggaggttggcaaattgaaattactatatatgtgggataaaacaacttaccttttaaatttttgatcttttcaacattacttaggaggtttgaagtactttagttctagtcttgttttctgaacaatcaagctagatgtggtagttacagcccctaattgagctgcaaatagagggaatttgattggatggttgcagttttctggtcttgatagttttttcaagaatttcccttgctgcttgaggaaccatgccttgttgtatttctttgtcaagctggtggaatgtgtatatagctcaagggccagcagtgggagagattattagtttccatgcaagtagattgtaccacctaaccagttggagttcatgaacctcaatggcctaatgcggatgcctaaatcgcaatcatagccattgttttgcagctgtacttccttgttttttctgtgcggctacaaatcttggttctgggatttggagagtgttaggaagacatgattttacaggaagttttttttcattggtccatggcatctgtatttagttggaaaacatagatgccagtgagtatgacctgaaattggaaatccaatgaacttttcttgcatgaggtccaatttgactttgagtattaccatgccattctgaagtaagcttacacagaatgtaaagatgtgtttcacttttgattgattttctgtattcttcaatttgccctacatccttcagtgaagtcattcatttgttgtttgcatgatttgattttccagagttttgtgagaagt

SEQ ID NO: 9095 - DNA, 1153 bp, Citrus sinensis
  Intron number 5 from transcript orange1.1g004764m (locus o range1.1g004764m.g) derived from phytozome v7.0 (chr-ID sc affold01003; pos 32385 to 33537 reverse strand)
agactcttcctgagtaagtagtttatgatcatgagtcatgaaattttaaatcaaagtattagattctgttcaaaaggtaccaaatctccaattccattgacttcggacatatatctctgcactccttttagctggctgattctaatattttatgtcgggcaatgtctattgcctagacaacctcaaagagtgaaatcatcagaattctttcaagggtgttgtatgaaggcctgaagcaatttggttgatcgtcctatggcttcattagtagttgcatttggaacgcttatttgaagttagatctttctcaccgtgcatggagctgtctaagaataaataattgcaatgcatgttttgctgttggtactttaggattttagagagtatcaaaatgattagcttgaagataactaactgtagttttcactcatgataaaattgccaatatagtacttttaggattttagagacctaggctggttttctttgcatttgtgtatacatctgatagactcaaattgctctacagattttttttgtagaataaatacacagatttcactacacaaaacttttcacacacaacagaactcctacacaaccaggatattcaagagacctggaactctcctacattcacagaattattttcaccaaatctgacaaataatggactgcctaaaatactaacacaactgcttgatagtttattacaaaccacaaacacaacccaaactcctattaattgcccctggaaaccgttttccttctctggtatgtgatatggacaggtggcctatcagcatctatggcacctatttgctgtttctgcatggtctgggtcttcatttgatgttcagtttgtagtttatgcctttagtctaagtttgacatttctttttctttatcatgatagctacacacaataagtctcctgcaaagctaatcgaaaggaagagttgttgtctaagtgcatgttgtatatacattctggttctcttaattgaatttagacagagtttcatggaaatgtactgggtagataactattccatgcatttcaagcatatgttcctcctggctgattttgagaacctcactaagttccttctttgcaggattgttccaaatttagccatcagtaagattttgt

SEQ ID NO: 9096 - DNA, 465 bp, Citrus sinensis
  Intron number 1 from transcript orange1.1g002027m (locus o range1.1g002027m.g) derived from phytozome v7.0 (chr-ID sc affold00091; pos 443861 to 444325)
ctcacgagcatttattgctgctggttcgagtaaaggttactactactactctaccatttcatatctcttttgggtctctgtatttcattgtatattgctttttttcagctaggtagttgataaaatttagctgggtcgtgtctagctgtctctaaaagttataactttgtttcaattctgtgaatttttttctcaatcttttattatctgggtatgtaagtttgagccttttgaagcttattacacaatcacaaccaaaaccaaaccgatataaaagtttttgatatttttaccctctttcttgttttcattcaaccaaagggagtccaaatgtcaatccgggatattcttgttgcatttaattttgatataatttcattcaattttcgtggatgctaacaactaaatcttggtttttgtttgtttttgagaaactgcagctgatcttgttcgcttctggaagaa

SEQ ID NO: 9097 - DNA, 4281 bp, Citrus sinensis
  Intron number 19 from transcript orange1.1g000206m (locus orange1.1g000195m.g) derived from phytozome v7.0 (chr-ID s caffold00058; pos 387074 to 391354 reverse strand)
tggcttcaatctttggcttcgttttggggtcacctgtatgtacagttttctttgcaaagctttgaattatctttcatatttgacttgaataattaagcatttggaactgtttcttgtctttcgttttattaaattgtttgttagcggttatagtcagcatcttgtgataatgaagaatttggtcttaaattgatgccactgttggtaaagaggctttgagtgtaatccggcatttggtatgcatgaagtgtcaccttttctaagctttgtgtgcatatatgccatcgtccttgttgttttcctttcaattgatttctgcttattaatgcggttagtaacagagtcactttgtacatcaattcattttgcatagagtccagaatatcctgggatgctttactacagtttccgggttgaagataaaacttggcaaaagcaagatgtctggagctgggtttgttttggacattgcagatgtgcaagctctgatcagtttgaattctttggcttgccaattgggcggtgttcacagttagttatatgtaattgtctgacagagatgaaaggtcataggactgggatagtgatttttcttggagggggacacttggtcaggatctcattattcagacttcccttcagttctttctgtcttccattttcaattttggtctataagagactgaaggggagaaaaagtgacccctagatcattcaagtgagaatcctaagcacatggaaaatggaagattatgcctgaattgaattagttattagctgtcaaaccgtcccttatgctttctgataaagcatgaaagatttggtgtcattaatagagatgggaaactaatggaaagaaaggcagagagaaagcatgtgtgcacaagaacataattggacggtaatctgcctgttgttgttgagggatatagtggagaggtatgatttttgcagtgtatggatgtagaaatggagattatgtacgtatcttggtactaattgctcggactgactgatggagagatatatgtgtaatttctactgttgactggaagctgtttgatgcgattcatattcttaactcactatctaaatgattaggaactgctgtgtccttccagttttgccttgtgaagaatcataaatataggtgagaggctggaagtagcatgcagttggtgtgggtattaggaactgtagtcaacatcctttcctgtggtggtcccgagagttgtatgcttttgttctctgatttgctgtcagaatgttccaggagtggtatatttttgttcaaatcagatttttaacccaaagtgtaccattggtgatttctgtgaaggaaactgtcttgatgaaagatgaattctgctgtcagagtaaatacctctgctttttctgattctagctgcattagctggttttgggttctttgacggtcgggaaatcatgtgggtcttcatggttcaattccatgctttgttggtgagctactgcctttgatgaaaagatattttctacggttcttcaatttaaatctgagggttagacagaggatgctcttgcaaattaagggatatttaccttctgttgaggcaacatcagatatttgtggtcaatgatgtttctattggggtccctctgtcaaagctgtcaagggtgtgaggctgttcacttattcaataaagatgggtagttatttttaattggagacttgaatttttttttttaattttttaatttttaatttttccttgtttttccctctatggtgaattgtcatgtcatgtaagtagtgggtccatagtcttctgcatgtaatgtgtagattgtcaaagagaaagttggtggacaacttgttatttaggaatggactacctgcataggctagtgagctcactccctttgcctacagtatagaggaccctgttcacaaagttggatgtatgaatactgtttgaacttccataggtatgttcatatttatctttgttttaatcctagttcttgactgtctttggtatccattgatatgtagtagtcccatgacgtgaccatgttaactgagactcgctgcatcttgatgttactgagtgctaaattttggatgtttatgttgattgccagcatacaggtgggttttcctctggtattgcacaaacattaaaatgttattgtcatggtatacatgtaaagaatcctttgaaagcctgtgaaaataacataattctggcagtggagaattaattaatgtttattgctgaatttgatgcttggaacagttttggcaatctctttttttaaaaagaaaagattatggtcttgaatctatgtatatgtcttcgaggtggatctccttagcataactgtaataattctaattcacagaacactaacatttaacctggatattatgtgaatacaacttggaaaaagatacaggagagcatgcttaatagtcgattggtagactattcagaatgaccctgaggatgtttgttcttcaaaccacgcccgcccccccctcccccccaacacaagaaaatttggaagctatttaattttcattgaaagttgctgtgcctttacgatgagtttagcctagtagactgctggtccacttttttctggaattcatttttggcatcaataaaattgtgttgtttctaaccagaaaaagaaaacaaaaactgcattagcggttaagtttttccttcttgcaaagaagttaaagctaagtataactcagattaagttcttcttctgccttctgtttgtgcaaatctcccccctgttttttgtgtatgtttgtgcagccttagctccagcccttaccaaatgtgaaccaaattctttcccaatcacagtgtgaatagattgaatctctggacctcttgtacacttggagaaacctaactaatcaaactaagtggtgcatgtgctatctatccaagcttggatactgaaggctgcaactactaaaataaggtaatggaagatcaaaaaataacaagcaagacgaaaagcggatcaaaaggagccagtcatctgctgtcattaacatttcacacccaagtagttttgcatttcatcgccatatttggtgtttcctactctgatttagaataatctgtctctgggttagttgtctattataaaaggctcatttctcaagctttgtaggcaggactgctagtgtttatagtgcctgagttctttggctttcttgtataatggtggtaacagcagatgacagcaaatattgtttctttatgcctaagttcttctcagcttctttgcactatatttgaaaatagtttcatgaagaaaatcaaagccaagtcctgctccctatcgatcaccagctgtaaatagggtgcacaccatgacccagtcatcctattgtcccatgaaaatgcttttctggatcgttgcaatcattttacagatattaaagcctgagaaataatagtgcctgccttcattgaatattatttggttgcagcattaggtctggacataacaaccctacaaaatattagtgccaatgaattttccctttttaggtttcctatcctttttcttcagcttgcctgcactttatctggcaatagtttattactgaacctagaagctccctgttgttcacagttgtgcaaccacgttgcatgtggtacacattgtggaatcttcctcttttttgataggaaacaaggaaactagtattaataagaacaataattacaaaatgtgaacaagaaatccacaaagaaagaaacaccccaaggattataaccaccaccttcagatgctcaaataactgtctgggcattgatggaaaattgtgacttctcagtccttgcttgaacctaaaaaatggtgattttatgcggaagtaatggtgacattgaattttccgcttcaggtcttttaacagtttttggacttcctgtgctgcaaatgagaatagcttcatatagaaatttgaagccaactccttgtagttgatgattatgctattaatgagtctgcatgtggaacggtcatgtttcccatgttttttcatgaaagattgcagggtatatgttgttatggtgataagacaaaaatttcatactcctttttcatttttacatttattcaaacttattgaagatcttctctctctctctctctctctctctctcttcaaacatgaatttgaaatttgcatttgttttatgggatttcttgaaattttactaagttcaatttccatatcacaggtgcaagaagtacccatca

SEQ ID NO: 9098 - DNA, 2677 bp, Citrus sinensis
  Intron number 9 from transcript orange1.1g001245m (locus o range1.1g001123m.g) derived from phytozome v7.0 (chr-ID sc affold00008; pos 928275 to 930951)
agtttagagtgccctgttgcgtcttcgatattacggtaagtttttgtggtagtgtcatttttttgccattacaggatcaactgatgtttataaattatgcatactgcataaaataactttcttcgccgattttcacattttctctcatgtagcttcgagaataatttgattaggcattgatagctgtttgatgcattccattggtaaataatattgttatcaactgatgtttataaattatgcatattgcctaaaataacttttgtgcctgttttttaatttttccctcatgtagccttaagaaaagtttgattaggtattgatagctgtttggtgcactccattagtaaataatatcggttaatgaaataacctaaggttaggatggtaactaaagcatgaaaaggctgctttttggaatgcatagaagggatggtcttgctagcatggacaaatatgggtaccttttatgtgtgtgtgtgtgtgtgtgtgtatagtcattcgctagtgaggacatccttactttaaacacgtatttgaatacattggaaactgttttatttgtattttagtgatatcctcactttgttaaaatgaatatgttttcgttaaatattatatatagaaagagagaggaagagagagtaaaagatcccttactttattatagtaagagacaaattgaaagaccagaaaaacacatactccaatgcagtgtattgaaatttgtgtgttttttttttactttttagtttatcccttactttaataaagtaaaggatccctcattagctaatgactgtgtgtgtgtgtgtgtgtctagtaagagttcctttactttaatatggtaagaacaaactaaaagataataaaacacaaatttctatacacttcatgatacaatgcactgtattgaagaaagtatggaatctcttattggaaaattactatatatatccctttctaatatgggattcttacgtgggattatattgcgggaaaacttttgtggccactggatgccaccttatcttttattttaaagtcatttattttatgcaaatgggccgtacatcaagaacttttttatattttaaaaaattaaaagaaagtgtaagccataactaacttttttatttaaggaaaaaggagtaaatttagcatttgagatcttttgctcaattgagagagaatcacgatctgagaagaagaatcaaatttaaaaaatcacaaatattagaagctgtaataactagatgccaatttgactgaattgaattaaacgcactcatatttcctttcattatagaattactaatgcacataataatgcaacagataacagacttgcacagcaattggaatgcatcaaaataattaccaaaataatgaattaattgaattaaataaacataattggtaagcaatatatgcatttaatcaccataagtaaacacgacgaagctctagttgctggaaaatcccaaacagtgattcagtttttcctgggctctaatctttgtagtttctagtacttgtgataattaaagtctgattcctgttttcaaatctcgattctcccacgattgtgtgaaagctctcaaattctaagcatttgattttaagtttgctcttcctttttttaaatagaaaaaaaaaagtctgttaaaagtgttggaggtggggccaatatgtcatatggcttccgttttctttcaattttttaaaataaaaagctcttaatgtggggcctatttgcataaaataaatgactttaaaacaaatatttctaaaatggcattataactcaatgtaggagtcccttattcgaaaagtgtagatacacgcacacatcacgaactgtgtgattagcaaatccaatctatgtgtgtatacacacatacacacacaacatcatgtatgtatgcagtccttgatagcaattagcaaatccaatctaatcctcttgtcccattctatatctatccatctaatcatgaacacatgcctaggtggcatttgtattggtatgtcatgtttaggtctatcaagctctgagtatttagataactatcaacttgattatgaactgtgtatttaattgattagaagcctatatatgacgtgtaatccatttaaaaacgtaatttcatgttaacaacgccaaatcaattgacttgaaactgactcaagtaagtcataacctcatctattaatttgacaatacttgaaagtgtgatgaaacacaccatattgtaaatttaaaatattctataacgtcattgatttttaaaatattctatcattggctctctctctcttccttttttttttaaacacgcgcgcgcgcgcacatacacgagatagtaacatatggcttaatatgtaatgggtttgtgtgattcaagtaattaatcaggctattatggttgaattttgggttagacatgtcaacttgtgctcggcctgtttgattattatgggtttgtatgattcaagtaatgaaagctatttgaaactgactaattcgtgttggcttccagcattttcacgtgtcatgtctaaaagtattacccttgtaccgacactcatataaacatgtgcacactgtgttgtctctcccatcattttcaatttttgattttgtgtaaagcttgacatctccatttgattaggt

SEQ ID NO: 9099 - DNA, 657 bp, Citrus sinensis
  Intron number 12 from transcript orange1.1g000525m (locus orange1.1g000525m.g) derived from phytozome v7.0 (chr-ID s caffold00040; pos 327289 to 327945)
cctttccttctgaaaacagtagtcaaaggttggtagcactgcatgtctaggtctatcttgctttaattttcaagttaacagatatgactgttgattgatatttgattctagtttgctgattctcatttgtagtttcaaatgtcggtcttgtctgtgcctttgtagatattgctttgattcaagacttggatttgcttaaatgtattcttaaatcttgttgaattggacgaactgaatctgttccaagcatgtctggaatggaaaattagaaatctgacaattctgaatgtcaaagatgggaagaaacatgattaaatgcttcaaaaccaaacatgaaaagagtatactgagctagttttgttatgtggttttgcaaacatgcagtttcttatatctgaatagtgattacgagcccatgtagttccgcttattttttaatcttttaacttgcagataattcttgaaacctgataaatgttctgctctttttttctctgcaaaatggactatcaaaacttaaaagttttgaaaatccagaatgcatttaggtactccatatatgttatgttacccttgtggatatttagtcttcttttctttgtttttttttttttcatgtttattaggattccgggagattaagaaggtggatatttt

SEQ ID NO: 9100 - DNA, 739 bp, Citrus sinensis
  Intron number 2 from transcript orange1.1g031701m (locus o range1.1g031701m.g) derived from phytozome v7.0 (chr-ID sc affold00280; pos 149191 to 149929)
cggtcctagtcagcctgtttgttgtaggtgattgggtacgtaacttgtttctgatttcttttgtttccaaatgtaaagacttttcacataaatcagattcttgcatattaccgcatatttgcaaaattctgctgttatcatttttcaaatatctgcttatcatcgtattgtctttatatctagttgtatttgtgttgttcctgattgcggacagtaatctccctagtataacctcctcatgcttgggatgatgaagtcctaatatctaaactgggaggaggaagagagagcacaggaaattgttacaacaaagaaaaaaaagcaaagataaaaagaaaaactgtggaatctgtttaaaaacactgttggtttagtaataacttaatctgagaattgtacatggactcatctgtgtccgtcttttttttttcataaaaaattttgaaatatgatatatcaaggctgaaatgacattgaattattctaaacacgtagattgtctctcctttggcatctcctttggcaaaacgggtgtgagattggtcttttgttgaataatagtaatgcctactatgtcatgtagttcttgactaaaacctcaacggaaactatctacacgatttgagagaactgatgcaacataaccatgtatattctgctatttttctgctttgtagatttgacattagacaataattggtgtaacaaatttatagttcaaaacatgcaggtcacggct

SEQ ID NO: 9101 - DNA, 383 bp, Citrus sinensis
  Intron number 2 from transcript orange1.1g028525m (locus o range1.1g021854m.g) derived from phytozome v7.0 (chr-ID sc affold00032; pos 447685 to 448067 reverse strand)
aatttccgggtaatctgaaatggaaacttgttgattttatatttatctatgtgtattatctcgacgatgtcttgaaacaattgcctggttttgatttccttttaaaaaaaacacagaagaagctagggatgcggttttggtaacagatggagatagtgacattggtcaggtttgtgttatgtgccattgattctgtgttagcgaaaatctactaaacaactgaaaacctatactatctaaaaggactatatagcatatcttgctactacttccatttgtatatgtaatgtgaggtgagatagcttgctgtattattgattcttggtgaatttatcatatttaaatagtaatgatattgacgatcctatctcaatgatatgcag

SEQ ID NO: 9102 - DNA, 2921 bp, Citrus sinensis
  Intron number 3 from transcript orange1.1g041249m (locus o range1.1g041249m.g) derived from phytozome v7.0 (chr-ID sc affold00274; pos 214071 to 216991 reverse strand)
ctaagaatcggagttacttgttcaatggagtcgccaaaagaccgaatgaagatgaccaatgttgtccatgaattacaatctaccaagaacattcttcttggatctagaaccatgcgcgaaatgcaaagatttcgctgaatgatataaattcccctttagtttttgacaaggtaatgttaatttatgttgtttcttattacttgtcattttcttttaataatgtttttacacttctaccaatcacagggcgacagtacagttaaatgaatacttcatttagaagaacgcaaaatttgaccttaaacaaggaagacagtcaagtgatcagaagagactattttctgggggctgcatgctagaggcacaacattttatcaattctgtgtagaccgtgctccagttatatatgtattcaatccattaaaataaataatgtggaatttttgtactgaaatttttagtatttaatttgtttaagaatgactatgatcatctagcttccttgtggtatctctccgactggtttggaattttattgaaataaatatggactattatttcggaacatcttctgttatttgtacctagtaaatatataaatcttgatctgatttgactgaattttcttcagtctctttgtagcggtgtccatatttcttgcttgaggtttgaactcggtcaaaatataaaagaacaatcgctcaggccgactcgatttcagttttgatggaagttctcatgacgatgcaatatattgtgatcaatatgcacaagtgactttcgcaataatccaagtctcagtttttagaagaatcagtacatccataaatcagcaaaaagaagatacaaatcagagagtgcacacaaaatagtatcaggttgattatctaaacgtgccaatagttagtccaattcatacaaacttatcgtagaccaactaaaaatggttgcttcaactaataactagactgaaaagagctatagaagtcaacccaaattctccgggaatgtttcagcctagcaattaccactaatgattttcgtggccatcacctaattacgccatcatataattatgtcaaatgatggactgattgacagagctggaagcttgtgagtttgtgctttaatttgatttgtgattgatgcagtatttgtttcttgttttatgactgacatgatactctgatatattctagattttctccgatagtaggggtgtctaactagcacaacttcacatgtggacttttggattctggtgattgttgttcaacaggttttgtgaaacaattcatcgaacacttattctaacattttccttgagcgaattaatttgcatttacttagagctccttcaaagctttgattttgttgttaatcctcaataatccagagtttcggtttttagaattcctttgtgctgcattgcggaaaaaatcactaacgaatctatctaagtttcaggaaattgataagaaattgtgtgaattctagagctatatttatatataaaatcattgtcaggtgtagggctcttaaactatgcgatttaagatagttttttaattaattataaaattgtacagttcaagagagttaaaaactaactcttttaaatttcatagtttaatagtgtgtttgcggaaaataaataaataattaaagagaagagggcggagggatcagcaaaaaggaggtacttgtgtaactaattaccaatgcgtgtcatttgtatgttttgtcctatatcattgatgtgttattacttcttaatgactcgagaacctctaattcaaatcatcaatctttatagattgttataatttgatgaagtagagtcacaaattaatttctctggtttttcattataagtaatcataacattaattataaatttcacatactataccaggatctttttaagaaacggatatcaaaacaatctttaagaatcatactgaacttaattataacaagtcgcattgtcctcaacgttatcatagttgaaaatcagcttttgaatataacttttgttattgtctactttaatatcatacaataattattaatttatgtagtaagtttgtcctattattgtaaaatagacaaattttcaaaaaatttattattttataaatttatttaattatgaatttcaaaagttgactaaaaataaatggacaaaatttttgagtttctatgatgaccagtgcaaaggctatgctagaaggctccggccggcacttcaggagaggtaacgtgataatactaaaattcgcagggccctgttaagtggctacaatattaattcttgattcctaaaccttgaattttgaaaaacccacttcaccaaatacgagctactaagtgaaatttgcaatttaaaagagagtaaataaatgaataaaacaagggcataagagtgtccaagatcaccctgttgttgaggctctttctacaatctcagtaaccatccgaaaggtttgacaaaattatgaatgttacattatgattataataataattacatggtagagccctgctgagtaaatacattggtctagattcttgattgttgaaccttaaattttgacaaacccattccaccatttacctgcaactcagagataaaaattttccattcaacatgagcacaagagtgccttgcccttgctctttttttttgctgcgtatgctgtccttgtattctgctttagcttccacaccattctaattcctgaaatccctggcgtaagggcttctgcagctgtcgggaacgagacagatcgactagccttgcttgatcagccatgaccctcttggtgctttaggcttgtggaatgaatccatccacttctgccaatggcatggcgttacttgtagtcgaaggcacagaaagtcacaatcttggacttgga

SEQ ID NO: 9103 - DNA, 641 bp, Citrus sinensis
  Intron number 5 from transcript orange1.1g004256m (locus o range1.1g004256m.g) derived from phytozome v7.0 (chr-ID sc affold00208; pos 100102 to 100742)
tggttgaggaagaaacagacttagcaaagactcaggtatgctctgctttaacgactatcttttaagttagaagctttgcattgatatcttatgcatccacaatttcactcgattgaaagtcgagactttctttggagtttggtcttataaataggatttacaggttatgtggtagtttatggcgggtcgcttgcctcgtctggttgctgttctatgataactgtctttgttaatataagaatttaaatgaacagagagcctcttaaaaggcttgaacaattttcccagagaatttgacataggaaaattaaccgaaaaatatactggaagtagtaataataattagatttcttgtacctatgccacttggcttcattttgcagtatgatgcctttgataataatattattatatgtcaggtcagtgccatattttattcataattttttttttgcagtcattgattatacattactaaaatgaaaatcctaaccattgttctgatgcgtttttggtagtttttattacttatggtattctttgataatgaaaatgaaactgtttcattaatttaacaaaagtgtgattgcttgcatgtattcatgcgttgcagatcattttggctagagagtatttgaagg

SEQ ID NO: 9104 - DNA, 1583 bp, Citrus sinensis; identical to SEQ ID NO: 9073
  Intron number 1 from transcript orange1.1g023948m (locus o range1.1g023948m.g) derived from phytozome v7.0 (chr-ID sc affold00254; pos 148523 to 150105 reverse strand)

SEQ ID NO: 9105 - DNA, 2748 bp, Citrus sinensis
  Intron number 1 from transcript orange1.1g016050m (locus o range1.1g016050m.g) derived from phytozome v7.0 (chr-ID sc affold00037; pos 62335 to 65082 reverse strand)
gcttcaactcttcgttctaacaccaagtttgtgttcttgttcatttcatttctccctaatattttgtgtgttggcatatagattcttgtattaaagtaaaattctttgcaattttttctttcctttgagctgactttggatctgggtttttgtttttatgatttcgtttggcttatggctgcattacttcaaatgggttgcttattgatcttgttatctatgctttaaatgcattgatttcgcatgcttatttgttttcttttttctttttttcttctttttgtttgaatttattcagacggcgttacatttatcttttatcgattgctatgtacttcaaattgtgttcttgtatctatcttagtttgatggaatgggtataattactttaatatttgttatgaaatttcttttttctctcctacctctttgtttatcaaatttcgattttttcgaggtggggctctgtttttctggttacatttggtgacttgttatagcaatttaaatttcattactgggtttgattcaagttcatgtataatctttgagttatatgtggtctcatataatttgttggaaagtgattttctttatttatatattatatattgttttggaagtagtggttctgtggtatccgtttcaatctctaacatatgcctcttgatattatgtttggaactttatttataggattgactctatgaatttgattgtgatgtagatggccgatttccttgttttatttattttgtttttagcttggtcttttagttaaatggaagaataaagaatattgaaatgaggattattcctttgacgctctgctttcattagcactcttaggataccatttgagaagaatagtcaaattcttggttttgcagttaaatgtccttttcttgtttttaagtttaggaaaaaagattagaaccggtttttcttgtaaagcaaaaggctttcaaaaccattttagcttactctgcattgtggaagattttgtcttacccctcaggactgaaataaaagctcttttatttttaatatgaatctttaaaaaaaaaaaagatttatatatctgaagtgtggtggttgaaatggttctgctggattggctggttttaaatgcaatctgtggtttcaattgcatgcagggttttctgtttgttgttttcggttaggtggggttggggacggttacaacatttaatttatattttattattagaatcatctggaatgtcttctttatgaattgtttggttaatttgttgagatttatggtttttctatttcttcctccctttttcttattttgtgttggctatttggttttggctaggttctgtagcttttaattttggctgctccctataagttcatgtattatgcttatattttatgttttgacaagtgcatgcatgcttgcccagctgtcggtttcttatgatgtggcatataaatagtttttttgtctatatgtgtaagcttcttgaatgatgctttcttgttcctgcattatgtcagaccgtgtgcaggtggaatgaaggcctttttttgtctagttctaccacaataacatgtgttcaccatgttttctgtcactgcctattcttcttttgtattcacattagtgattttaaaaatatgatcaatgatccttgttgcaattcttttagcttgatttgtatagcatagttatgtttattttgttttatttgatgtagtatttactgcttttcatcttttttttttgttttctgaatgtgattgagtcttcatcctgataaagaatattcaatttggtgagagtaggttggatacctttgcatagattctttgttttataatcccttcctgcctgtgcttggttggtggtggatctttgacttatttcaccattctttaagagatggtgggatctattacttatttgactgttgtttaataggtggtggatcttttacgtatttctaaattgcaacgtaggtcttcttttcaaggagctggagatcattggttgcggttctaaatgtttaaaacttctatcttttggaatttttagaaccttctgtgttttatcaatttgaaagttttcaaggttccaaagttttgaactttctaaatgttaatttttgcggctagtattatacaagtgtgttaatctatggttatacaggaaattttagctgctaatcatgtttataggatctgagataatctgtgttgtctcctttaaaatatctgttcccatcttggttttagtagttattagcaaactactacttatggttctgcgttaattcatatattattttttttccctttcctttgttgtatttggtatgactttttttttcccttaatatccattataacgtgtttgttatttaatgggagcttggttggtcaaatggttattactgccttagtttttaaccacaaacctgttttaatgtaaatttctggaaaaagcaagttgtctatttgttgttgccatgtggacgtcactcatttatgtactgctttccctttagttccagttccatagtattcatatgtcagatatgatgggccatagacaagtctctgctattgtcatatgctgattttctgtaccttttgataactatgagctttaactattttcttgtccttgctggaaatccaaactcagctgtcagtgtctgatcctcaattcttttgtttcattgaagggaggttgagaacctcaagaagcctttt

SEQ ID NO: 9106 - DNA, 1448 bp, Citrus sinensis
  Intron number 1 from transcript orange1.1g024823m (locus o range1.1g024783m.g) derived from phytozome v7.0 (chr-ID sc affold00002; pos 1850644 to 1852091 reverse strand)
agctgtcgctgaagttaaagatcaaggaagctgtggtaagtttttttattgttttcatttactttttcttttttagattttattcgttacctgcagtactttaattattatcttaaaattatgaatgaatcgattgcggagaggagaggaaaggaaagggtatgtttggtattttaaggatgattagagttagaagaatctgcactgcttccggttgggggcagttgtgctaagttgaccggttaggactattactgttattttttaatcttttccatcaattagaatctggtttttgtgaatttctttttttctccgacactgttattatgattatttttttaaagtgctgtttcgttctcggacttttggcgagagttcggaggcttgggccactgtgataatcaatggtccaaattgagtattccttttttattgttttgtcgaaaaacaataaagagaaaaactgacaagaaattaggaagtgtgaaaaacaagaagatatcttctgacggaaggctcgagatattttctgttttccctcacgagaaaatgttttccaaatgaaaataaaaagaactatgtctggatggaatcttgtttggctgtcctgacgtggccagagcttgttggttgaacatagctgccattgggtacagagtggcgggcctttttaaaaactgtagtaatattttttgtgtgttcagtagacgtgaaaatcgtattcctatcacttttggtgataggtggtaacaccacaaaattttattacgtgtcagtgggctgggccgcttgtcagtgtgtcagttgacttcatctgcataattattaaagctctgaacaaaataagtgcgtttattttgtttatttgtacaggatattggtaattcatttcaccacctatgagcttcgagcttgatatcttgttccgttctaagagattttagggattagtccttagataataattattacgccataacttgtattagtcattgtcctgtagtagcaagttaattattttttttatttatcattaaagttgtagtatggtaaaacctgtcaatgagagatattaaacattttatgtcctacaagtcttttgcggtcttattcaacctcaatccatcattctgaacaaacttaataactcagaattatatgaagtgatgattttttttcccctacctaacttttgtaggtaataaatcaactgatgtagatacaaaacatattcaaatattgagttgtctaagtacttaacttggttagaaattcagaaagcaaattatctgttgctctctgtgtcgtgtgattctaaccattatttgattgtatctcgcttgaatgaagggagttgctgggcattttcaaccattgcagctgtagagggtataaacaagattgttacaggtagcctgatctcactatccgagcaggagttggtg

SEQ ID NO: 9107 - DNA, 1481 bp, Citrus sinensis
  Intron number 11 from transcript orange1.1g007303m (locus orange1.1g007303m.g) derived from phytozome v7.0 (chr-ID s caffold00072; pos 484085 to 485565 reverse strand)
gacataggtatgtggtactatctgttacatgctatgattcttgtcatatgtatttccccactctgaagatcttgtggtttagttttcaagagatagtgtccaggttaaactaagtgtggggactggtaaggatattcagttttgggaggataaatagttcggagatttttctttgtgagcgtttccctcgcctctataggtctgtcccacaagaaatcctcctataaattttttgtacatcttcttcctctttgttgaattggcattggaatttcaacttcaacagaaagattcaggattatgcttctctcttgatgttgttaaacaatgtcgatatcgatgaaatgaaagaagacagaggattgtggactttggagacatcagacattatttctgcaaaacttatcttgactgactgattaataatgtctcctaggctgatttcttaccctccaaattgatctggaaggctagtattcctcctaaaattcaagtctttttgtgtgccttggctcaaggaaaattaaattctggggaagtgattcaaagaaagttccctaatatgtgtctatctccatcttggtgtgtgatgtgcaaaacaaatgcagaacaagctaacctgaattgtcacctccttgttgaaagctcagttggtggctagagcgtacaatcaatcttatggagttgactatctcgatatttttctctagtggcttgaataaattctattcaatttcttataccataggtagtccacgattggcttttatttcaacttgatgcaaaaaaatgccttctttaatgctatttggtggaagggtgtggggcaatccttaggttttgttcctcaggcaggtttgatgtacagggcctcaagcggggcagaataactagcggctccctttcaggctaatttccaccttccttccttttccccctaatacccaattatcccctactgtcgtagttgtaatggtaagggttaatggagtataataaaaatatgaggaagtggtaattagcccaaaaagtatccctcaaaccatcatggagggtctgctttaagaaactaagcagacttatactgtcttttggacttggaatacgtcagtttgatcattttgtctttctgaaacatattcctgtggtaatggttgctcttgtagtttacattcgtagtatcattgtacatcataacactgatttgttggtattgatgtaaaaagccaatttcccatggacatcttcttcccctttgctctttctctcccccctctctccacccccgtcccccaatgccaacccacaaaaactactcaaatgagtatttgtgaattttttgtagtaggtaccatttacctttgttcttggatcatggccaatatcatgcacggtcttgcattattttttatttctttggtttttttatgggccatgtggatgcagggacaaaggaactgttgaagagcatctctgaaaag

SEQ ID NO: 9108 - DNA, 2210 bp, Citrus sinensis
  Intron number 1 from transcript orange1.1g001817m (locus o range1.1g000991m.g) derived from phytozome v7.0 (chr-ID sc affold00044; pos 146449 to 148658)
ctgaccgtgaatttgggtcaacacagcagcaagttagttttgatggataccctttttgttgaattagattatttcatttgatattttgagtttgacattgtttcattattgatttgaggtgtttttattacttttggaactgacagttgtgttgttttaaggtgacaaataaaatgaactgtagaaacgttaaatttgcacgtgttaatttgtgagagctcactgaattttagtgaaagttttcatcttttctgagttttaaattttaattcctaaacagctcaaattatttccctgttcctctttttgtttttcctagctctatttggcagttaagcaggtgatttatttctttattttttggccttaaaattgattctgtacgatacaatgaacttttagcgtcaacgtgaccactctcttagttcatgctttgttgcttgttgctcaataaaaagaaccttcgcagaaaaataatttttttgggatgggctacccttagtaaactggggttttaacaatggaaacaagagctttagagaaaattacgaattatgatgaataacagctcatgagagtaattagaaattgtcatgaataaatgtattggcttctaatgtccatgcaattgtgttaaggatcccaaaaatatagttcgtcatgattgaaggaatgaagtttgggttgagctaaactaggaatatggaaccaggtttagcaattcttacaagcaagctagaatttccaccagagagagcaagaagaattattttacaaagagattggttatcttgattttagctttgagctgttgaggtgataaacatatactggaagctaataattaactctaataaatgcataatatgggaacatgataacctcatattgcttttctatagtttctaataaacgctttacaatcacttcatatgagagatgatcatgattgggagttttttttttttaaagatgatgcatgtcttctaagttacatgtaaaatcttggcatgttctccacaatgtaaaagcttgatgtagcggaagtttaatgttctaatattttgctgattcttgagaatactaaaataaaggaacaatctaatttcatgtcgcttcgaaagaatatcatgaacatagagggttaagactcgttgattctgcagaatattgaaaattaactatattcaaaaacacacgcagagctttgaaaactaaaaatgttgttgaattcaaatttgccttcaaaggctacaagagagtgttttttatactattagtaattatcctaaaccatgaagaaaaaggaaaacaaactcctaaactatttaagaaaaagaaacataaactttagataataaagggactaatttaaataggataaagattcttaatttgcatcaaagctccttcgaatcagctcatttggaaactgaaaatgtcagtgcaatgctcttgagaatatttggaagattaaagaacatgagataacatttaagtagcaagagtagatagctcacgctaatgaactctatgtctcgagaggttttggagcttaggatttgtaggccaaggatggaagttgctcttgaagtccatgagtgattattcataactttctttttgtaactcacttgtgtatcatcaactgattgatctttaacatcaatgacctttatactttttcttccatggaccatagttcagttgtaaatatataacttcaatctttatcaatttaaacatctgtactacccactagtttccaagcaacagttatgataattggttaataataattgccaatggttctgaaatattccctctctttgtcatgttacatcttcatgcctttcccatcatgtgtgttaatcttattttctgtatacttcctcaaagacacgtctttcagaattatttaaaattgtccaacaaatttatcagtctctagtttactctcaaagtgtctgatctgatttgcagtttgtcagatttaactgcttgaagtcctgatttccagttagtcattagtcagatcattatctgggctttcagtctattgcttggagcattgttggtttgttcttttgtaatttctggaggcataagtgctgtttttttataagaaagatttgattccggcacatataactctgttgcattcttgttgtttgatgattatcagtgtggttcaacccttgataatattg

SEQ ID NO: 9109 - DNA, 3359 bp, Citrus sinensis
  Intron number 3 from transcript orange1.1g014440m (locus o range1.1g014440m.g) derived from phytozome v7.0 (chr-ID sc affold00239; pos 11126 to 14484 reverse strand)
gagttggcgcactgccccatcaaaactatgtattttctcggctaatagtgcttaattaaaatcttgttctcaatcaaacacattcagaatgtctttcatttgcttcttcattttttggccgttgtgcttgagtgttggtggttaattcttaattgctgctgatttggaactgttgtcttgagtgttgatggtgatggagatggatttattaatcttatatgtttgtcctttggaaatgtgatgatggacatggattatcaatcatgtttgttatttggagatgttactcaatagctttatttaactgagtactcgttatttatttttattttttatttttttgttttgttaactttaaaaagacttgttgaaatgttgaggatgcttggtaggtgatatttgtttttcattcattgatctgggctgggatttgagtttttagaattttaggtggctgcttggcgaatttctggaaattgaattgttgtaacttgaattgtacccaaaccaaaatacggacccgaattttcaaaccggactgatccgaaacgcttggttcggtctggttgggtttgctttttgaacccaattgggtttgctttttgaacccaattgggttgaattctcccacccaaacgggttgcaacccaattgaaacccgaaccgcccgaactgaaactcgatttgcccacccctacttcgaagatttttcgtctttgagggaacttctttatttttcagcatgacagtctttttgggtttctttggtacagtaattgtctttttgttctgtgttgaagaataaaaggatgtcaaatttaaaatttaaaaaaaaaaagacattatgaggataatgtggaatgtagtttttatggttttagaaactgtgtttcttgtggaaaaaataaatgagcaggatgatatatatgagtgagatgctggatgctagatatgggtgaccactgtcttctttagacctcagggagctttcgtagtttagcagtgggggtgaatggttatttatcagctacaagatttcagattcttatctccttatgatttttaacactcctgagaacagagctatgagaatagaaactatcagttacgagttaaattctttatgttggatagatttggaaaaatttgcttgctcaaacattttagagtggtggtatgaatttaagggtagtatcttttttcccaacccgtgacctaattgaagtatcttttatcccaacccgtgacctaattgaagtcccatgtgagagcattttttgagagtcccaaatatctttatatatacaacaattgagactcacttggagatgattgttttcttgctttataaatttctttcctgtaacatcccagtgtaagacatttatacggtctttattcaatgtaaaattagcatcaatagatttgtcactctatgacactctatttgaattatgtttgcacatttgagttctactaccacttttggtccttgccaccagtggctatacagttacagcgtagcttttgcataatatattaatggattttcggcgaatttttatttactcagtaaattaatataagggtatttaggtaaattgacaaatgaagtaatggtgaaagtatcaaatctaggtctagttggtcatgtgactagcctctatgaaataccaagcataccctttctctcatccctctttgcactccatcccttcttccttgctttgcggctaggttttaattctctcttcgaaagtaagcgatctattcctcagctgtctctaaaggagcttcaatattcatcctttttcttcatacatctaaattggactgggttttgagatagggaattataactgattctagccttatatgggggtgtttgggtctacttttgtatagcacaaatagtgctagtcttggttttctgagtggacagctggtccactatctgtttttacatcttattcattaatacatttttgagtttcttataaaaaaaaatctattcctcagcttgacctgtcattttgcatctcgcactttgcttgtttgtttgattgactgtatttgctgatttgaaatcatatctgattaataacttctgatggtctgtatttcctttttaggcgtttagacgatctgatctgtttgtttccttagaaattcgattgattcatatgctatcatatatcgtatgtattctattgctgttttgattcacatatagttcgtgatgattcataagtttattgaatgtataatatgttctaaactccttcgatttgtatttattttagctacgctcagtctaatattataaatatgtagcaattttgttccttagatcaatgttgttgttttgtgtttattctagtgtagttcaaccaaaatttgtagtaagaagatgttgcgtagatcgatgtgaatacgttgttattgttcctttttttttttctttggttgaatcttatctgagttattagtttcattgattgagaatctgttactatggtcgctattttaaaattatgaatgtttttagcaaatgattttgtatatttctgtgttgaagtaatatttatttagaaaaaattgtaaagatttgccagtactttacaagttgttaagttgttattgttgatctgcatagtgtttctgattaattcatggactcattaaatcgcaaattaatctaaaacataccaatcaatttaataatcagataatctagtttaacctagatttttgttatttctacgtaaatagtattattatgacactacataaatatctattatgacattgaagactgcatgactgttggatctgaaatcagcgaaaggtattacttttcaataaaccgtacataaaagttttacattaggacagttttaggtggttgtggcttattataataatcagcttaaagccaactaagtattttttgcaaactgcattattgattgttctaaatcttaaaaagagtgtatgcattttgtaaattttttcaaggtttgaatacaatgctgcactccatcataactcttactcaaactcaaggtactgtaggacaaagtatattcactcgtccattcgagctgctcgagtagctagtaaataagtttttatttttcagaatttattatttttatttaccattttctttgggaaaaataatttagaatttttcttatttaaaaaagaaatcaaaacaaagcttcgaattgaaactcattccctacattatatattaacatgctgcactgagatagagacacagacacctaccgaacgataattgcaatatttggttgtattcagtgaattaaaagaaaaacaaaaagaaaagaaaa

SEQ ID NO: 9110 - DNA, 910 bp, Citrus sinensis
  Intron number 3 from transcript orange1.1g045286m (locus o range1.1g045286m.g) derived from phytozome v7.0 (chr-ID sc affold00002; pos 549856 to 550765 reverse strand)
aatttgttcaagaagtggctattctaaggtgaatagtttgaagtagttaaagttcatgctatcccttgaaatgaattattacttgtatttgatataataatgtcaccgttgatcctctacatagtcattctggtgcctctgggaggcacatctactagctactaatttataattgtttgttaatttgatcaattcatgtgttggtactacatactttaccatatgcctttgtttgatttgatgttacatgtttaattgattaatctagttaaacatatgaatcaacgacgacaagtgcacttcatccaataccattcagttatttgtaacttggtttatcattctgtgtaatcattattcatatttgatgttgtgtccctgtgttcatcatctggacttgagtaccatatgatgaccttacaaaattcatgatttctgcagtacgtacatcatataatacaattaaggtatgccaattttatatccagaaaatctacagcactttgtgaatgattaatccaatagaaatttatttacagacttcaatttattgagttattgggtattcttgccttttctttgaataaaagattagaagatctacttttgattattgcttgaaatcactatgttgttttctcatattcaacttggaaaataagcatctaaatgcttggaacttgcagaaactagaagaaatttatcgtgcattgggttattttcaaaatcttttatattaaaaaaaaaagaagaggggggggggggggggaggcaatttatcttttagtcttattatatctctagaacttttggttatgctagaatgatttttcagattgtttagatctcgcatcactttcatgttctacatgcagggaggttcaacatagaaacgttgttcgttttatag

SEQ ID NO: 9111 - DNA, 756 bp, Citrus sinensis
  Intron number 1 from transcript orange1.1g008051m (locus o range1.1g008051m.g) derived from phytozome v7.0 (chr-ID sc affold00010; pos 1571929 to 1572684 reverse strand)
gtcttgctgctattgctactaactgcaagtaggttcctctcgctcgtcccctcccttcgtttattttttttccaaaattctttgagattcttgcttagtagctttctttacttttcctaaaatgcataatttcggattctgattccaagtactgaataacataggattattattcacttatttggtaaaaaattaaaaattaaaaaataactgtaaaccatgcggtgttaattaaaaaataatactataacatcatatagttttaaagttagtatatctttattgttatctttattaggtcagaaatttcaattcaaatatcactactctatccaaaatcctccatcccaaaagtttatccacatctcatcttgttggatcaaaagacaccctgaagaattagtttactacttcacatctcatttggtatattattgtaattatttttttttaatttattcttgtgaagttcatgtacgccagtacaacacatcccaacattgcacggttgcacccacatggttatcttgatggttgaaactccgaacagttctcttttcaagaaattatcaaaatcactaaaattaacgtaaaacccaatacggacccaatagtgatccccgcaactgcaccgtagaaggactactgtttttggctttctcattatttctcatgcgggattttgctcatcgtgtactgtaaacttctgaactcaatttgtatacaggaatttgactgagcttgacattcaggaga

SEQ ID NO: 9112 - DNA, 4709 bp, Citrus sinensis
  Intron number 1 from transcript orange1.1g028213m (locus o range1.1g028213m.g) derived from phytozome v7.0 (chr-ID sc affold00175; pos 129711 to 134419)
aaaagccccagagaccaaaaaggtacttttggtcttgcacatggattgaaacgattacacatttagaattagaaattcatttgtaagcacttactctcttgacggtagttttgtgaaatgcagctcaaataggatgaaaatatctgtttttggtttagatatttttatgttactagtaaagtttattttttgcctattatttattcattatttgttcactttattatgccttcttgcccatgtttaatttttatttgtttaattgttgattgagatttgttattgcttttgttttagtgatagtaattagtaacaccagcttatcatttgtatattcttattgcctttatttagtttacgatgtctagttttccctcattggatcaagttatttaatatatcagacgcacacgcatacacacagaggctatacttgcatcatgttgatacaagtatagtttgtttcgaaggaaaattttgacacaaggcttttatacaagcctataattggggtatgaaaggactatcttttgtacgccaatatttttgtgtccttccttcacattcattgctgtaatttaagcacttaagtcgttgaaggatgaagatggaccgcaacattgggatcaaccagatgtcgtgggaagcctttgttggtgaatgttctatcggtagagtaatgcttcaggctgccggcaatgagatcctggatgggatgttaaggatgcattagctgtttgtaataaatgaatcgggaagcctattgataactcacgtaggctatgctatgcttagctattcaatgtatttgtgcttttactttgttatgtcagaatattccacaaaataaataagaatagaagcatatttatttatgcttatattccttcgaataattttttaattaactttttaattggaaaatgtatttcatttagcagttcgtagagatagcctaatgtactcctggaaatggtaatcatgataaggtttagaactatgtcttacagtaagttatttgtgaaataatgagaaagacgtaatatctttgacgatttacagcttaggtaatcctttgttaagtaaactgttgggagtgagagaaaatatccttttcaagcacggaagggagatgggatgtcttgcaactttgaactatcaatactcttgacttggatttttaggatattggttataagaagaaaagaagtgtaatgacgaggaagatagaattatgaacagaagaataggaaagccatttgtaggaaaaatgaaaaaggagaagcaaaagaattattacaagtaagacatgaggttcaatcacagttgtgtcttctctctattttggagtaagagacttgtatgctgaacttgctgagtaagtgcttttaattttcatttttgttcctagtgattttttcaagttcttcatggaagacctggcgaagtgcactaaatagggcagtcttttttccatcttaaatagctccaaaagttttcttatattcttttgattctcttcaaagatcaagatttgacaagaaacgaagtttgaaatataggtggcctatggtattctttaatatttcttaatctcttagacttggattcaaagcaaagaaaactcaagctttgatataaagggtaaggggtttgataaactagaaaaaggtagctggcgaaaactttcatgggatttttaagctatgcttcaaactttgcttgctagggtatgaaagtaaacacacataattgatggagttgtactgtatcttttaacccaccgcattttgcagaggaccttgttttgtcatctttaacaataaccatcatttcttcttaggataatgttagaaagtaatgaagagggtggttgaattataaataacttgcaaggtgtgagttttaaattctcttggtggtactaaccttataaagagtggaagatttaaattctcttgctagaatcttcagtttcaaatcctataaatgaggctagaggattcttgggtattagaagaggaagaaagtaaaagcgccatatggtggacaaagaagaagagctagcatggtgaaaattatgaactggggttcgatggataaaacagaaaaggttgctttggagtccttgccaaatctaagttgaaagttgatttcgtcaaaggatattacctatgattgaaaaaaaaaaaaattaactttagaaactttagaagaactgaatttacaagagcataatctacgtatgagagtgtccagtaaaagcaaaagtgttaaaggctagaagcatcattgaaatctcatttgagattattctttggcaggatcgacattaattcttaggatactaccccctcaacattataagccttgtgagctagctaaatcgctttaacccatgataaagagaagaaactaatgatgagggcaggccgaatgacaagttctttgttttcgaccgaaagatataagctttaaattctcttagggccacttatcttctaaagattgtaagttttggtggtaatcagtggtttcgaatcctatacacatgcaagtgaggcttgaggatcttttggtgttaaaaatggatgaactgcataattttaagttaagagtgtcataaaaaaattaaaacaaaattggagtccttccagatctaagctggaaggtgtataaagatgtttattttgtttaatttgaggaaaatattgaagtttattgacttcctgatgtaatataaatgctaaatgttttatttatctcccataaggtgtttgtgggctacacttggtgcttataagttgtacattgataaatttcagctgtaggcaagtgttcgaatataaataagatttttaaaaattttcatttaatcatgagtagaaacttatgtcttgtgagcacctactgatagcaaaagtgtaaaaggctaggagcattactgaactctccttcgagattcttctttggggggagaaacattaactcttgagacatccccaccgaggttgtgagccttgtgaactactaaattgctttatccaacaatgaacagtagactaatgaatgaacaacatttgaatgcaccactaatgaacgaacaacatttgaatacatccttcttccatatttgtacaaatagaatagctttatcacatgtaatggttaggatccccttatctgatcataaaccttagaaacaaatagaaataataggggttttatccctacctacttgatcttgtagcaatatggcatggaccgtttatagagatgtatccaaactcctcatggttaactctcagcctttcaatcaaaaaacgacgtcgttgaaaaattgaaattttccaagagtttccatttataactcaacaaaggatctgttccgtgttctagtcacttagattagtaacatagagtacttgtacagttctatgtagacaagaggcaaaaagaattcttgttttgggatccttaatatctcgcatttattagttatgagtttggcagtcaatggcatatgttccattttgcttgtctattttcaaattgatttttaaccagagattttttaataattggtatctgaacaggctcaaacaaagttaagcatgcaattctatgattgctagtttgaaaacattttccttgttgagataattggatatcaaaaaggaaaaagaaatcccaaataaatgtcccagctgagtaaagccactatttattgtttgctgcaagtatgataggtaggctagtcctaggtgtcccatatcagtcaagtatgggcttggtctaggatttataaactccttacacttttaacttgtatgccagggttcaaggacgagttccattcaacagatttttggatattaattaatgaaaatatttgaagttgacttatttattgcgtcttgcctctgttttgaccatttttgttatttgtgtgcggacatgaagctctttgataatatctttgaatgattataaaacctactaatatcttcattccgccatcaaattatgttagttgatgctcataccttgaattctcttaagaattctcccattccttatttaatttatttcaccatttgattcaatattggtttacgttatatatagtagatcatctatgattgtttttcaactaaatacgtcatcaaaggcaaaaaatggattcctaattgaatgtttccagcttttattatttctgatcaatcagaacctcgtgaagaaaaaattaattactacattatagcttttaatgtttccttttgattcccgatattgtgtttatgattatatattttcattaaatatctaatcctgtgtttttaatgcaaattttagcaccacaaagatgttttttatattattgaggaaaatacgagtgctcgtatggagaagtagtgcatctaggggtaattcatggtgaacttgggtcttggagcatgtaagaaccgctgtcaatattggattttatgagtattgtgttgtcagcatgtgttgcttaccgataggcagttgtcaataaggaggggcaacaaagcttatatcgaattctgattatttaaatagaaacaattttttaagggggaaaaaaaaagttttagtagtgaggaataaatgcagttgcacaggtgtttatgtggactgttctcattttttggatggtaatttgcaggtaagtaaatattgtgcaa

SEQ ID NO: 9113 - DNA, 2059 bp, Citrus sinensis
  Intron number 2 from transcript orange1.1g021962m (locus o range1.1g021962m.g) derived from phytozome v7.0 (chr-ID sc affold00040; pos 786334 to 788392)
ttgcggcagattgaggcaattgatactcacagcgggtatgcatgctgtccttttttctaaataaaaaaaaagaaagaaattatcactgtccttttctgctttagtttattttttactaaatgatgtcaactttagaatttctttcactccatttatcctttctggtggaattcattgtaaaagtaggggggttcaaagatcttttacagtggcttacctttcgtttgtagactttgtgccttttccttttcaacattactgtcatcttcttgttattctcttaattgtattttgctttggcagtaagttaccattaattagtatacaaaattgctccaatctatcatttctatatgaccaaatcctgaaatttttgggaatctggtaactattgcaattctgctctgtcttttctatccctaagtcagtttccaagttcttaaattagcgaaacagatgtatgtctttttcctttttttctttttgtttggctcgggcatgcataccatttagtatcttctatttatgaatgtactttctaagatttccttctcatatatatataactcatggcttttatgcatcatcgacagtggcggatttagaaaaataatttaccgggggctagattacatattagtaaaattttaaaactagaactttgaatgtataaaatacttgttaatacatttatgactgttgtcgacgtattttcaagaatagaaaaatgtttgcggtgatgacctgtcattatttttaattatagtgtgggcttttataattctaaatgttaaagtttaaattttgtgaatttataaatttatagagtcaattttaatagatttaatgggggctaattagaaatcttaaatattttttcttttattcttagaattttttgtttttagctagtgggggttgtactggtcacatggtgcatccgccgcttattcatcgatatatgaattgttgcataagaattattttcaagacactgtaagctattactgtagtatgttgcttgttggatgcttttttctgttgaagtgcgttaacattttgattcttgggtatcatgtttagtttgatgccctttaataatagtcctctactgcattgttttctgctccatggctaagttgttccaatcaccaatgaatgggcaatgaccctataaatatggcaaaactattggccagaatgacttaataaaggaagttatttttaatagataatcagaggttacttaatagaggctaatggtgcatagtgaaatcttcagtaattacgtggcctttggtcgagcatagaataaaactgaaatgtataaaggtatctgagagattctaaccacgaagattgcattgcatggatggtatcttattttaatctggaattggtacgggtgaaagcaattagcctgggtagatataattctttttgaggattttttgtttttcatttaagactactattaaaataatttctttaaactttgatggcattgcttttatatttttcacaatgaggacaaaactttgtagtatttatatatttgagtagatgagaagttgagattgcaactgttatggatggactctaagtttcaaccaccaaattttcaagttaaagaaatatagggaagagaatgacgaggaacaagattgctttaaattgtagttatgagcgtcatggagagggggaagttgagagttattattgatgataaactttcgaggatatggtaaaatgcctgaaggcacggtgttgcatgttcacagcaacattttctgcattcatattttttatatgaatgacctatttgtatttgataattgctctgagtcgttggattttattagtttgactgtatggttgagagtggaatcgcaatgagaaattatgtatttttttggaaattttctctgatttctgtttttatctttgatggcttctcacagctggcagttttagtattaaagagccatatttttttgtctttacgtgctgatttttgtagatgtaaagcatgtgctagttagtttctccttttgcaggt

SEQ ID NO: 9114 - DNA, 685 bp, Citrus sinensis
  Intron number 1 from transcript orange1.1g016264m (locus o range1.1g016060m.g) derived from phytozome v7.0 (chr-ID sc affold00044; pos 96435 to 97119)
aagtatttgccgcaaggggaaaggaccagagtatgtcaatttgaaaattttctttttccttctttcggttatgggaatcaaaacgaggatataattagaagaatattcgaaattctgattggggttttgcattgcttctccttcttgaatttctaacgtaacggacatgtgtgattggatggaaatgaccaaaatgcccttgagttctgtttggtatgataaatgatgaattgtggatggaatttggtgggaaatttttgtaattgtacttaattggatgataaacatatctaatgataaagctactctttttaccgtctcagaattgtgcattttacaaaattctattaagctgttatgaacatatcatgacttcaacaaccattttagctgagtttctaagggtattttcaggactaacatgctgaagcctcactttgaaagcacgacaacttagagtttgctaagtgcccctcttttcttggtagctgatatttactgccctcgtggacacttgacagctagtgatttcagccattctttttggaaatattcatgcccattttaatttaactgtcatctgtatttaaatgatttcactgaagaagacactttataatttgatttgaaatttcctgtgttaggttcagagacatagggattaccggcagaagataataactaa

SEQ ID NO: 9115 - DNA, 1366 bp, Citrus sinensis
  Intron number 14 from transcript orange1.1g002590m (locus orange1.1g002590m.g) derived from phytozome v7.0 (chr-ID s caffold00018; pos 373980 to 375345)
gggaggtatatctcatacttctgacaacaatttctaccttccatagttctggttttatattattggatatttcaatgcggatgataccatatatgtatgagagcctgacaatagacctttccttttcaaagatccaatgttctgtaatatttttgtgtgcatttcctataacattccttgtgtgtatcctaggagaattttgtctaaaggatttttttcttttttttcccttcatttgtatttggtctgaatattcttatttgccaagtattgtaggttttgattttctactttgcatctgacaaattgtctgttgttgccagatagtagtaacaacaaaaaataccacataataacagttaggacgctctgccaaattttatttggcatcatatcgttcattcttcaaaggatttgtgattattgtggtagattcatcattcatgatgtctctctcgctcccttctctcttaataacttttctgatggtgtgtaagagcctagggtttggttttgcggcattttaacttatgatcatgatttgttagcagcaggattataataacacatgttttatttttcaatgagacttcgagggacaagattatcagttctgacctttttttcaatataatagcacatgttctatttttcattgagactgcaggggcaaaatactatcatgttgaaatcatggtttgaattatttggcacaaaagaaattgcattcaagttgaagcgtgtggtgtgctgtccctaaatttatgcagaatgaaatgtctgaaggaaaataagcatagattgctaggatgtaacactagataagaatggataaatgggttctctctttgctgtatgttccaaaaagtctgtctggttgaaagtgttttcctctcgccttttgaaatttaatattcttagaattttaatggctccatgttttgtagattttagttttggttctataaatttccttcacaatctacaacacaatcatttaagtttgtgaagactcagcaaactcttattgaagcttttctttcctatagaaatttgtctatctagcatgttggcattgcaatttgtacgtatgtgagctatcagtaccaagattttgacggtttgtagtagatttgtagttgctgatatgcatggatattgtctgctgattttgtccaagtgatttagcagatgctggaactatgtatcattcatgtataaactgtgttgctttattggtggaatctctctgctatgtagagggaaagaggatgcttgtgaaattttttggcttgttattttccataagtttggctgctttttgaaactagctatttggaatttccttgtacaggatatcaaggtt

SEQ ID NO: 9116 - DNA, 1457 bp, Citrus sinensis
  Intron number 7 from transcript orange1.1g004081m (locus o range1.1g002424m.g) derived from phytozome v7.0 (chr-ID sc affold00173; pos 146534 to 147990)
gccaaatttgatttaacagtaatgttgcaactcactatatacattgtcatttctgtttgtaaacttagtttatttcctttcaatgaacatatcattggcagttttctgagtagtcattctgcattaattggaaatagatatttttcactacagttgagtgtcgacagtggctttcttgttttagtagttttagctacttaattctctagcatctcttttggaatatggtattttgctaatttaatgactcagttctaagatgccatgagggggcaccatcaaatcaaattacctttgagttttcgaattatagcaaatattgcgtattggatatactttaactactcaatctataggaacattttcttgcattataaaactctagttttggctccattttggataatataattcctgtatcatcaagttaacatttatagtagaatatttgggatttttgccatctttaacagcagtaggaatactgactttggagagggaacttaatttggtgtaggtatgtttataatttagtatggactgaatatagaagttaactgaccatgatagagctattttatttttttgtagcattttagcctttttaccaatctttattactcatacaatagaagcttaaaaaaatgaaggaaaagtaaaaatcccattaaggacagaaccacaagagcatggtggctaataggtgagcgaaaacaagcagaatgttggctaaattatttgatcaaattagtatgggtgcttaaatggaaattatacaaaatataaacagatttttggtgaccatccttcaagtttaattaattggaaatctattatctctttgatacatgttgaacttattgttttggtggtcagtacacaagtcttaatttattagaaaccatatgtatgtataacttctctctgtcgcatacacatgcaggcttgcgtctcataatgatggcctgcttaatcagttacgcaaacatctttgaagttttcacgccttttttttttttaatcatctttgtgcatgtatgcttgccatcactttggtcatataaagaattgtatgtttcattttttttttaattgaaaaagtaatatgaattgtaggtcatccaatttgatcttgtactctttgtaacttataatgttaggatgcatattctgtagtactctatatgttcgtttccgctgttccccagggggagttttcatgtgaaatgctattctaacaatggaaccaatctgtatttttgcatgataacatcgttttaagaacttttgtggaagtcaccttttctcttaagatatggttgaaacaaatctgatttttatttttacattttttgtggattttacttgcatctttgataaagtgactacagggaaaagttttctatgtctttaacactttcatatgtggattgtgattgtcacattatctgtgcagc

SEQ ID NO: 9117 - DNA, 1421 bp, Citrus sinensis
  Intron number 6 from transcript orange1.1g009783m (locus o range1.1g009783m.g) derived from phytozome v7.0 (chr-ID sc affold00066; pos 300867 to 302287)
tgaagagccttctgaaaaaccagcaactacttgaggtatgagtgcaattatattcaaatgtgaaaagatatccattgtttgccggtttctgcttttactggtgaattaatagctatttaacaattcttactaagctaaatgtcataccaccttatcaagttaatcattgtatctagctgtcaaaattttggctgtggttttgacaatagtgtggttatactgctttgaatcttgttcaactgccaatccaatttttctcaaagcatcaacttttgaatgctttctaatggggctcgaatccaaagatggacttcgactcagctgagaaatcgttgaagattgccttgctacaattccaaccatctgaaatcccaataagtttgtcacgtatttgatgatcaaatctttggagatgtatctagaaaatgaaaaatcaaacatcatttcatgtagttatcattacaattatattttattcggtcataataatagttttgagcattttaaagatggtgtcattgtgatgctttagctttggttttacttagtttctagaacataagcagttttcttctgccactcatatttcatgcgattaaaaattaaaacaatgaactctaaccagcatgcctgaacaagtggaagtgcattagacaaaaactttagtgctctcaaaaaacctatataaagactgtcgaattcaagcaagaagttgaattaaggtggtcaggttgagtgagaaagactgttggattaaaccaagaggtcaggaattcaaaactccttagagggtataatattccatgagttctctgacttctaaggtcgtcaaatctgatagtatggttacaccctctcttccctccattccccaaccccaacccaccttctcctcctcctcttttttctcatttaggttatcaaagatattgtttcagttgataaacaccacgaccccccactttagggtctctgagatattgattcagttgataacaggttcaggcagtttataacaggtgctgggagctttctttttgtagttttcattttttttggggaaaaaaatgctattgtaaaagataactacgttatctgatttatctaatgtactttctttacttaagaagattattactattatttatttatagtaattgttattaattgtgatcaggtacaatggggcaagggatgcacttaataatagatctagatgcaatacgtcattgactgaactctttccattctttgtacatgattctataaaattgtaatgattggaaagtcattgttttactgtttttccggataaatttgtcctccagattcgaggacaacatggatctatatgctaaaagtttttttttttttggggggggccaggtaatagaagctttccaattgaaaattagtgaaga

SEQ ID NO: 9118 - DNA, 1293 bp, Citrus sinensis
  Intron number 6 from transcript orange1.1g040660m (locus o range1.1g040660m.g) derived from phytozome v7.0 (chr-ID sc affold00088; pos 199753 to 201045 reverse strand)
tcaagttggagcttgcaatatatcctagtttgctggtattacaatttaagttctctttcactggttgagaattgaattctgattaactattctaatatttgatatctatattgttcactgcgttagaaggctatggacggagtcatagggatgcttgacaatgttaatgcaaaatcatcactaccgagatttgtatttatcattaaaattcttttacatttcatcaccgcctgcaacgccaccctttccccaactgttttgattctgtcagtatcaactcttctacttgggtttttaccagattacaactgttggtttggttaatgtgacaatatgtgtgaaaaaagcttggtctatgtgtaattatcgcatttgttgaaacatattttgaatctttttctatcctaagtcaaaagttttaaatgaatttttctcgtcagttgtctgtgttaatgattcgttgttttagtttactgataggatttgactagggcttctttaaaatattgtattttttgctacggaatttcttgagataaatttagatgcatttcttaggatccttcttggtatgccttaatattttccaaggcaatcagtttctctaaaatgcaattcctttctttctttctttctttttttcttttctttgggtgcatttttagctacttttactagtttgagtggggtgtcattggtcctctgttatacttcattttccttaggaaattctcagagttactaggagaggaataacctcatctgtcatgacattttagctgtctgtggttgtttatctacactgaccaaaaccttcttacagaccgttggttcagaatgacatgtattaaaagactggcggtggaaatgattcagccaccatgtgatgcctgattatgtgtttgtagtcagagtttgcacctactgtcacttgggtctttgtggttttggtagtttatgacttttggtgtccctatttgatcctccttactggttgcgtcttggactttgtgctctgtattgaatgaagtgttcattttatatgaaattatgccaaattgagattcttgttgtatcacaatgtatagagtgttctctttttgaatatctactgctgtttatagtatccctgaaaatccaccgttcttgttgtgaatgctggacaaattttacatttggtattctgagttattatatctttcttctcctaaactattggatgacagtgaccaaaaagagaaaaagattatgtgcttttgtttacttatatgctactataaatgaatgtgcagg

SEQ ID NO: 9119 - DNA, 2040 bp, Citrus sinensis
  Intron number 3 from transcript orange1.1g016349m (locus o range1.1g016349m.g) derived from phytozome v7.0 (chr-ID sc affold00041; pos 14826 to 16865)
tggctgcacggttggcagtgatccctttagtccaggtaattgatttgcactttggcatatgctattgattgctaatgtgtatcacctgataaaataagatagttatcttgttaagattaggccctttgcctttctcactttatgttgcctctaacgattggccatccaaaaatgagaactcaagcgtataattgtttatgcgtattgaataaaataaaccattttacgtgtgggagcatctggtatatctgctgttgaacttccaaatgtttttgtattggagaagttttcagaaggtttatctgtagttagcaaagtcattagtttctctacacgtgctgtatacccgtatttatactttgtctctccaactagcttcatttagcttaatccagaattctcttgcatttcagtaattgattgcaatagtctctctcttaaccagtatttatttaccaaggtgactctctttcaaacgtaaattaaatgcataaaattagagtattttatgctattttttctagcgggtagagcatcttatgtatgttatgaattatacatttgtatttttatttatttggttcatggaaggcctctcaggtgataacaaatgaatatgaattcattttacaaaagaatctcttctcttgtggctttgcttcagcttggatcaatacagccaatagtctttaatatgagttgcagcttttctgaatactgagaatagtagggactttgtaagtggtctccactccataacaacagtagtgcacttggaaatttggattctgttaaatttcttgtgaacactgaaaagtggatacaccttctttctttccctaaaacagttgggtcatgctataagcagtatttggaggttacttgactgttttggcagaagccagaagggcttctcaggcatcgaaaatggatagttattcattctacaaaaaaatctcttctccttgtagccttgctttagcttggattacattcgaaataaactttaagacattcggatgaattgcagctcttgcaaacactaagcaaattaaagtctggttgcaaatggtttatagagctctgagaaatttgcgttctgttaaacttttagtaggcaatgaaaatagatctatcttccttctttacctaaaatagttgggtcatgcgataagcagcatttggaggtttcttgactggtttagtggaagccagaaaatgtagatatcaatagctttctcggcaagctataaatcctctcaagcggctaaaaagattaaagataagaaagaggctgtaagccattcctttgatattctttatcatcagaaagaagacgccggcttatgttggttcagctgattgtttgtttactcgcaggcaaagagaggagcgcaaacattggtagaactctttgcaatttctttgtatctataggcatcaaaattaattttttctcattgatggaagagaggtttgtttaggcccttggtttgtctggaaatgatgattcatccttcctggtattagatggtgtaaagatttttgtacaagtatagtgttatgcaaccatatttggtttaatctgttgctagattcaaaagaatgcaaccatgcgataagcttgctcatcgaacttaaaccaaaagctctatgttagtgtaattgatgccagattcttcatcggggtttttcgtcactgaagttacctatgtactacacataagtgatgaggtcagaaagagggaagtagggcttctaatgaaagtttttatcttctccagtggaaatcatgtttttcagaaaatggaaaataggactgtatattttgttgtctggggaattagctcaagaaattatcaaacaattcttcttcaatcctaaaatatatatttcagctgcccttggtattattaatgccaccaaagcttgagatactagttggggatttttaagcattcattctttttatagtttaaaccttgtgcagtgatacttattgtttactattattctgtgtgaaggaggctagaggacttg

SEQ ID NO: 9120 - DNA, 1131 bp, Citrus sinensis
  Intron number 16 from transcript orange1.1g000957m (locus orange1.1g000957m.g) derived from phytozome v7.0 (chr-ID s caffold00651; pos 13002 to 14132 reverse strand)
atccagctggagctgagtggctctctgagcacaaagtatgttactcaaactatacaccaattgtttgtttgaatttgtcagggctgtaggaatttgaagtttggtatgcagttaacttagttggttcatggtatgtgcttaacttgattgatttatgatcttggttattagtttctttaatgtatatccctttctagcttttagctttaaaaagttttgatataggctttgtttaaatagagtacattcgtttactgcccacccagaaaagctaatctcttggacgtgtccagtgttccacaagataactatagatagaaagagggaaagttgtggtggggggtgtggttgtgtgtggaagggaatgtagaggaaaggggggagataactgaagaaaccagaagcacggggagagaagtcaaacagaaaaggggagaaacaacagaagaaattaaggagagaacaatcttattccattcaaataaacattcaagtctgcatgaatataaaaaactagaatagttgccaaaccctaggcaaaacgggaactcaaaatcctagaaaaacaacttcctcatatgaaagataaaacctaaatacgaaaactactaaggaaagtgaaatttttttaacaattgcaaaaccctaaaggattctgaatcgttaaccctagcttagaaaaacacgactcttggtgagttggattgataaaacttctccattggcttctcaaaaagtaccaaagtttgtcgtgtatggagtagagagtaaaaggaagagaaatggaagatctagtgttttacattctcaagtcagatcaaatgtcagcttaaaggaaattcatggaggcctactttgtggatccaaacaaaaccaaaaggaaactaaattaaggcattttttttttaatcaaataaggtatgttcctgaaatcgacattatataatcacataagctctaaattcttgctacttctccatacattactacatcggtggtcctgcatatccatcatcttgaaggctaattaccctgcaggttatcattgaattcttagatcttatctagctgaagctttttctttttttcgatctatttttctttccactggctgcagggataatctccaga

SEQ ID NO: 9121 - DNA, 801 bp, Citrus sinensis
  Intron number 5 from transcript orange1.1g011540m (locus o range1.1g009444m.g) derived from phytozome v7.0 (chr-ID sc affold01297; pos 17521 to 18321)
aaatacttggaattgaggtgagatcaatcgatgtttaacttccttcactcaagatctcttagttgttcttggtcagtttatcttcaatatatttttttaatactgaatttttgtctaaaccttctatccagtaccatggtaacttttacgttacttttttcattttgggtgaatgaatcaccataaagttgttgctttgtggttgttccttggagaatagttatgtttgatagaaaacagagataatattttcattctatttggtagttacttcttgactgtgtggcaaagaatttaaattcacagtaattggtgctattggtgttataatttcagtttctgtcctcagcactgtggcatgaaactcccgatgctatccatggcagtatattgtcttcatagtttggtaatgctttgatactgtaacaggtttattttactttggaaaaaatttgaaaagttaattgaggaaaaaatatatattctttgcaatttttcctgacattcaaaatgtagtctttgtgatgacctttcttatgtaaatccaatggttaatggaactatggctatttaaaaaaaaaaaatgtgctgtttggttttcgtataggaggagagctaggaaaaatagagaagagtatgaaacaagcttctgttttttttttttccagatttgtgcatgtacataatttcttctgtgatttgcttttgttattctctccctctctttgttaaacacttgcatcataatagcctaattgaattccagggaggataccgaggtttttactctaaaaacacctt

SEQ ID NO: 9122 - DNA, 1420 bp, Citrus sinensis
  Intron number 2 from transcript orange1.1g015863m (locus o range1.1g015863m.g) derived from phytozome v7.0 (chr-ID sc affold00010; pos 2000406 to 2001825)
gcgccggtaagcttattgctgtatgattcttttttattttgatcagatctgtttatgttggctaagctgtgatttagttgcattttaactctgttaaactgcttatgagctcaactaatgaagttttcttagcttttgtgtaattttctcagatctgttttttctactacgtttgtgcttagatctgaccctgcatttatttattggtgattcttatccttaattatgatggttaggttgattctgctttctaatattcaggaattgagttgattgatgtagattatagaattggagtcagcttatttaagcaattgaattggttattgtttttgtccatttcttgtcgggcttagtttagttttatgtttgatcagatctaccattctgatttagatctttgccttgtttctagtttcatactgtcctaaatatgtttgctaagatgtaatttaaagaatttaatcaaaatttgatttatgtactttatggaagtagtttaattttgttttgtttgatctctctagggttttgtgggtgactatagttagatgtattagacttctgttgaataattcaaataggagtatgtattaactttttcattgcagttgctctgaagtatttatttcgcaatttgtaagttttggatttaatcaattgcttctatttatagaaatacataaatgggcttcattgactcatacagcttgttggttgttttattagaacatagatgactttcacctcttggtagattttaatgtttatttaatagggatcgacttattttactaggtttaatatagctgcagccactaatcaatcgtcatagttatgcttgctggggttatgatagtggaagggttgaacaaggagccctgtaaagctggtgttccaatctgataatggtcattatttcactcaattagaatggtcctcgatatttatctttcaaggatgtcttgaattaaatgtatgcagcatgcaagggtaaaatcacactggcaagaaaccaaatagtaaatatgaatagttttctcctctggagcttaattcattttcaaaagatgatggaaggcttcctccgcacggatttgttgtgctgcctgtagggttttaaaggaaagtttggtttgaaattttttattggagaccccaattttaatgaggactccaataaagacaattattctgtggaattgagagcccaaattctttatacctgtgcagtacataatggtttgtttagcatgaaatctctctttgttgtcctaatttgtctcgacgtggagattttttgttccttttggatttctttatacaaactgaaaactattgtttcttctagagagatattgagatttatctgctcatgatatttattttgttttactgtggcttactttgtgtagtcaaa

SEQ ID NO: 9123 - DNA, 1760 bp, Citrus sinensis
  Intron number 1 from transcript orange1.1g023450m (locus o range1.1g023450m.g) derived from phytozome v7.0 (chr-ID sc affold00011; pos 470193 to 471952)
gtagcgaaaacggggagtttagaggaggtatggggaataacaggctggtgcttgtacagtaaattatgatatttttatttatattttatatttatgttatgttactacttgtggaacattagtttgcaagtttagtttctgcttcaatgaatcaaggaatgttgcgtttgttgttgcattatggtggcaatggaaccgtagatggttcttgattttagctcttgccattattgtgaagaacctttttgctcttttttcctcagtcattgccgtttaattgtaaatacgaggtggttttgttgtgctatgggtgttttggagaataaagtccatcctattttcctctcatttggttgtttgtgtgaaaagaaaggtattcaaatctagttatgaatatcgtgtctaaagttgcattgggtgcataatttgaattttttttttaacttagtataatgtctcaatagagtagagattttcgtatctttgtctgctgaattatgagaagtgtgtcactcgatctttgttttttgttctttccttcgtttttctttcaccagtaattgattagagccttatatttttatatgatttgtgtagcattgacatagtctagagattcataggatataacatgtctttgtttctttatttgacctcgcgagaagattcaatcaagaaaatgtggattgtggtgaagtgaaggctttatttcactttttcattcgcagaattgctcctcttttacctaacggttaaggatatatcctccttgtccgcttgtgtatttgagtaaagccatgaaatcttggacctaaaaagtgtttaatacgcaatttgcttttggtgctcaagaaatgtcttgctttgccaattagtatatagaatgttatctttgaagtgtttttgtccgatttctttcttttcattagttttcaatctcttctttaccttttggagttagcatttccttatcaccttcttctttgtgttcctgatttacctaatgatccttgccacttggatgtctttttccttgttactttttgcctggaacaataaaatgtagtcattcaaaatacacttgtctttatgaaaatttgtcattggaattttttttatttgtttctagaagattttgttaacagatgtctatgactctgtggacaccttttagttttataccaaatatattcctgttaactttcttctggatctaatctcaattttcttgtggtgctgaatggccgtttaaattgtactttctggtttagcacttttatggattacttacacccaggaataatctacttacatttcctttaaagtattttgagtaacttgctttttgtattgcattcttcagctctgctttacacctgtttgagccttccattacactggtcaaatcaatggaatgagtattggttgggcaattaggtgcttgcttgatgctgcaaatttagatgccggcattcatgcttacaatctctcaattcaattcaggattcaagcatgatgcaagtgagatcgcattctcactataatatttgattatatcattttttgatcctgaattcccaataatatagaattgaatctacgttgtttcccctgcacaattcaaccaggaccaaacacctcctattgtttgtaatctaattcattactttagtcagtctttggaatctttacttagcacagatgcagccttcatattttgttgacggctcatttgggcaactgaaggtggacaagaattt

SEQ ID NO: 9124 - DNA, 1054 bp, Citrus sinensis
  Intron number 1 from transcript orange1.1g011224m (locus o range1.1g008467m.g) derived from phytozome v7.0 (chr-ID sc affold00006; pos 1169769 to 1170822 reverse strand)
gaattacctagtcttccgctacttgcaggaatcaggtaatatctattctgaaaatttattgcaagttatgattttgattttttttttttaagcaagacggattttctttatctagggtttgtattatacatctaagactacaacttaatttggctgttttagatggtttctcttattcaattactgttgaattaggttagggttggattgggagaaaaaggtataatcttggagctgatttttgtattttggactgttatggaataacgtgcacgagtgtttagatccattcatgattttttttaagggtcattaatatgttgccgtgataatttttcattttcgtttgtttgtttcaggcaatgttcccctagggtttgctattacgggatgcatttagttgcttgattgtggggttgtatttgttgttgattggtttaagctgaagttttcgttagcagcagatatggcgtgaccatcaattcctttgttttttgctgtgtaaatatgtgcgtgacggtgaatctcgcttagtatgaagtgaagattagtcactgaatttcattagagtagtgaggccagcttggctttcgtatttattatgcaaactttagcttatattttacaatggtaaaaactttagcttatatttcagcctgttcattggtttcagatggccaatatatagagaagattaacaaattattgtatcgtctactgtttgcaaattttagagagaagcctgaattgctagttcaattaacagtgaagatgtaaattactctgcgcttgcatgatgataatgtgatgtgcactgaagtaatatacttaattgctaaaaatatagtcttgactaatttccatgattcaataatgatcaattactaatgtttaaatgcaaagtggatttatatgattcaataatgattagttgttagtagagctgtaaaattatggcttctccatgattttagaaaattatatttaagtattttctcacttgtagcaaatctcactcctgcagggttactacactcggcttttgttttaggat

SEQ ID NO: 9125 - DNA, 832 bp, Citrus sinensis
  Intron number 2 from transcript orange1.1g044901m (locus o range1.1g044901m.g) derived from phytozome v7.0 (chr-ID sc affold00255; pos 207830 to 208661 reverse strand)
gatcactggtctcgtttgcatcactcctgcggcaggtcagttgacttaattacccttgtaacttatacgaattcctttttctttcataatatgattggttcaattaatttcccaattaatatttccatagatttcataattcacaccggtaaggacttgtcgttcatttaatctatggtgaacttccataatttataaaattacgactaaaagtatatgtaaagtcacacatcttaatatgagtggcggatcgaagttaggattcctaacttaaaaacttccatctgttacggtttttattttatacttagacaatttttcaaaaaattttacatcttggcccactttatatataatttttgctcttcaatttgtaggttttttttttcattttggcccctcaatgaaacaaaatcctgttcattctacccctgttcttgtgctcttgaaatagaattcttagaatactagttaggatgtgtagcattatactaacgattagttatatgctcgcagaatctatatatctcccatgcttaatttaaaggatgagaatcctctcattatatgagctcttttaggttgttaagaatcatatactatgcatgtatattttaattatggcgtatatgtaagatttaatttttttaattttttaattttttaatcactaatcaccgctaaagttttgctcaatataagattaggatgatcctaacttaaaaaagtagatgttgatatttctttagaaagcacttcgcatgaaaatgcttaattgccaattttatgaccctgacacacaggagtagtgcaaggctgggcagccctgttt

SEQ ID NO: 9126 - DNA, 2740 bp, Citrus sinensis
  Intron number 7 from transcript orange1.1g008911m (locus o range1.1g008111m.g) derived from phytozome v7.0 (chr-ID sc affold00120; pos 76761 to 79500 reverse strand)
aaaggaaaacgtaagcatcaattttcctcattctgaattaatgtagatctacctgaattatctttctttttctattcaaggttatgattgtatcccctaactaatactcctatccatcaaatgtgaatatcagttaacattttcctctgcattcctgtggatatgctagcacatagtttactttgcttgtcgaatcatgtattccaatgtgatattctctatctcagaatcaaataagaaaattgcaatcatctgaaattgtgccctttaacctttgagttatggtaaaatgccaataaacctcctttactttgttttctatgaaacccaaatgataagacatgtttgtttatcatcaagaaacatgattctctgccacaaaaaattcttgtttgaaaaatttgtcatctatggatcattcaattttgtgtagctgctaataatgaatgatgtccatatacttcatgttatgaaaagcaccagcttctctctagactaatggatcttaaattctaggttcgttagattcatagttgcctttcttatccatagctattagcttgctaggacactgaaatgatgcatgccccaagttgatgcatctttacctagaatgctaaccacaatttgcctgggaagacaagtgacttcagagttttggaattttagagatttgagaagattaaaatttcatttgatagtagaaagtgaaaaaaaaaaaaatgttgactgaggatcaagaagaagaaagatatgatgcaaatcaagaagaccaaccatacaaatcaataaaactctttgtaataaaatgtcaaatgcttttaatatcaactctccataatccataagcctagatttttgtacaatcactaccatgtccaaaagcataagatctaggaatcttgtctggaaatgcttttgctaaatcagctaaagacaatatttaaaatctgttacgtcctcatagccccaaataacccagtggactcaataaggccattccaccaaagcagcagattgtcaaataccccaactaataaatgctataataaaggaccactgagtaaactatctacttaggatatttattccttctctaaaagcatgctttctctatggtttgccataggtccacatcgtggtctccaaagaggatatttcttcgctaagcaagtgatatgtcagtactaatagtttggaatttcttttctattcatattacaattttattttcattttttaactgaaatattgtgcattcacagttcttcgttcgcttcttgttcttctttttcttatttctaagtggctttgtgggggtttaaaaaaaaagaagaaaagaaaagaaaaaaagaacaagagggggaagccatcatagcatcctaacccaaaagtttgtgtagtccattgtagttgttagtagtttccaatatttgatggctctgtatgtatatatttgtttccttacctttcatagacttcataggcttaacattttaataggtggcaaacattatgaagggctttgtgggcgtaataagtttatctcagttatgactggcaagctccattcatcaaaatctggaggtttgaaagttttctctgcttaccttgaatctgatggatgttatacagctgctatcccatgatttttatcttttatttttattcattcttctttctgtagtggatgagtaatcttcccaccgttttttaaaacaattgaaaaatgtgaaaagatgaacagaaaacatacaattcattcagggatccttaaatgatggaggaagataaaaacattgaatcaacgatttaaacttaagctattaaccttgggtgtgacacaacaataatctagcaaaaccaaaaaacagatgggaaacttgcaaatagctaacctaatctgtttcatgatctctttaaacatttaagttacaaatatcaagactaagctgagaaaattttggtttgaaaactgtttactagcaaatggctcctatgattttactgatgctaacatggtttctagttctgatttgatgttctattacagctagttattaagatatttgcttcaagtaacagataaaaagatagaaaaagaaatctactgcaattcatttacttatctgttcaatgtattgtttaattaaaatgccttagggattttaattcatgtgtccagtggatcatccttaatttttttgttgagcttaaaaatcggtaatagtttgaccttaaaaaaatatatttttcctatttaatttgttaagaaacaaaattgtatagttcacgtaaaaagttcaacttgacgtagatccaaggtcagtgagaagttggttgcgttactgttattcgcatcttatagttgaagcgttatttacaaaatcatgcagaaaggctccttttgcagaatgtaggttcatgaatgcaattaaatttctgcacaactctagactaggatctattgagattaggtgcagccatgcaggaagcccttgatacctacccttagagtaatatttattttattgcttaagtatatatggtttttcctcagtgtaaatcttgaaatactttgtttttagtgtttagtttgaatgtctcatctggaactatgctgtctcttatgaatgcttaacaaaattttgcctttataatgcaatacctttgtagatggttgtacttatgtattgtatcatctgatggatgtgctcttactttcaggctctaacaaaaa

SEQ ID NO: 9127 - DNA, 1344 bp, Citrus sinensis
  Intron number 2 from transcript orange1.1g008532m (locus o range1.1g008532m.g) derived from phytozome v7.0 (chr-ID sc affold00406; pos 69665 to 71008 reverse strand)
cttcttgcagtttctttgtggatctttgggttagtactatttcttacatagcaatgaagattttttttcacataactgacatttgtaatctcgattatgttatatataactgattgaaatgtgcaaacaggtaaaaatgaaggttagaacttttcgcgctatttgttatgcttctgatagacattaacattttagctgctttctttaagattaacctatgtgatgcttgtgtgaactatcaattatgtggatgttgttttcgatatatcattaaatcgcatcagtatgtactacaaaaaaccatttcatgcagatagtacaataaggtatatttgtttacatacacaattttttgtcttttcagttgcaacaagttatatttgcacacatctctactgaatatacttctgttgacaaatactgatgatgtatgcttgatggattaatgtatagataaatgtaggtcatttgaagtggtgcttttttcataactgcgttttttgctcaaatgcattacaatctgaggaagttatagacttctagactagccaggatttaagcaatggtagaaaactctagagtagagaaatgtttcagtaattatagtaaaaagcttataaatttcctgtccttccaatcaaactggtttggaagtcgagcaaaacagagacgtagggcaagtagtcaatcactaaggttatttttgtattttcatctgaaaatcaggcataatttcaactttttctattgcatcagatttgtataatttttgtgttctccaattatattgggtacagttctctccctagaaaaaccgccttggtatgcctctgcttacttgtaagatgtaacagtcattccagccctctattctgtgtattcattgtctaacttgttggaatagtttgttctgtttatgctttaaagtttaaatcactggtactaagaaacagaagcagaaagatggtagcttctataatacttcataagcagagcaaattcattattgtttctgtttacatcacatcaaattttaacttgtgaaactccttctcctacaatttgatgtctatgttagttgttcactctattagtttctctcattgttttttcttgggttttagcattataaaagctcagtcttacagatgtatttggtaattttctgaggtgcaaccatcattcaaataagttgtcaccctctcaggattcaattctgttataaataccttttagtttcttcggagcatgtcatgatgtctttgatatgtaaagaaaccagattaattttttctttcggaatgcattaattgaatggaggtatgacttcttctgtatgcagag

SEQ ID NO: 9128 - DNA, 1925 bp, Citrus sinensis
  Intron number 1 from transcript orange1.1g014196m (locus o range1.1g014196m.g) derived from phytozome v7.0 (chr-ID sc affold00007; pos 612826 to 614750 reverse strand)
gaacatacacgtaagttcttaatccatatgctgctaatattagtttattaatctgtgaattttttattatacaataagatttggattcatggcatctataatctgagtttatttaattaacataaatttgtatttataaaatgcatggtgattaatttaatttcaattaattttattaaggaggatagatacatgcattttgatttttgaagggatgggactccacttgtgaattatgagcataggccatatagtgggcatgactggtacaagacaactcttagatattattttgttttttatttagcaattggtgttctacttaacaaaactaaaatttcgctttttccaaggggctgctagaatttggactttcgctaagtttctactgtgtttgaaaataatggagttccgttttgtacttttctaggtcatatacactataaaggacctataaaaataaatcaaaattcattatctcggaaatttgttaggttagttaacaataataataataataataatacctgtaaaaattaatcaaaattcattaactttgatgtacagacaacttaattggttgaatacaattatatatattatcattctcttatgtgggctctctcattattttttttatgtgaacatactattaagccatattatttaatagagtcggtgtccaatgaattataaagtcatatgccttaatagcatatctgcatgaaaaaaaaaaaaataaggacactctatataggaaattttctaatccaaacttataacgtatgacgaattgacaataatatgaacatacttttataattttattaaacaatattgtaaaactatgtttacactattgtcaattcgtctcaaattttaagaaagtcaaaaaatttttatcagatcactacttgtatgtaataatttttcaagtaagaatattttactatattaaaattaggaaaaattaaaaaaaaattataataaaatatattttatcatgtagtatattattattttttttaatttataacttatcaatgactttaatttagtagttgatatgatagaaaaaatttctatacataatatatcaagaaatttgtagtggggaccgtggagcttgccctttaggccaccagcaatatttgacttttttaggcaaataacttatgtaataatatgcagaatttaacttgttgaatttaacgtatattaaggacattgagtaccgcaagtaccaatgtttttttgcaatatgcaaaagtaccaaattttttgctttcttcactaatatatcttcaataatagttaaggaataaccaaacattccaaaccaaaagtctacaaaaccctttacaaatgaaagatccagtgtcaaggcaaaggctttcctaaacaaattattaagcaaaaatgtgcatgaatcagttggccgcatggtgtgctgactgtccactaagcaccaattgccgcaacaagagtcggcagacaattatatttgccaactttggctgttgatattttgtctctaataagaaaataattacagcccgacaaaaatatttagtgcagttgcatgatgagattcctcatgatcttcatttacacaataaacaaataatttgccgaccttcacctttcaaatcagatccaaatccttgatttctcattccccaacttctttattttattgggttgttaattacccagcaataatgttgtactttttggttcatctaccttatggactattgaattttcgtattactacaattaatcaactgggatttcaaagtcaatatttgttgatttaaattttgcttttattttttgatcataagtcaaccatttagtgcttcaattttgttcctaacttttatttatttattttttatactttgatcaggaacaaggcgatt

SEQ ID NO: 9129 - DNA, 1349 bp, Citrus sinensis
  Intron number 2 from transcript orange1.1g038093m (locus o range1.1g038093m.g) derived from phytozome v7.0 (chr-ID sc affold00004; pos 2425385 to 2426733)
agagcaccactgataaggtatgccagtaaattttatggtttatattttttttctacagtttattttaaaattttgtagcttatatgtcctgttttcgtggctcctccaaagaaatgatcagataaggtaatcaattaggaagaataatgcatattcaccatattaaatagttaaagatggaacgagaaacaaatacccctagaggtttttgtttgagaaaaataaaataattgtattctagatccttaacatttccaaattcttcatcacagagaaaaagagagagagagagagagagagagagagatatttgtgctcaacaattagtggaagggcacttataaaatatgttatagtagttcaaaatatggaactaatgttgtatttatatactcctgtctatcttttctgggtaataaagtagaggctagacacgttctttcatatatgaaaccttatcatgtgttttgctggagttcagggttttcgactcaaactctatgttttgtggtttctcttgtacttcataattggactgtctttgggaggtcacttttccttttactttgttatggggatgtattccatatatggggagattgcaatgattttgttattaatattggagcttatatattgtggtttcgctcttatctttgaggtcaagtgctaactttaaacggtatcagagccaagtcaagcaaatgatcttgttcccaaattctcccattatatgaaagtcagtaatgtttcatgatccacatgccatgcatgtaagttgtattagatcttaaggtgttgttctgggtacttgcctttaagcttaagcttttgggttgggtggtaacttaacaagtgactgtaatgtaatattatgctcattttcttgcttatatatgtttcttgaatttgtttacctccttcctttttccatgtttagaaaccacaaaaattttgaatatatcctcttttttttttattttatttgcatgtatatgtttcttgaacttctatacctccttcctttttctttgtttagaaaccctgtaagtttaaaatttatccttttttcctttggctataaagttggtttttctggttaaatattgtgtgtaaaagtgttattttgtctaaatattatatgctgtttgcttcctagttaacattgtctattccattctaggcctgggaatttccttttctgatactattaatacttaattgcctgccgtgctagtttataactttatatggcttttgctttttttgcttttgtaatgcataattgttacgttctcactaatatcaggtatttgtttgtaattaggtggacaagagaaagttgtttc

SEQ ID NO: 9130 - DNA, 1104 bp, Citrus sinensis
  Intron number 4 from transcript orange1.1g022907m (locus o range1.1g022907m.g) derived from phytozome v7.0 (chr-ID sc affold00083; pos 226782 to 227885)
tttgttcatcaagggcctcaacctttgcctactgggtaaaccttcgctttcttgttgcttcttttttcctttctttattattggggggtggggggccaatggattatatgttactgtatagctcatggttttacttttgcacactgacccattctttttcctgtacatttagttaacttaaattttcatttctctagttctagacttgtggagtatggagttcattgcaattgttctagattaattttataattcattcaagaatttcttctgttattatgaactctgttgttcatgtgagggaaacaatttatggtaattgttgatggactggtatggtataagtctctcagttttgtttataagatattttgcaaggcatgtaaattcttctgatatagtgagggaaaataatagcattggatatctggtactcaacaagaactctgattagcttccatcttatgtaaccgaatcaatggtacaatttggttcaacaatgcctcactctctatagtacctaattatcttttttatcttgaaattgggtagtgatagtctcgttaactgtagttgagaccattcttgaggctttcgctgcttgacagtaaattttctatgtcatttgatactaggggccgaaataatggtccctagcacattacccaatgttcaccatagttgagaccgatctttataaattgaatcatgtgcagtttagcttatgaagaagaagatcaagttccttgcttgttacggacttaggtttttatgtaaagaatgaacttgtcatatggcatataatcattgtagttaaatttcattgaaagcctggacagataatgatgctaatgctattcacatgcctgtgattaaattacagcagtttaaatgctcatattgccaaacttacctgatttccagattctatagatttgaacggaataattgggattggtatttttatgtaatatccttcttctttttttcttggcaatttcatccttcgacttcactgttgcacaggcttccccaaagactaacttttgtgtaatatattgctttgtagaactccagttcctcccatcaatccagaccttggtg

SEQ ID NO: 9131 - DNA, 5137 bp, Citrus sinensis
  Intron number 8 from transcript orange1.1g048823m (locus o range1.1g048823m.g) derived from phytozome v7.0 (chr-ID sc affold00179; pos 128289 to 133425)
ttgacaaggtaaccggctgaaagtgtttcattaccatgtttaatgattattgatgccttttgatttgggtatcaatttttatgatgggaaattctatgtttgaaaaggcaagttgattaattgattaaggttataatcatttttgttgtttgcaccttataggtggtcacatttcttctcttaccaccactagcataacaaaaaaattgcaaaaatttatggtagtttgttaaataatttttatgcctcctttatgaaaatataatatgttttcaataaccaaagaatttcttccaagtatcaggtgttgtaggaacaaaataatagatatagagaacagaaatgaagaagaaaagattagaaagagattcaagaaagggatccagctatggtaccactgttgaaccatatagccccttttgacttttgtgacttcacaactaaaaatttcattaagcaccttacactgtcacctatttgcaaaatatatacaagtactatggtactttctacttacttacatggccaaaattcaatttagcatcttgcactctttttaatttgcaatttttttataagtattgaagtattttttgtttacatccaaattacatttataagcatgaagtgctctattaaaaaagcatcttattctttcattctcttatcttagcaatagttatctatatttttatgggtaaatttggttgttattatccaaataaattaattattattatccaaatcaaatatattatttattactaatctaattttattattagagaagtcatatgtcaacccaactattagtttttgtgatgaattggatggttgacaacaagttgactttttgtttagaaaaaaaaaaggacaataaattgatggtgaaattattgaacccacaaaactgctcaacgcaactatttctcaccacacccttcattaatttttagaaaaccatatttttacttgaatattcagcataattccagttttcttcttctcctttccccattgaaacaagtgataccaacgaaaaccattgcctttaagctaaagttttaatcctgcaactttaataacaaattgaactcattcacccatgaaatcaagagcacaaataaacacaaatgactttgacaagttagaattcttttcatttgcaacatatggagattatacctatatactacactgcagaagatccataaattgagtagaattttaattctcatttagataattgaaaaaattgacaataaaattatgttaggatgacaaataaaaaaaatagaatttaagaaatagataaataagtgttattgaatggttaattggttatagaaatggatgtagaaaataaaatcatttcatttaataatagagtttgtccttaattcgtaagttcttgtatgggtattatattaatgataattttatcttttttaaagatgggtttgtagagtattttgatgggttcaaatatcctacttaaagttttatgtatcattttataaactcatcttaatacccaatatacccttacaaactaattcatgcaggatttttttcaggcagctgctaagtttcatatgttacattatatggaacttatagttgacccaaaagtagtttcctatgaccctctagttgtttgacacgcaacaattcagtcatgcaaaaaaacctgatcttgggtttatgtaagttaaagatgatgtaacttagcaaaactcttttttaactttttttttctcgacttgtttttgcctcttcgtcctctatctctccgaccctttcccatctctctctccagtcttttatttcttcatacccaaagtccaaatcctttatcttcttatggaattctttttctccccttgtattacgaaggtattatcctaaactgatataaaacatatgaacattatgcataaattaaatgataataaaattattgttctaatcatcagaacaactaaatttaatgaacctaacatttgtccatcatggcctagctgtattgtctgaaccaaggaaatgtatttggttgtttgaatctgaaaaagcttaactaagagcatttagttctaatgagctttaccagtgacagtttttaccagatgaatatgcccgtttacagtaggagaagaagaataaaaaaacaaaaaaagaagagcataaggtgataaatgaaatttaactatgtatttagacaaaaatttctttaatacttatgaggaggctctcaatgaaattttcagttgttaagtcacaaaagacaaaattgaggttatggtacaactgtaggtaccaaagctggatcctcaagaaagaagatacagaagttagagattatcttcttggccaaaataggatagaaatgagttgatgactttttctaattcttttaaagtcttcttgactgactgctcatctcatcttcatttttattctctcattcatacctgttaaaaccacagtttatggctataaatcttctggtaaggagataatagtaaatgcctcgctgctcaatagtgagaatggtgccaataaatgcactttggcactttggtctcggatttgcaattttgctgcagtttggataagtatgtcttatataagggaggtacccatggtagcaaacttttaacaaaaattgtttctcagttttagatcattggatcaatatacattcagcaattgagattgtcttacctgtgtaattaaagcaccataattaatacacatcaagatgcaatctcaactgttcaaagtgtatcaatccaatggtctaaaaatttgtgtgaaacattgtgtgaaaatgagtgcccatgattcattcagccacacagataacaacccttttcttttaacacaggtttggactgagtttaaatttctagtttttaaactaattaataagcagtgaacaccgccatcaattttaaattattccctccttcccccactcttcccccccccctccttattgtattatgctacatgtttggttaaaattaaagtataacatgtctttatcatttttcccatgtgtgtagcgacttaaataagggcatctttactgacactactattcaaaggcatgcctactgaatagagatgcccttttagtcaccagctaaatagaagaaactatgaacgcatcttatactttaatatttagccagacacgtatgaatgttatcttatctcttatcttttaagagtcttagttagacatgtagaaaagatgtacggtttaactctttaccgataaataccaagatggtctgcataaatataatctcattgagcatttcaatgaagataaaaatggcttaaagtaagaatgtaaattgaggattcgatgatatgttagcgtacctcttaagaatttacaccaaaattctttgggataaacattttttatttttaaattttcttctggatctttgatggttttaagactttggcttttgggtttgtttaagcatgtgaaagattagcagtgatgagatttgcacaaaaaagttgctcaaacgaaatgcacaaaatcactaaagaatatgaatatttttgtctttagtggttttgtgcaacttttgtgcaaatatcagtgctcaaaagtttggactttggagttttgatgcgagagacagaaaagaatatgacaagaaagatagagaagataggaaaaaataattaattattaatgatgggatctacagttaattaaatagtttttgaaaaacacagaatttcatgtatgttctaatcttaattattgaatgatttttgatatggtggttagaaatttgtgccaaaagttgtgtaaaggaatagagactgctgagcttgttattcttataatcttattttatgtatatgtgtgcgcgcattcgcattggattgattttccatacaaattgtagcaaaaatatgggcttcctgacttaattaagtactgtatatttatatactattcttatctattagggatatccttgggataccataataatggtcagtggaatttttgtagctcacaattcattgtcttttgtgtgataataaagcttgctgatgtcaacgaaaaagttgtccttttattacacaaaagtgaatgaatacccattggattatcattatgtcatgttctttctaaaaagatatgggaatcttaattagagaagaagtgtttgtatcaaagtaatggagttttaaattagcttgttgtgcatttacagtttagggacagaaaaatgccccactgtgtaatgaagctgtgactagaaggagaatactgttgaaaggtaaccatgaccacattctaagaataatgccccaggaacttaacatatagaatgaatcctaacagaatgaaatttgcattgcattcactttgaatagtatgcatgatctgtggaaagaactatcctaatgggtgatgaatgcatagatagtgatattatgttggttccctacttgagactattctgtaatatatatgatgtataggtagagacgggtgtagccagcataggacgctttaaaaagtttttttgatggttatcttaaaaaaatatattttatttattatttataaaaatgccccaggtgaattgcaaaattctgaaaatgccacataattttaaaaaaatttcatgctgcccctaacttaaatatctaattctaaataatttgattagctattataatttcatgaaaattaataaagacaacaagagaaccgcctttatcaaatgaaatccattaaaatatcaattaaaacaaataaaatctaaaacaaatataaaatttcaaaattatattatattttaaatgtgccccagcccaattaaattcctggctacatccctgggtagagatcctgataaagcaaacttcctcgttgcagttattattaattttacaaaaggcggtgcagatgctctggttctagattgtaatagtatagttttagttacatagttttatatcctaaagctaatacaagatttatgcatacgtcaacatcttttaaattaacccatatgttcatctcatgtcatattcttgtttttttctcttagccgctcagaacatcgattgcttcttagatccgata

SEQ ID NO: 9132 - DNA, 1435 bp, Citrus sinensis
  Intron number 6 from transcript orange1.1g047047m (locus o range1.1g047047m.g) derived from phytozome v7.0 (chr-ID sc affold00744; pos 6456 to 7890 reverse strand)
accgggcatcatcacccaaacttttgtaagttatgcattttctaactaaaagatagtgtaaactgagtttatgcctttgcatcttcttttaagttgagctttttaatcattccattttactttattgctggtgcctctagtcccatattgaaggttgaatgtactattttttactcagattcttctacaggggtgccatgtttatgtcagatacaaatattttttggaatagtttccaatatgcatctgatacttcataaatgtttcttaatcttataaatatatgttttaggttctaaaagttctgataaatcgtcaccatgtttattgaaagctggcatatgattgattgtggatgttgttcaagtgtaaacgttaaatgtagattaacttgtgattttagtgtgtaaccggtgaacaattattaggagagcttttctgattgaactatatcaagttgaaattagaggatacgtaaaaatataatgaaagtgtaatatcaaaaaatattacatatataatgattttgcttaatctaaagtgtgctgtatttgtaaatacctatattatgtagttagtgtattggcatattcgtatcgtaagatatcatatctacatatgctctatggtctaggttcttaatagagtatttctggtatatacgctgctgttacaaggatttataattatatcttggagcaaccttgttgaagagccaaagcatggctataattgtgaaacatagggggacactctggacatggcagttttgtaaatgttggagggtagaaagaggttattatagcttcagagtgagaagagttaaggtttggttttggatagagaaacatgttttacttcagttgctttatgtggcttttagagagataagagctatgggtgaagattgctgagaggattggcagatagaactagagtggaaaagtgtaccttgagccttataattttttgtcgccatatgagctgtttactctggcacaattgtatattaatatgtacctctgtgttgtttctttgttcttttcaaagcatatgaccttttgctttttggttgcttttgtctgttgaaaatgtaaaacaaaaatgctataaatataaaatacatccaatcaattaaatctttatcaagagcaggcatgttcatccatacacaactatttagttggagccttttggattattctaagatctttaaaattttatttaagatgagctatttgcataaatatgaaccatatcataagtaggtgctgtgtccatgtctgcctaagtatgccagaatgattgcatgtaatccttcattaataatttagtttgaagtgcatccttgacacttaattatgttatcctcctgtaaaaataagaaaaatatgcactaatctatttatatcattcgttacatctgtgtacaggt

SEQ ID NO: 9133 - DNA, 405 bp, Citrus sinensis
  Intron number 4 from transcript orange1.1g022991m (locus o range1.1g022991m.g) derived from phytozome v7.0 (chr-ID sc affold00141; pos 96301 to 96705 reverse strand)
cttttagcgggtgtggttagcattttgtattggaggtgagtatactgtataccaacttcatttaggttctaaagtttcatcgtactttgtaatatgcgagtattgaactggatttttgttatgtaatcttagcaatgacttggtgcaatgactaattcttacactaaaatgagttcagttttggtagctttgtcaaggtacagttctctgctatggtatcacaatggttaaaaagtggatcgctatgttggttgcatattgattagcatcaaaaggaggaccttttgattctatgcttttatatatatttgaatgggaatgacattttaaatcaaatatttacgagaggtttattaggcagattattttttcttaatggtgcttttttcttttgtagtttttttg

SEQ ID NO: 9134 - DNA, 2037 bp, Citrus sinensis; identical to SEQ ID NO: 9069
  Intron number 4 from transcript orange1.1g005086m (locus o range1.1g005081m.g) derived from phytozome v7.0 (chr-ID sc affold00041; pos 10783 to 12819)

SEQ ID NO: 9135 - DNA, 999 bp, Citrus sinensis
  Intron number 1 from transcript orange1.1g032277m (locus o range1.1g029518m.g) derived from phytozome v7.0 (chr-ID sc affold00005; pos 207437 to 208435 reverse strand)
tcgatcatcatcagcctttcgcatattcagatttggtaaactattttataattttgttttatttccactattgcgatcatacttatcgcgttataatcgtttgatgtaatagtattgtcgtgattgattgtttgtgtctgaaataagtttcgatttaatagtttctttcttcttcttttttttttaatttgatcaagtgtgtttttttaattgaattattcgtagattcatatcgattttttaatttgataatttatctttttaatgttttgattatgttgatatgttggaattaaccgctaatacatgaaaacgagtgaagtaaagttgaaacaaccataaaaacatgcttgaaaatagtcctgaaattaggttaatctggttatattcaatgttagggttgcttttgggggcaattcgctgcgaaagcacttgatgtggcagtaagtgcttctccagaaagcacatcgcggttgtgtttgatcctgagttgcctttgtctatttcatccaaacattgtcaattagactagaaaagtacttgtcgatgcacctgaagatagtctcattgtcattatgttattagagaagcatatgatatagattagagtatgaatttgatttgagctttactagttccttgctatgactaggcttgttccagatcatgccacagatatgaaaacatccttttcctctttctggagaaaagcatgatgagtggcagaagttttttgtggttatttgtttttagtcatgacttgacatatttgactaattgattcagagaatctttgtgttgtggctgcttgcctcggttctatttctgagtgggatatatattctaacaattaacaggctgcaaggttttttatttatgaaatgaggttcatgtatttagttggtggcaagtggcaggttatatgcttggaatttgtgccacgtgcataagtatttttaaattgaaactgattctttgtccttgtttctgagtgaagca

SEQ ID NO: 9136 - DNA, 1899 bp, Citrus sinensis
  Intron number 3 from transcript orange1.1g033609m (locus o range1.1g033594m.g) derived from phytozome v7.0 (chr-ID sc affold00042; pos 714799 to 716697 reverse strand)
tgaccaaattaggcttcttgctcaaacaattgaaagtgagttactgtctgttagctttttattttgtttcttgcgcctgttttttatttggtagcctgaatcctgaagctcatgaagagtttgggcatctacgcttttaggttttagctgattgtgttgcgttatagtttatgattatgttttgttgttatttaaggcaagctatgtgtgagattatggagttcactgatattttgaaatttattaaattggacaattcactttccttttaaggctattcaagctcttcttaagtcaactgactagtggaaatttgaattgctacactttctttttcagtgcacgcaccctcgtacaaattgtcattaccataatcttagaacccatttgatagatcagttaaaatacagataggatgactcttcttatgtagtgtttggtatgcttcgaaggaccagtaagattgaaaggatgcgattcatccatagtggactgaataagacgatcagttgagggcagttgggataaacatcatcgacaacttggtgaatgaccaaaaatgttatatatttcaatttcccacaattcttctgtgtttgctggacagtttttaacagaacctacagggaaaacctgttcattatttttcccaccattcttttgtagctcagggatttctagccaacacatttactcaggaaaatcaaattttctgaccatttgaaaactcaaaacagacaggaaacagaaatgaactgttggttgatggtgatagtgtttgtgctattctgagggcttttgtcttctttattgtattaggatctgtgatgcttctgatgggaagcttattaggtgttgctagccaatgtgatatgtaattaatgtttttgagtttataggatacgatgggattttagaatatctaacatggtcaaggcagcaagtaattgcatgtggtaaactagccttgtgagtattattgttccaagagattctaatttccgttatctttttaaggtgtgcgaactgactggcatggctaagaagaaaatgattatattctaaatattggtaagtttatattcatttaggctgacactctattaatatttaaaaaactaatcctaatcatgtagtagaggaaaaggtgtcttcttttgttgtctcttgaaattttgtatacattgccttcaatgttgtttcatttagaggataatctctagttgctacttaaattatatgcctgcactttccttatatattttctgtcttttgtaacatatatctctttttcattgattcattagagaaatgaatggctaaaattacctgttgaataaagtggacagtatgaaccattgcattcataggcaccttcagctgtcattttattatcttatttcataagatatttatacatgcttgcttagttcatcctgcctgatcataggtgaaatttttctgtcattttttattcccgtgcttttggcttctagcaagcaatatttgtagcatataaaatgttcagtggccagagatgaaaaccgtcaccatactgaacatggtttaaaagatggtaacaagctgaattagtgcaggcatgaagtgattgaacaactcattgaaacaaagttaagtttcaataatctgtaatggggacatggcccttgaatgagtcaagttccagtatgactctctattgagagtgttctgcagttgtgctgcatctcacttgcaataacattaatgccttggcaaatgatgaacattgtattccctatagcggcatgtatttttttgctaccttgtgcttttatattactatgtatgtatactgattgctgtgtttcttgtttttttgtagggctgccacttcttcaccacctcaaacacgcctgt

SEQ ID NO: 9137 - DNA, 913 bp, Citrus sinensis
  Intron number 1 from transcript orange1.1g030400m (locus o range1.1g030400m.g) derived from phytozome v7.0 (chr-ID sc affold00739; pos 25010 to 25922)
gggttttttccaggtaaaatgatttagcaaagtttgaaaattttttttaactagaacatgcttgtctgtgattaagaataaaaaaaaatcctcgcaaaactctcaatcacagtatttattttagaaatccagtctccattgatgttagcatatcatgagttttcagtttttcccatcttgttctttcgctgttttcagtacttttaggactgcagcagcttgtgagatgtgaaggaagttgtctctgtgtttatttgtacaaattatgaggagatatgagaagaaaacacccatcatttatttttgaaacccagattccattgatttatttgtttttgactttctttattgctttacctttccaccagagatggattgggttaggattaatttgttattttctcattcctaaaagtaactaggcagtaagtatgaaaatattctcttgacaaatttcacctactctgtctcaatagcttttggtagctaatgagaaatatgcttctgtcaaaatgtgataaaagatatactaattttataagaatcctggagattatttgctgttacatggttttgcaaattcaatttgtgaaccaaactagaagaacttcatgcttattattgttattctagaatattgaactttctgcaaaacaatgagtgaaaaacacttgtagaaactaatcattgggaagatatataagcaaattaagattggtggttcatgcaacagcaatgttctaggttgaaatgcaacaaatgctttcagccatctttgacggtaaatcttctctaaatcagtcaaataagttgcaatctgtctcagtaaaacacctggaccactgtgaacttagtggcatgagtattaaatcttagatgctgttcattcctgcatcatttcagctggtaaacc

SEQ ID NO: 9138 - DNA, 999 bp, Citrus sinensis; identical to SEQ ID NO: 9135
  Intron number 1 from transcript orange1.1g029534m (locus o range1.1g029518m.g) derived from phytozome v7.0 (chr-ID sc affold00005; pos 207437 to 208435 reverse strand)

SEQ ID NO: 9139 - DNA, 4981 bp, Citrus sinensis
  Intron number 1 from transcript orange1.1g018764m (locus o range1.1g018796m.g) derived from phytozome v7.0 (chr-ID sc affold00043; pos 12258 to 17238)
actgttttgttaatgtaatcaatctctactctttgatttttcttctttttcaattaatattttaaaatatgaattaaggtcctcttttaatctgagttttgcatagtattttaaaaaatcttgtgtaacatgtccattattagtaatatatgattgaaaaaaactacgtacacttatatccttaacttctaacagtcacaattaagctcaggaaaagcttacatcatgggggaaacctggtcttacaaacttatataagacaatttggatatatgtatgtttatccaaaaagaaaatgaacaaatattcattattttcttaatagtaagataagaagaatctacctaattattaaattaacgatacaagagcagttgatcataacaagcttttaatgttatttcagggctgtgatgcatcgattttgctggacaatactactaccatagtaagcgagaaatttgctgcgccaaataataattcggcgaggggttttgaagttgttgatgacatgaaagctgccgttgaaagggcctgtccaggcgttgtttcctgtgctgatattcttactattgcagctgaacaatctgttgctctggtatatatgaatttctattaacaactcatcttgctctactacatatttttagcttaaaagtgattaaattactatggtatcagagagtaagtctgactttacattcgtgttggaattttcagtccctgagtacttaactaaatgaatccacatgcttagttttaggcggcaacagtccaccgacattaccatgttgacttcgtgatagtgcctggacaaactttaccgtatgaaaagggaaggcttctccttccccccacccccccaaaaaaaaagtgatgagattcatggaggacacatcagttttacgtgaaaatatcttctttatgtgatacagtctggttgaaccgttcactcaaaattgtaatgtcgggaaactgctaattttgggtgcaaaaagacccatataaatactagccaaataaagtcggaaagagtaattgcatgtctatttctgattttagttaaatttgcttattatgcatctctcaagtgattcttttgactaatgatcgtggttttggtatcagtcagggggtccttcatggacaaatctattgggaaggagagacagcagaacagccaacaggactcttgcaaatgaaaatcttccaggaccgaacaatagtcttgagaggctcaaagatagattcagaaatgttggcctcaacgataattttgatcttgttgcactctccggtaatatttgcttatacaccctttgacttgagtacaaacagaccttggagtcttttgggataaagcagtattggagccagaattagaaatctggacgtggaaaattttttaatgccaatactgagtcttgaaatcttagagatagtttaaatgttgaatatcttatttaaaaagaaaaaataaattttgataaggatgagaaatctcatccactaaatatcaatttttttctcattgttactcttactaagacgaccaccgacacaaagcacattcatactctactgcacctagaaggcttgactgaatatcctaatgatggaagaaactgtgttttaaagtttgacattggtgactaggaatatgttaaaacgtttgacaaatttactccccttaatcacatcatgaaatttgaattgcttcccaaaaagaaaagtgagaaccaccataatgaaactccattattatccttaatttgtatgaatttgagtaaaaataacaaagattggctatgcatttttttcaggagctcacacatttggaagggctcagtgccgaacttttagcgataggttattcaatttcaacagcactggcaatccagacccaacacttaacacaaccctcttacaacaactaaggcaactatgcccacaaggtggaaacggcagcgttctaactaatcttgatgtcacaacacctgatgtgtttgacaacaaatacttcttcaatcttcaaatacacaagggccttctgcagagtgatcaagagttgttttcgactcccggggccgataccgctgccattgtcaataactttggcaggaaccagactgctttctttgaaaactttgtgacttcaatgataagaatgggcaatttgaaaccactgacaggaaatcaaggggagattagattgaactgcaggagggtcaacggaaacagcaatatcgcaacaagatcatcatcatcggagggtgatttggtcagctctttctgaataagctagtttgcagctaacgcgagagaaagagtttgtgggtaacaaactcatgaatttactcctatgttttgcctgaaacatgctttgtattttcaataaactaaagttgtggttgtgtattcacgtcctgctttctatgtatcagaaatccttgtcatattgtatgtgtttcttttttcttttcttttttttctcccgaagtcatcgatatgtattttcatttgagtcacttacaagtttttaataacccactttatcctctagctttaaaacattaaccggaaaaacaccttctttttacatattgcttttttcctttttgtctgacatttgtagtttgacaaaatagtggggaagaattttttgtaatttttaaaaatggttacacaaactctttttaggataagaaaacttagtttttggacaaatttaaaaaaaattgtgcggtctatgtgcacaaaaaagagcctatatagtttctaaaagtaatggaatcttcgtgtctaatcactaaaccacggcaaatattttgatctttttttcccaaactaaaagtagtaacaatggttatctttttcatgatcattaataaaatcatttttccttctagaacttaagcgtgttctatctttttcatttcctctcggtcccttcttgaattagaaatctaaattactcttatacccatttcaaatataatcctgccaccacttaattatttagcacccacttggggttttaatctaaccccatttgaagtcaaagtcaaacaattatatcttttaggataaatattaaaatatttaacaaacatttattgttagagcttaaaaattaagatgattgaacccacacttatatgataaaaataattataacttaaagagtttgagtagctcaatctcgcatctaactatgtatgagctgacaaaattatatttgatatttcggtagacaaataaaaaatttcaaaaggttttgttttttatatgaatttcaaaaggttgaaatgaaggatttcgaatatgtggaatccacacgccacttgctccacattcacacatacgataaaagaaacaggtaggctggcattaaacaaaggcggctcgaggcgtcgccgcccctacctaacaccatttcaagaattatcaacttagtccctcatttcatgaataattactcaaaattttggatttcattttaataagcttttattctcaaataagtttgatatacatgcatttgtaatacgttcatttatacttttttttaataaaattttacaaacaaatattcccctttcttatgttctctccacaaaaacgaaggttatttctaaatttcaagatcattatgaaaataagacatgtaatttcaaatgctccgtaattagtatattgtacttgaaaaaaaaattaaaatcgaagaatctaattgaagacttaagcttttaaacacgaaagaaaaattgaatgaaatttaaaaaagaaaattaactagtaattttattttaataataaagaaaaaaagacatctttatccatatagtttacttagatgctcacgtgggccacattagtttaaaaaaaaatcacataaacctaattaagggaattaccgaattaataacgtaactaacctattcaaacagtgaaacgaggaacttcgaggttgctgcaaagttctaatcctaatctggtttgtttggttataaataaagaggcatttctctttgttttccaagtcctaagactaatcattctcttcatagagaagtagtaactcttagccaaaatggcttcacttcgttatcttcttgcagcagctcttgttgttgcttttgtgcttgagggatcaccatctcaagctcaactttctccatctttttattcttccacatgccctaatgtattgaacattatcgaggatgtgcttaagaaagcgttctcgtccgatatccggatcggtgccagcctcatcaggcttcatttccatgactgttttgttgatgtaagcaatctctgctctctcatttttcatcttctttactttatcaagctctctgtctatgtacttactgatataacatagtttcaagtatatcaatgaacagtatctttataatttttatggcattaaacaaaatatagagttttcagtaagagtttgaatatatcattttaatttcaacaacttccaaaaccatttttatttatcttttttctttctctttacaacaaatttttcctctctaattcgatgtaccgaggaccatgtaattctctgtttataaataaattttaatatggggttttcatgtactagaaatttaaatctagcaaagatttggtacaaaacaggaaataaaatccacctcatggcctcatccctgctgagttcttttaatgatcatgggtccaatattaatggtgtatggttgaaaaaaaatcacacttgttttatattcttccaactgagaaatttaaatcaactggaaatcctagtcttaaaaacatatgtaataataagacaatttaaataagaagagtttgcattatttatataatttttttgaattcctgtccataagataagaaggaatctatctacttgaaaaagtaataatacaatggactgttaacatagcaagttgttaattaatattattttttcaggggtgtg

SEQ ID NO: 9140 - DNA, 2309 bp, Citrus sinensis
  Intron number 11 from transcript orange1.1g004387m (locus orange1.1g004012m.g) derived from phytozome v7.0 (chr-ID s caffold00354; pos 36391 to 38699 reverse strand)
actcggacatagcctggattgaattggttagaaccctgtacacatatgttttacattcatgtaacgattcatcatacactgtatatcattctgggacaaacaatggaaatagcatctactcaaaactttattttattttatttttgatttatgctcttggggacgggggatggcatagaacttaaccgcatgaatgttattgtatgtaggaagaagttaacaaattgcacatgggatattgtaaaggctaatactgacttttcttgccttagccttcacttctctcttcaaacaccaatattcatgtataagaaactgcacatgctcaatctcctctgagattctaattatcaatatgattgggagaaaaatgtaagaaggaaatttaatgtttttgaaagtctatttcaatcaaattctttggagttctaaatgagtatgtagaccactgaccaagacataatggattcagcgcaaccaacctgatgaagctttgtataaatgataagagctatagcagcgtaatatgaaaattagaattaatatctttgtagttgatgagcttggagactgcattgcccataagattaatttatagacggtgtcagatattgtttctagcatttctgctatcatggtttagtcaacttaaatggagaatttactaggttaatttaatttcacaagatagacgtaagattagctatcttagtcggttatcaagtcataggttgtcatactgagaatattgcaagttagaaagacgatcagctgtgtttgttggtggcaatattttccagaagaaataatgaataatagtagtgaggagagtgtgctaaatattagtaatattttggaaatattttttaatgttcatttagtttacagattattaattatatactgaattaggtgtttcttgtgtggtactgaattatagaataaaactattcttgtggtactgggttatttggctctacttctgccttctatatctgttagtgtttttgttattcctttgtggttgtaatggtcctgaatcattctatgggcttggtccacatgacaagcttgttagatatcagtctttgcaagtgaggtgggctgctagatcttgaatgcttaatacgattttctctttacctaagagcttaggcttttaggcaaagtagttacttaacatggaagaccattgtaattttctaattcaagcttttgttaggaaatgaagctgtctatgagagatagatttccagaatttacatataatgatttgctagggctttgtgaaatattgtataagctcaatagcatactgggtttaaaatttgccatacttttgcttgtcccacttacagattttgagtccacctcttcaaataattcctgtcaaacactattaatgtgctacttggagttcttggcatataatttgccctttttcttgttggatgtaggattctgagttggatgtcaccattgggccttatgagacatatgaagatgcaatttttgggtacaaggtaaaattttataaagaatcagtggagtgtatgtgtatgattttcaagcaacaagaatagaaaataaattacaaaaaaaagggtcacctgtacttgaaattagagagatcaaacctttttatgattttttttttggttaggtgtactaacaactcataacagcgctaagacccaggctatagtcaacttataaatgaaatagcagaaaatttgcaaaagcttccagcagttagaacttctgagatgttttaccaactctgaacaatgctgagacaggttgtgttgtcttctttagcagtagtaatacgtgcagtgaatcaggtttaatttgttgtgtagtttgaaggtttgtcgtacaccagtgagcttgtattggaggcaattagcattatgcttactgcactgtccaaattggcggtagaaatgtgaaaaacatctttttactacattattagtcacataactctgaactgtttagaaaaacttttaacatttgctgactgtggccttttaagatttctagctgaaaatttatttggttcaaaatggaaattatatgaaataaaaatggagaaagttgactaggagtaagttgactagaagtattctttcctataattttcatttttacataacatacatcctagtgcgaatatttatttgaaaagaaactttgtgactgtacatccttgctgctgttcatacatctattgtatcaaacatgtagctcattagttgtattatatttatattaggcaacatttgaagcgtttattgggattcggg

SEQ ID NO: 9141 - DNA, 1490 bp, Citrus sinensis
  Intron number 6 from transcript orange1.1g023443m (locus o range1.1g023142m.g) derived from phytozome v7.0 (chr-ID sc affold00295; pos 50637 to 52126 reverse strand)
ttgcccccactcctgagcagattatagccatcaaggtattctgtttattgcagtataagtagtcaacggtattcttttcctgaggtttaaatgcatgtagacgatgctgggactttccaaaaggttggaaatcagatgatttaatcaactaggcataaggatgtaatgatatctaacattttaaaaaatattaggatgatgaaaagtctcctagttctaggctttattggcatgccataccagcttttattacatatgcgaaaagacattttagccgctctgctttgtagatcaaggctgtaaaaccaagaaataaagatagcgaccgaacaaagttaagagtatctcagaatttttttccttataatttttaaaccactatatatatataaagagagagacacatgcacacacacacagagatatattaatgatataagtcctcaaagaaagctaaagatcgtagagaggggaagccaaaatcatatggaaaaaacaaaaaaaaaaaatctaaaacaaccaatgcttgtaatctgcaatgaacaaccacccacagcagtggttagctgaacttctagataagttacatcaaactccttgccagttgaggtgaatgaagaaaagaaggtacttgaagctcgtttctagctgacccaaagcaaagaaaagatcaaattctaccctgtccatgttgtctagtcttttctcctaaatataagatctagcttatttatgttcatataatccaaagagagatgaagcaacatatttcctaagaatttcagccttgtttccttacctgaaagtgaaagtattctccattagtgctgagtcactagaactcatggccaacaaattcttatgttctttgcataatctattctacaatcttgtatcgtctttttgggagaagcagttattggtaaccattgcttttcaaacctcgttttgagatctctgatgctttttctaagatcagtttaatgtaaagaaaaggatatattttggaccgttgaattaaaaggttgcactgccttgcagaaaaaagttattttaggaagtgtactggtcttttttttttttttcttttttcgtgtcaaagggtagaaattatgttgttgaccgaaatcatgtaagaattagattgatgaagaaagtatacactcaacagctaaattagttcgatattttaggttggatgatcttttgagaataaaagagttgggtattaaggctcaaaaatattgtgtatgtaaaaataagggtttgtctgtgtcaagaaattattatatttctcaaaatgtgtaacataaagggtaatgttcactcatatatgatttatttatgacttttataataatctagttgtcatatcatatttagttctctcatactgtatctgaactaaatatgttgagttatatttttttgaattatggttttattgttatgcaggctgctattgtgaattctcagacacttgaagaggt

SEQ ID NO: 9142 - DNA, 993 bp, Citrus sinensis
  Intron number 6 from transcript orange1.1g029648m (locus o range1.1g027286m.g) derived from phytozome v7.0 (chr-ID sc affold00015; pos 1832193 to 1833185)
ctcgagagagagatcgaagaattcttctacgtgctgtaagctcctacactgctattcttgatctaaatatatgtgtttctttttgccaagtgaagaaaaatttcaaatgctttttcattttgtttgcaattgatctttaccaactgcttttttaaggaggcaacttgtctgaatgacacaagtcaagccacattcatacttcaatcaaaaatataaatgggccctttctcagcgatggaatatcaaaatcatgtccaaaaaagtaaattaaccatattgttgatgctaagttaaattgttgagttttactgcatttgagatttgaactactagtaaaatcaaggttaagaagggatattttggggtgttcaacttctattctcagtacttgaatttatataattgtctttctgacaatcatctgaaacaatgcaatagtaagacaagacagttttgagaatatctttctgaagttttatgttagatggactatgaagattggggcattatcttccatttcaactgctttctgtagttttgatttgcatggttgactatgaactattgattagacaccagtgtcttatcccgtcttcccttgatattagaggggtggtggcagtggagagggcatcttgtttgactgtctgactgagacatataacttgctacctcttacctagtaggccaaaatcacagtttgaatagattaagtttccgtaggcaagtcctgaaaaaattggttgaaacttcagaagttggattactatagcttcatgaaggtgtttgaatcatcatattaaccagtctgtgatcttgaacctttttaattctaggaataaattgccttttgtgctcatattgagttgtggcttttttttttttctaaagtttaatttgcttagcattgaatgctatttattctaatagatggataaaggtaaatctgaaaattcagcaaaaaatccagccaacaaaaataaagttggggaa

SEQ ID NO: 9143 - DNA, 1080 bp, Citrus sinensis
  Intron number 1 from transcript orange1.1g000198m (locus o range1.1g000199m.g) derived from phytozome v7.0 (chr-ID sc affold00004; pos 1180145 to 1181224)
tagatccacagctaggtatctcacctacccattattttatttcttcatttttcattttaaagtcttaattttcaaattttattttttttttgggtgcaagatcttactaccgatttatttactgcgttttctagttctattctggttttgacgtttttgcaaattcggtgacattttagtcaaatctggtaaatttttcttagcgggattttggcgttttgttgaatatactgaaacgcttagttattcatttatttatttttcactttcttaactgaagaaaacataatcgctttgtttttttgcttcttttttttcttttctacatttggctagacacttgattttggattctgctttactcattctcttgctctctcttttctctctcccttccttgtcagtcttttaagattttacagtgtgaagagagtgcattgttttctgttctgctttgtcgttttttgtggtgaaactgtgaatttcactgcatcattttgttgttgaggatttggatcgaagagttttcaagtgggcatttcaagttctttacgagttttaaggtacgtgctttcattagcttgattttgtcccaaaatttggtttttttcaattcatttttttccttcccacattactctctgtttgtttactgagaaataggagggaagaaaagttttggatcttgtatttgtttctgtggaaaattgcaagtcaaactgatttgactaattagttgaattttccttagtttataagattcaaatttttatgacagcttcaatcaggtccgttgtggtctaccctgagatccgagtatgacgaatatgcattttaagttttacaatttgggtcaatttgttatttcattaagttgaaaatttgtgctaattttgcataattatgttactctatttgtgcataatgtgattagtattagtagaattctccaaagaatgtacagggatgtccatttgtttgatctttgttctattaatcagagaaatgttatgatcctgttcccattaattcgataatgagttttgtctaagacagtggaactttaatgttatgcagcta

SEQ ID NO: 9144 - DNA, 741 bp, Citrus sinensis
  Intron number 4 from transcript orange1.1g044744m (locus o range1.1g044744m.g) derived from phytozome v7.0 (chr-ID sc affold00030; pos 434572 to 435312 reverse strand)
atttactatcctttctgggtaatttggagtacaaggtaagttcagcctccagcgtaatagagaccccttaatacatgttggatttctcaatatcttatatatcttacttacaatagcacagaatcggaaacaataatgtagctgagtgtccttggaggacaagatactacttgtagtctcattcttagtaggatttgatgactgatttatgaacctccctaaactatattgcaaatgaagttctggaaaagtgaagatacaatacttaaaagaatagagaaaaatttacttgagctaatttttgaaaccattactcagcaagaagatcactgtatggtttacttgtaaacattgttctattaaggcagcttgacaatgttatccaagttcttgccagcttcttcttctcaatctaaatttatgcagctgtgattgattgattatatcatagagaaagatttgtaactctcttttttatgtgctgtcttcatttaatttaaattagtaggactagaagaccatcaggcatacctcttgtgtaatccaaatggcatgacaaatatttagtatacccatcagcatttatggtcatattggtagttgagtgacatgtgcccagtgccagtggtgaccttctaccgtacaatgcagtttacatgaaaaaatttcttgcattccttgtccgtattggttcaaagtagtataatctccgcattttctttttatctctttatcacagct

SEQ ID NO: 9145 - DNA, 721 bp, Citrus sinensis
  Intron number 9 from transcript orange1.1g045469m (locus o range1.1g045469m.g) derived from phytozome v7.0 (chr-ID sc affold00032; pos 85184 to 85904 reverse strand)
ctcaagtgtgcaaggagcagcaacgacaaattgaggtttcttgtagtttccatttttcattgctaagaatcactttccattgatggttagttataaaataatgctgctgtgtagtttaaatgaagatgagtctctgacacttgcaaacctggaatggattacaaagattttagaggaaaatgttactaacttgaaagatttccttactgaaattgtttgaatcacaataagatttcttgtatgtttcaatggaacaacttagtaaggctttggaattggacatattgattatgcttctatcttaaagtgaaatagaaaagaaatgccagctgagaaaccttggtgacgtgaaaggtgtcatctggtttaaacagtgattgtttccattgcaactaaaggatactctgttacttctataagacatattctgagatcacatccctgtggaagtaaaattaaaaaaaaaaaaaattgttataattttcttttattcacatagcttatgaaatataaaactcaaatcattttaactctaggatctttgagttcagccaatttgtaaattctactcagtagttatattttatgcttttctttctaaaagtgcagcatgatgtttttatttccagataatatgttttatttgtttagtaagatggatcttttctcactttattgaaacttgctcgctgcttctctctaactgctcattgcttgacag

SEQ ID NO: 9146 - DNA, 2050 bp, Citrus sinensis
  Intron number 3 from transcript orange1.1g047539m (locus o range1.1g047539m.g) derived from phytozome v7.0 (chr-ID sc affold00223; pos 225856 to 227905)
caggttattttattttaatttcgtttgcgtttgatgagaattaattttatgcatatagctcatattgaatcgaaggttcatgtttgggatgaagattataagttttgtattctgtggaagtggatggtttatgtgtgactagggttgagattctcttgtattttttactcgcgttagtctatgttagttttgatatgtagactcgggtttgttaggatctatgtagctgcctttttttccttgtgtttgaagaaaggttttctacagtgtcaatcggttatgtaggtgcaagattttgcgtctagttatgtaggttaggacttgttattggaagagctattttcttttttaaagttcggaatattgttgaaaggtttatggaggttttggcatttgtctggtttatgaaaagcatgttctttgttgatatttttcattttggtgccatttttcatcttattatgctttcttgatgacccacttacatgtaaccattactaagaaaaaggttgaagaagaaagtgattagaattagatttagaagttttagtgttgtgtgtcgaggatcaaagttttgcagtattaagaaggaaataattcattgtcacggtcagttcttctaataaccattcatggtcgtttacattgattgtcaccatggtaatcatagggacaaaataatgtttgaaaatcttctcatgagatcaaattaaagtgaacattctgaaagtatcgtttcagatttaaccacctcaagttcatagataaaaatgagctatcaactaggtgcatactgacaagaatgaatctgtgaatctatggacttgacgaagctgaaaataaaagatgaaaattaaggttgttggtctctaataatgctatctactaaaaccttaaaataaaaactaaatcctattgttaaaatacaaattttagggaaaattttggacttaaataaattcactaacacttaagatttttcaaccttaggactgagtattttgccacaaggtttgacagaggatattgagaagcctaattttataatggtttttcataacattttgacaaacaccaactctacttggttcattctgatatcttcagatgccgcatggtttaacgaatgtcgtttctagattttgggggtccgaaaatcttaggaaggatctaaattggagattggatggaaaaatgggttaatgactttatttaattgcaaattttcctaatttttttttcaaccctaggaatttttatttttattttaaggttttagtggaaattagatagcatttatggagaccaaaaatcttaatttttcatctcatgtttttagcttcatcaagttcatgggtgcaagatttgtgaacttgaagttgttaaatctgagatggtagtttcacaccctttagctttaatttgaacttgtggtctatttatgcctctaatcagagcttctaaaacttttttttattttccttttattgtctttcaatttcactagcgtatgatggtgggctactagttaacttattggaatcaaaagtgcaagtctcattgacattggttgccatagtaggaagcagggtacaaaataattttggaggttaacttgttgaaatcttacttgtcatcttacccaattttcagatgtcattttatttatttattatctcccttttcatcctggccttctccaatagtggttatgactatatactagtttttggatctattttgttgacattatgagttgactttttaaaaatccggaatttttttcattatattcttctaaatatttagattttgctcatttgtggtaacttaagagagattggctaggtttattggtggtcaaagaggatccctccaacggttaatagttggatgcaagaattaaaaatcttactacatgtcattttctattctatttggggtgtgtctgtgtgtgtcaaataactctttgactactattcttgtctgaattattatcttatatatgactagtctaatgtttatgcttttcaatctttttctgcagaaa

SEQ ID NO: 9147 - DNA, 1686 bp, Citrus sinensis; identical to SEQ ID NO: 8907
  Intron number 1 from transcript orange1.1g002882m (locus o range1.1g002882m.g) derived from phytozome v7.0 (chr-ID sc affold00016; pos 823628 to 825313)

SEQ ID NO: 9148 - DNA, 1392 bp, Citrus sinensis
  Intron number 1 from transcript orange1.1g024817m (locus o range1.1g024783m.g) derived from phytozome v7.0 (chr-ID sc affold00002; pos 1850700 to 1852091 reverse strand)
agctgtcgctgaagttaaagatcaaggaagctgtggtaagtttttttattgttttcatttactttttcttttttagattttattcgttacctgcagtactttaattattatcttaaaattatgaatgaatcgattgcggagaggagaggaaaggaaagggtatgtttggtattttaaggatgattagagttagaagaatctgcactgcttccggttgggggcagttgtgctaagttgaccggttaggactattactgttattttttaatcttttccatcaattagaatctggtttttgtgaatttctttttttctccgacactgttattatgattatttttttaaagtgctgtttcgttctcggacttttggcgagagttcggaggcttgggccactgtgataatcaatggtccaaattgagtattccttttttattgttttgtcgaaaaacaataaagagaaaaactgacaagaaattaggaagtgtgaaaaacaagaagatatcttctgacggaaggctcgagatattttctgttttccctcacgagaaaatgttttccaaatgaaaataaaaagaactatgtctggatggaatcttgtttggctgtcctgacgtggccagagcttgttggttgaacatagctgccattgggtacagagtggcgggcctttttaaaaactgtagtaatattttttgtgtgttcagtagacgtgaaaatcgtattcctatcacttttggtgataggtggtaacaccacaaaattttattacgtgtcagtgggctgggccgcttgtcagtgtgtcagttgacttcatctgcataattattaaagctctgaacaaaataagtgcgtttattttgtttatttgtacaggatattggtaattcatttcaccacctatgagcttcgagcttgatatcttgttccgttctaagagattttagggattagtccttagataataattattacgccataacttgtattagtcattgtcctgtagtagcaagttaattattttttttatttatcattaaagttgtagtatggtaaaacctgtcaatgagagatattaaacattttatgtcctacaagtcttttgcggtcttattcaacctcaatccatcattctgaacaaacttaataactcagaattatatgaagtgatgattttttttcccctacctaacttttgtaggtaataaatcaactgatgtagatacaaaacatattcaaatattgagttgtctaagtacttaacttggttagaaattcagaaagcaaattatctgttgctctctgtgtcgtgtgattctaaccattatttgattgtatctcgcttgaatgaagggagttgctgggcattttcaaccattgcagctgtagagg

SEQ ID NO: 9149 - DNA, 1821 bp, Citrus sinensis
  Intron number 9 from transcript orange1.1g016842m (locus o range1.1g016842m.g) derived from phytozome v7.0 (chr-ID sc affold00263; pos 133834 to 135654 reverse strand)
cctttgatattgtttatttggtaagtggaacacaaacatgacttctttcttcccctcgtctgattcattcggagatcccttaagggtcttccttacgaatacgtatattacctgctagactggatcgatcgttaatattatggaatgagtaaagaaaggatgattttgtcaaagtacattaaacattttacaagaaaaatcaactgaattgattgtttgagattcctggaagaaactaaaccatgttattatcaagatttgaatgctgatttcttatttaatgtataatggttacagaatgatgcacccatgtgggaagtagttgagcttgtctcgcagctgtgttctaatgaagctcaataagtgccacctcgatatattgctttgcttttcgctcagcttcattcaattagagttggttaattacacaaactcaacccatatgcccaactgggtctttgcattatttctatgactgtagttaggccaagttctgcaaatagtgcgccttcatattatttgaacaaaatagccaattcaagctgataagcttaatggagaaatgtcatatattgctctattttgtgttctttctttggatatttactggagtagttaagcctcccttttgtaatttgcatatggcctttaggcacaagggcttttgctttttatacattttctacaaaattcccaaatcacttaagatatccaaatctgtagaataattgttagactacaacacattattgcatacattaatggttataccttaggatgcatccatgcatagctgtatctcactgcaaaaagtttctatttagattgctgttattgtggccggcagcccaatttgtaatcttccaaactctataagataaatagataaatggaaacaaaaagaaataaaatgtctctactaatttactaactattaagttcatcttccctagggaaaatgatgtgaatgattgatactgttaaatctattttagtaatcttataccctatcaattttttggtacaagtcaacaaaattttcattagtccaatgggagaactctcgtattaatgggtataggaattttttttttaaagtctcaaaattttcattggatttttcaaattctacatttctctaaaaacgaaaaaaaaaaaatgcagaatacattggcaaagcaaaggagctaaaacctaggggtggaaccataccaaaccgcaccgaaatatgttggttcgattcaatttggtctcgcaagtgggaactgaatggttcaacaaatgtgaattgatcgatttttggttttgcataaaattagaaaaaaaaaagaaaaaatttcaatttatatatacaataatatttgttattattatttttgcataaaacatgaatgattagtgattataattgaattgaattaaaaaaatcacatacagaagagtacaaaaatttagttaatataaaagaaaaaatattacattaaattttatgaagtgaaccaaaacgagcttagaatccaaaccgaaataagattcggtttggttcctaagcttgattcgtattcgattcataattttttgaactgatctgatctactgtagtttggtttttggacaaaatcgaaccaaaccaatttatgctcacccctactaaaacctgttaatcctatatcataataaaagctgagtatattaattgtcctacacagagaaatgaaagcatcgccacatgaaccactgaaatgaataggttagaataatttcacttactgggtaattatatagatctaaatctatgcagcccctatgcaacagccaacg

SEQ ID NO: 9150 - DNA, 867 bp, Citrus sinensis
  Intron number 11 from transcript orange1.1g007401m (locus orange1.1g007401m.g) derived from phytozome v7.0 (chr-ID s caffold00793; pos 54331 to 55197)
agaggctcttttctgttataacgaggctcttcaaggtaagaaatttctgtttcacgattataaaacctgtgcaaagatttcatgactgaggaagtgataactctgattcttggattgaaggccaaagaaatttaagtaatttttaaggtcctatttacttctcttaaatagcttttgtagtcattttttcttttgaaaattgcgcagtttgtatttggatgaattatgaagaattgttataaatctatatgttttagtttacgagttcaagattaatttattccaattcaactgttttagtttctggcttaaatacactagtctttttctcttgattgaataatctacgtttttcctatgatctgtcgcttgggccttttatctgcagaacatatttttcaagtttacttcacagtatagttactttgaaatgatttctcagtattattgttagatattaattactatagttttttgggaattaactacccaaaagaccatattataatttttggtgcacattgtaagtattgttgaaccataatactactgcagaaaacttcctatacaagtcttctgttgtctgaagttattactttcttgactaaattctttaaagatataacctattggatttatatgtggtatttcacgatttatttctactatcttatatattatatcaaatcaatttgtacaaaataatttttatgagtttgtggtagtatcattacttttaagaacaaaatattcagtgaagaaagtattgcccatgaaagcagactcttcaagcattttttctttatctaatcataattttggaaaattttccaaaatttgtactctttgtatatgcagatttcaaac

SEQ ID NO: 9151 - DNA, 615 bp, Citrus sinensis
  Intron number 2 from transcript orange1.1g043106m (locus o range1.1g043106m.g) derived from phytozome v7.0 (chr-ID sc affold00005; pos 1709698 to 1710312 reverse strand)
cgcatttgcagaaggtactgctgacgctggccaatgtaagtgtacagaaaatgcatttggagaggtttataggggttactgctcatttgtagtattctgatatataataaatttaatagtattgataatgagtctattgcataacattttcaaaatgtaaaaacgcattgagaacaattataaatgtattagcaagttttttagatattcaaggttttagtttttacattgtactattatctaatatagctccctgtaaattatttctctggatgcaccactgatgctagatgttggaaaactatcagtcactcacattaagtttaccatgttagcaaaaataacatcaaattttgaatgtattcaattttctactctaagcttgcaatttgtatcaatcgtctaccaaaatcattggtcgattttgttttgaaacaaaaaagtttgttgggttttgatagttttactttttactattctttttatttgattttattatttatgatgcaaaataaaaatcccttgaattcaagagtgaaatagtaattgtactcagattttattaaatattctaatggtattaatattttgaggggcacgtgaaggaggctggcc

SEQ ID NO: 9152 - DNA, 1163 bp, Citrus sinensis
  Intron number 1 from transcript orange1.1g000088m (locus o range1.1g000090m.g) derived from phytozome v7.0 (chr-ID sc affold00001; pos 1969969 to 1971131 reverse strand)
tttacgattttgccatcaaaaccctagctttactggtatgtccaaaaaacctcaccttgagtatctgcaatagctcacttgaccctggaaattggagctatgcataaaccctaattttgatttatgttcagtttaggttgttttttggttatagattttgtgatttagtctttgaattcgtggttagcaagtcaaattctattgctgcagttcggaatttgtgtgattcactttgattattgtgctttttgtggacatggtgttgtttgttctgcttttgattgatttttctgtttcgctttggtttttaactgatcctggatttcggttcgtaattttaggagggaaaaaattcgaattttgaatattttttattgatttaggatttgtacttgcagatcaaagcgttttgattaatctgtttctgtttttctttctggctgatgattttgggcatgtatttgtaacttcttagtggttacatctttgaaatgctagcttttaattatttttcccatttgaaattctttttatttgaaattatagagtaagaatttattccaaatttttatatttatggcctcaccattttatttttgattggatatttcttgtagatgggcggcaactcctaattattggttatgttcaactcccattttagttagggcttgcaccctttacttggtgtgcattgttaatgctgctgctccaaacttttgggttgtgtcaattgaatggtgcaaagttccacaaatacctggttttgatgtgtctgcaatttagagttaacggttttgacctatcctccaaatatcctgtgaaattccatcttggatttagatttgacctatcctccgaatatccagtgaaattccatcttgaatttagatttgacctatcctccaaatattctgtgaaattacatcttggatttagaactattatgcagtatattatatcaatagggtgtatataagaacgtttttggtttcaatttgcaaatttggaatatgctctcttggttatttatgtaattgtctgtcgtttagttaagcttcccctgtttgactttttcttttaaaatatatgcacgtgcttaatacattgcaatacgctttttgacaggtcagatagcactttttgacggaagtctattgcat

SEQ ID NO: 9153 - DNA, 4080 bp, Citrus sinensis
  Intron number 1 from transcript orange1.1g021872m (locus o range1.1g021481m.g) derived from phytozome v7.0 (chr-ID sc affold00055; pos 475589 to 479668)
ctgtcacccagctcggtggccccgacagtaagtggtttctcttttttcttttttctttttttggttttttctggtttatgatgttcttttttttttttgaagtaaagattaaatttaccaacaaacacacacttcattctattttatatttgttttactagtttccctcctgtctatttctttatacagtgctttgttgatttaattatttatttaattaattcacgttgttaattaataaactgttatctcttgaatgattggatttatattaggtgggtggtcggttagcagttttgttcttcttccttatacaaattttacagatgcaatcattaaaaacttaaattgtttaaatttttttgggattttctatatatgatagtttcttgtactaattcttggtcctttatggaatattatggagtcttagaattcagcgattagggcaaaagggttcatgatagatgcagcatccatttgttgattcaattattgttaaagttgaattagaaaaaaatataaccatgggattgttactcttccctatttagtgggaaattaatttaacgccattacttgttgctctttgttctgtgaggatgatcacttaatttaattttttaaatccttttttacaaggtagaaaaatgtacgaccagggtaataatattgcaaagaactgctcttagaaatgcaattgatgttattgtcattatctttcttttgtggggtagtaacaaatgacctgccttgttgaacaacttggttcggttcgacatcaggactattgttcaatcctacggctttggtagttaggaaacttatgggatatagcatcccaaatatgtgcccccaagggattggacccctatatgttgactagaaaccgaacctctcaacaacctaacctggagtttaagtgccttttttgttcaaaaaatgtttttaagggaatgcacctaccattttatctccaaacacatttgtctatttgagccaaatgctaaaagacaaatataaaagcacttaatcatttgaaaggacctttgaaaatattaaaagcattatctaatccactaaaagctgaattagttccctaatccactatgagcattgcctaatcactttggtgttttgcgctttctattcttcgaatttaggtgttatttaattattcatggactcttgagttcattgtgtgattatgttgtactttgacctcggaaaaaatatggccaacgggacaaataattatttggaaccatatagttcaataatgtttgcgggcgtggtttagctgtaggacaaggcagagggatcatggcattttgtcttggtctgcgtaagaatatgctgttattcctggtggatttggagaaaaaatctgtttcatcttctgcatgaaatatttttttgtggatctgcaagctttatgtttgaaatttatgtctagcttctaaatttggaataggaggacaaatgttgcaagctttcagtttcactgtttatttatttattattcctcaaagctttaatatgacgtaatataatttaattctttgaaattgctatcttaagtagtctgaaactccatgaccttgttggatgattgtccctgatgcggctgcatataatttaatggtgaatctgtgaaactttgttgagtgaaaatttgtcgaaacaccgagcgaatttgggtaacctaactttgcactaagctatcatcagcatcattgttagcaattgttcactgacacgatccatagaaaccatcattgctaccatgagcttaaacagtcaatggtaaggaattttcaagctttccaaacttaacttatcatctttagaaatgacacacaaggatagtggaataagggactgaaagatgggaagcaagaaatggtaagttggagttgccaatggtggtggataagagatacatgtgaatttttgtccctttattttgtctatctagatgataaaggacagtccctgtaaagttacagtacacaggggttattcttcgattgatgtttacctcccaagcttattggaaatctacttaagcagtaataaatgcaatttgcttcagcgaataacgtcaaaaaatctttgatcacatccttgttatttggaggatattgtcattttgaccaactgtgaagaaaataaagatgtataatgtggtgtctacttactaggcctgctgttatttagagggaattgcttcagaaactttaattttatacaagcataaagaccatgggagtttgctgaaataaaggaaagtttctctagttattcttagtgtggtgacacttccgtgtctagatcctgtcaaaaggcatggtaatagctgaatggttttaggcttatttacacaagtttcagagcttactgatccagaaaggagttgtttggatatgacacctgacttttttttggttgttgccaagggaagttaacctaaggggtatttaatgttgatggaatggtaataatgatcaattatgatgtgagtatttgattttcaaggctgcttttatgaggtccgcataaagcaccttcctaaatatgacgtagtgaattatatgttcttaagattggatgactggaaaatttaattaatatttgctaacttttgctgaatgttgtgtcaaatgatgaattgacaagatcttctaagtaagcattaataacttgtctcaagatcctctgccttctgtcaacctattgtagtgctggaagtcactgttcaatttacctagtaatcaattgtttcacaagttaggtgaagtgatagtcagttcccaattttatgagaagcccacaaaatatgatgcgctatccgcctcttctacttattgccctctgtcaacccattgtcgtgccggaagtcattgttcaatttacctagtaatcaactgttaggtgaaatgatagtcggttcccaagtttacgagaagcctctacatatggtgcgctatctgcgcccttctaattataggcgctatctgcgcccttctaattatagattgtaggcaatcaaatagattggtcgaagcactatttgaatgcaaatggacaaagatgttaatggatttcaaacgaatatcttgtatgaaatggcagctgtgaatagaaaggttctgacttttctattcatagaaaagcatgccctcagctttcaacataattgatgcactccttatagccttaatactttcaagtattactagggcattttcaattggaagcataaagctgtaccagaaaattctctataaaagttaatgatgctgcttgagattggatgtaccactggactctttgtagttcacttctcatgctacaggtacctgtatttcatgggtatgaaatggggacatttcatcagaagcataagaggggtctcaacaagaagcataatgtatggtgccacgtcggaaataagggtacaattagttgtttttataggtagtgctgattttgtcttctttgtttgcgaccaaatgcagtttgtaatttgtcatgaacatgaacagtgcccgagccttaggtggaattgctggagttatttctagaataatgcatgttaagtcaaatagaacttctccgttgtatgcttttctgttgttgacattttcatgttgtgaagccccatgctcatagatctcatttgaaatagtaatgcaaagagaaaaaaagaagtctttctatagattttgcgacggattagtgacatctaaagtacaaggtgtgcatgtttgacttgtcaaagcaaagcagccaaaatataccttctgaggcacctccaatgagcatgctcatgcttaggcctaacatggatgatgcgcctgaaagcaagaggcaaatctgtgcatggccttaagaaaacattgtaatctcatagttaattcaagaggagttgtattccagttgtgtttacccaagtattgcatattcaatggaattggtttttcttatactagagatcaaataattatttgacattaatctttttctttctcctcattcttttggatttgtgtctcagaagcaacacccaagactatc

SEQ ID NO: 9154 - DNA, 2036 bp, Citrus sinensis
  Intron number 1 from transcript orange1.1g005806m (locus o range1.1g001479m.g) derived from phytozome v7.0 (chr-ID sc affold00370; pos 30965 to 33000 reverse strand)
ttttttttgctcaaatttcttgctgtggatttgaggtatgctttgcttttttgttcaaaccaagcccattttggaatttcctttcttttttttttttaatttttgtagctggttttgcttttgcttttgtttctgaacttttctgtgcttgaatcttaggttaatgcgatgctagatggttgatttaatctgggtttttttctttattttttttcccttgactgaagtggtaaatgggttgtctggtgaattgttagctttgtagaataatgctgcattttctgggttttgtttcgggcacttttgtgagtgattatgtggaaatgggagttttttttccctgctttaaagatggtggcttggtctctggctcttgtatctctgttgggtatgttcaatgggtctctttttgtaagtatcgttgccttttgctttctttgaactggatttaagttttgattcataaaaatgtagatgtttctcggtggaaaaattgttatatctgatttttttttttaaagagcttagagatacattttgcaaagggatttaggagttactaatttagggaattaaattttaggctccaaagcgtggtctactccacaaataagctctttatgcaattacaagggcttctggtagtggagtttgctgctgggaaattcttggtgtcctaagagaatttgtaaagtgtgtgtgagagagacagtttgtaaaggagggtgttttctctgaaatgtggaacacaaggatgggagaagcttccgaatgttataacgttgcttatttggcataaatggtggtgtcgtgacaaatcatgaaagtatctgaatgtgtttttatttattcttgagtaaaagtggctgttttatgcatgactctgcatggatatctagaattgggtcagtaaaaggcttttaaaagtatgctgtcttggctttagatcttggtgagaatttggattttaaatttgtgaatgtgtataatgtatcaagtttgagattgaatcccattagcactggatgatatttgtggagagtgtttttgggtctagaatcttctatttatgtgctagggtgtatagtggtaaggatgcgagattaaatattatcggatgtggatgataagagttttagggcccagagtattctatctacagccaggacggctttgttgagatcattggaattgtgattctcctcatgctctccttttggcaagtataggtctttctaggatgtttgtagacacttagtcctgtaggcatttgtgttttagaagttttaatttttcttttggtgtagcttggagtgcttataatgtgttagatttgaccacgttaaaacatttgtttgatttgtttttttatcaatcagatgtttggatatatatttgttgtaattgatattctgcataagtagttctggaggagctcttcaatgcttattgtgagaacctgggcttatgctaagactggaaaaattttctttatggactttgatttttagtcatgctccaggtcgtagtctttgaaatggaggtctttgcttaatttcagatactacgttatattgatgtgaacaaacagggaggcttatctctactgattctatttgatataagcaaacaattgattttctggactcaataacgctgagtgctacctttattgcttttttgttgaaatctttaccctggaagaatttataaaaatgtcatagtgacttttttcttctttctgatgtacttgaaatctggaagtaggtatttttgcttcaattctcattttgtagggtggattgttactgtagacgcttcaagattacaaactaaaatagacctcttatttatttatttacttatttttatacaccgcagagaagcacatacatctggttgtgcactttataaaaagaatgaatgatgtttgtttttctataaagaatgaatgatgtctgcttcgctattctgattgctaactttgcaagtttgaatcagaaaacttgtaaggattgcaccaccaggtattgatt

SEQ ID NO: 9155 - DNA, 2491 bp, Citrus sinensis
  Intron number 1 from transcript orange1.1g020494m (locus o range1.1g016105m.g) derived from phytozome v7.0 (chr-ID sc affold00031; pos 205440 to 207930 reverse strand)
aggtatagatatattactggatttatactagattgataaggatgcgttcatggtttatgcctgattttctaattaggttgcgcatgctgtggcccgacatgcagccgaggggattacaaagaatctgtggtttgccattttacagctgattctgtatcaattcgttatgcctgatgttgtcaacacaatgtcaacgcttttcttgaggcttcctttctctcgcaagtgtgtttctttgtttattctctcgaacagtttttggaatttgtgggcatgtttgcttgtttttgtgatatgatgatgtttaaaaattacaattaggcttgcgctgtctattgattaacgctgtcaatcttgttgagaaaatggctgtataggaacctagtggattagcatgacacattctttttaccagtattttttattctttttgtttcacttatgtctggcggcaatgaatatgcgtcagcattcatccagtgctcttattaccacttacccaaaaacccaaaaaagataaaaaagattacccaaaaaaaaaggttttagaacttctgatgcgataacattatgataggaatttctcacatctcaactgtcatttggcatattatcttacctgatctggggaaaaccttctgtcttaattagcttatggatgatttgcatcagaagaagggttcttccagggagtatcccttttttttcatggggatttttatggttctgtctatagaaaggagtaaaatgtttttaaggagtagaagtgcatccttagactgctgcgggaagaattagttctcttgtagctttttgatgcttgggattctacagtttatagaacaaggatctaacaatgatttacagtaatagtatgcaaatatgtttagataactgttaaccttggctgtgtcaaattcttcctctagtctatttctaatatctcacacaaatattaagtagaactggactgtaagacttctgtgagtctcatactggaatttactgcttcttttgtcattttcctgaagcttgttgtgaacatttatcacggtgttctgctctgtaacagtcatctgtttatgttccatttgtaggtttggattgtgattcttatatttatttaagtaccatttggagctgaaagcttgccaggtcataaacactaaaaactggaagagtttttgataatttaccctcggccatgattataaaaagaagaagctattaaactgttgtgagtggtcaacataggacccttctgaaatgtccttgaaactattcaagaaacatattgctgaaacaaagttttcatagcttgagtaaaacttgacttcaaccaagctgatccttggtaagattatcaagttgcatagagttcaaaaaacttgctcttgaactcaagactaggacgtaacctttttctctaatttttctagaaaaagttattgtgatatatatatatatatataaaggcatacgatgttatgcatacgaccactacactacactaaagctcctgggtgaatactctggaggtctgagtttgttcccaaaaagtaaatgagtttaacattgagttcaagctaggttcctctgttaggtgaattgatcagaatcaaaatcttgtcgagcttgaacacaaatagttgagagcttggtttatttatatcccaattttgtttgtagttgatcaatcccattaatagtaaatccatagccctaagagacttcctctagtataccaacatttagttgagagtaaaacaggcaatcttccagttcttaagtactcgccttaagtactctgcctagtcttgcttttttattctctgggtgaaatataattttcttcaactcattatcttgctgggagtcattgattcactcgatctgctttgagcactcattcagtccgctgaaccttatgtacttgtttgcctgtaaaaccttagagtagtcgtctgacattgtgctctatgctgtccagtaggtctaatttagttgcactcattttgtaagatctatttctggatggagcactgatatttgaaccccatcaagacaaaaaaggggatactgttcatactatagtatcactatagcacatagaatggtagcactgttcaaacaacagttccatcatttctgtcatgatagtgttttgttggtggccaatatcatttttcattctggatgaggaacatccctctgttcaaacaaattctgcaaatgttaattttttaattccctttttttatgaagatgcttttgagatggtttcttgtcattctattgaacatttatctctattactctacatcctcttactttagttttgtgactttactcaactttgtgatgtacttacttacattgttgaaactgactagtttgtgttcaacacacagaccaagatggcaagatgcatttgaagatcttttgtcttgcaagtgctgactcagtattatctactgtcttatctgatagg

SEQ ID NO: 9156 - DNA, 899 bp, Citrus sinensis
  Intron number 14 from transcript orange1.1g006326m (locus orange1.1g006301m.g) derived from phytozome v7.0 (chr-ID s caffold00089; pos 492898 to 493796 reverse strand)
aggtaactaacattaaaaatttggatccactactgatctgatttgaatttttctgattttttaaaattatatcactcatgaggacagagccaatgcaaggcaagtggggcaaatgctcttactagatttcaaaatcctcaaatttaagttaatgctttaagctattgaccccacgaatctaaatgatttgagtgtttgtttagctaccataattgcttatttaattttataatttttttaaaattttattattattatttttcagtagagtttttaaaaattaaataacttgttttacctctcttaacaaaagtttaaattttgagaatatatttctttacttacttgacaattttatttcataatataatttaaaaaacttacttgttaaagtaattttacaattttttaaaaattcttattaagaaccaaacaattaattttttttattaaacttttattttttaaagttctatttcaataaactctatttaaagaactataacaaacagaacgtaaatctttactcccatatatgagtcaaagttagcggcacatttctatctactagtacccaaaaaataatcaaattatttatttcacctccttaaaagattaccctttgaaagctttttgtatctaacaatctgacgaaagaagaaaaaaacgaatcatatggatctacttttcttgaaatttgcctcatctaagttaaatttctgactccttcactagtcacgttaattaagagttaattttatacatatttattattcaataactatcaataatgtaactttacaaaaaaaaaaaaaaaaaatcaacagttgattcaaattcttgagttataatccttgaacgtaggttgggctattgggagagaaattacaaatatacaa

SEQ ID NO: 9157 - DNA, 647 bp, Citrus sinensis
  Intron number 4 from transcript orange1.1g047617m (locus o range1.1g047617m.g) derived from phytozome v7.0 (chr-ID sc affold00023; pos 5266 to 5912)
cttctcccgtgggcaattatcacaaggtgctcgtaaatacattattatcttctttctttttcttttttttttctatccgaaaagtttaatttctgttgagaactaacaaaagatttgatgtcttgaaatttagatttgagttaagacattcactaaatctaaaatttgatgccatctctgttcttgaatgaagctgtcatcggttcatccttaccaaaatttatgtttattatttggcttgataaattttaatattgaatttcatcatttggtgttaaaataatagcgtagcaaaaaaaagaaaaaaaagatagatataacattttcatatataaatttgactatctgagacatctacgtatccaaattaattaatttatttgttaaaatgtcactttttattgttcaatattgtgtttttaattatttgaagtgtaatgataaaaacaagattatgttaacaatgcatcaggacccaaggggtaaaaataatttataataaggaccaaactatcattctctgatattgataataacaagaacaaaaacaagaaacttcaaaaaaaaaaaatcataatgatcagtttgtttggaacggacttatctatgtagggtgccttaaatttggtggtggaggaaaagtttcg

SEQ ID NO: 9158 - DNA, 1352 bp, Citrus sinensis
  Intron number 1 from transcript orange1.1g034930m (locus o range1.1g034944m.g) derived from phytozome v7.0 (chr-ID sc affold00025; pos 1058977 to 1060328 reverse strand)
tggtcaggttagtcaatgtgggaagcaaaaatcaagattaacactatacttcctcaaattaactgtactgttttaaaaaatagttaaattgtgtattctatattgttgaaaagataaatttgccaagtttctgtggaatcttacgaagtcaaattcagatttcttttcttaaagatattcaagattttgccaacaaaggttataaccatcagaaattctgcacaaggctgaaagttttgaatttactggcatcaatgcttcaagaattgattaacaagcgtcatatcactggaaagttcagtgagtccggagtttaatggattttagaatgttcgatttgaagttttctacatcaaaatgtgattgaatgagtgttaaactactcagatttgttgttgaaaccaaatttgaagtcaaattgtgttttgttttgttctctttcatctcattacaactaagatctttaattttaatttgatttaagttctaaaatgaaagagatcatgtcctaagcttcgagggatgttctaagttgtttatgtaaaggtaataggcagtgattttagaataatgtgtgtgattttgagagtgtaacttagaagaatggtcttgtttaaagttccttctttaaactctatattttttaggtggatttcttatagtggcgggttaggaagcgatgtatatcttgtaggactccctagatggtgaattctctgtatccctttgtaatcctctagagtggtgagtttttgtttaatccaatgtcattacgcccttgtgttgatgattatactgatactagaatctatgcctaatcgctaatttcggctctatcctatctaatcgaagcaatcgtctttgtccgttgagcctctcttctcctattgtactttagttagaacaagttttttgggtaaaattgttgtacacaattatagaaatgcagacagttttgatgttaaaggcttggtcatgatacagttgtgatgtcaaagttatgtttcaaatgatctaatgaatgaaaatactattctgtttatttctccccttctttttctgttccacgctattctactctccctgagttggttctgctctcaacctctttctggcctctgaagacaattgaggataagctacatatgaatttaatgaatgcatagaccatatattatcttctaggatattgtagtttacttctactacctccaatatgcatgccatttttatcattgcttcactgctcttagttttagttttaacttgtaaaagtttgatgtcatgatagtccatttcagtttcttatttattacatattatgtcagtgttaaaggatttactgaagtggc

SEQ ID NO: 9159 - DNA, 758 bp, Citrus sinensis
  Intron number 1 from transcript orange1.1g020060m (locus o range1.1g020060m.g) derived from phytozome v7.0 (chr-ID sc affold00034; pos 899046 to 899803)
tctcgctctcagactcctcggttccgtccctcccggtaccttttccactttctcttcatacccttttcgatttttctcttatttttttggtcatccttgcgtttgttcttctgtgtcctttacataaaatgaacttaagactatgattattagagcttagtgcaatgcaagttatttgtttgattagaatttgtaattttctgttgattcttatacattttaacaatttatttgtttgatcagaattttgtaattttctgttgattcttatacattttagctgtaaaaacagtgtccgtagactatgattgagttgctaaggcttcgaatccgcatttctgtagtgtagaattagcagctgcagctggcaagtgtaatgagtgggtgattggtaaaaattagctgccaaaagtgggcgtttaccaaacatgttagctaccatgccttcaaatttgagtagaagcacaatcattacaaacatgcccttagtggaattgtcgtaatttatattattttccagacaattgtacttggtggtctaatttttgttttcgtaggttcaatctatattctttgggtcccaagcaactatttatgtgtggctactttagctgcaaatttcatctttgaggatatcatgtcacatttagtaacaaaaattcatttttgtgaagttttctttttctggtgctcatgtgattgctactgcggatttgtgtacagagcaaaggaagtcacctacacaacgggcgacatat

SEQ ID NO: 9160 - DNA, 1126 bp, Citrus sinensis
  Intron number 6 from transcript orange1.1g014406m (locus o range1.1g014406m.g) derived from phytozome v7.0 (chr-ID sc affold00006; pos 978801 to 979926)
atcagcttgtcaaaattgccaaggtaacgacaattctggatttttcaaattgatttaaaacttataggcgtaagggtcacttgttcatggctgtgaaataatatagaccttcatcatttttatcttttatattgatgttaataccttaaaaactatttataatcatgtattcgtgttgtgagtagcaaatcattttctggtgctaattttttttttcttttgtttgttttgattatgttcatttggggaaaagaggcaaatcatacaaattttggtatttttcaaccaattctgcatactgatgcaattcataattgtaactccatcatgtgaatttatttaatcttttttcttttttttacatcaactcaaaatccctatgcattcagtcttggactaattccattatcactctttacaatgcttttgatatgatctatcaaatggttaattgtcatgttttgcatctagattaattatctaattttagtacaaatttgtggtagattcaagtctggattgcttcaaatactgtaaacattttaaatatattgaagtacatgattcttgttttcaagaatgagacagatgtgagatgtgaactacaagaatgatgaccctgagcaaaaacaacagatatattaatatataacatgcattgatcacaagcaggatttctactaaagtttgattgctataaaagaacaagctcttaaagcttgacaggttctaatgatgttttggagatttactcctttaaaactcagctcttccaaggatattgcaagacattctgaattagcatgctgagatattaggcacccaagttactgcctagtactgcgggtattaattctgttattgcctatttggtttgggagccccaaatcccgatgccaacagtcgagtgagtactggcttgatgacagttatcagaatctattgctgtctcattatgttctaaattcacaaaagctgctcactcatcactttgactgtaggcatccatattgctcatgcatttcaaaggttcataattggtttgtgcgttgaagtttgactagtaaatttgatgccacaggactgctgtttgattatttggtgtaattccaggtactgggaactg

SEQ ID NO: 9161 - DNA, 2475 bp, Citrus sinensis
  Intron number 1 from transcript orange1.1g043512m (locus o range1.1g043512m.g) derived from phytozome v7.0 (chr-ID sc affold00089; pos 172184 to 174658)
caggagcttgtcactgtaagtttacggggtaacttttgctctttctttcttatgtttttgcagaaaaactattactacttttgttttttagaaatgaaattagctgttagctagatcttggaaattgtaagatattggagcttaatactattctataacatggtatcagagccaggttgaccaagaggtgatgagttgaatttaatttgttagtgttcaagctttaacttataggtcaagtggtaatttagcatagaattgataggagttgtcttttgagagagtggattggttataatagctgacgatgaggataactatgattgcttttggtaccgtctgcaaggcattgaatcattaaagatggtatttttttccagatagggaacttttctattgacgatgaagaatcattacaggatttggatcaggtgtccattaagaaagcaaaacaataaaaacttttctgtcctattcaaaagtatatccaatcactccactacaagactagaccagcctagacacctatctcaaaacccccacctgccttagataaatgaagaaaaaagatgaatctttgaactgcttagaacctggagcccaaagtgaagctgaagacggactctatcccacaattcttcgatattatccgcatttttcccttcaaaatacgtatttctttcttgccatgtttcccaaaacagagctgccccagtacaatcccaaagagttttggtctttttttcttttacgaaaagcaaagaaattctccattagaatagagtcataagaactcgggattacccgaaaagtattagcctctttgtacaacctattctacaacttagaggcgactatgaagagaaagatgattataagtttctgcacttgctttgtacattacacaccaaaaaggaaatagacacatgttagggaattttctttcaatcacttctccagtatttaatttcccttgaattttagggggaatactagtcttccagattgttttggaaagtaaaaaataagccaaggagacatcgtcaatcaccaagcaagataagatttgcaagagtgatgtcctgatgtctctaaactctatgttcctttgtctttctttatttccttcacatcaaaattgtctaacaacttcaacagagaagcataatcatgaatctctcgatcatatttggtagtttagagaggtataatctaaaacgtgatagctgaattactgagtgttgaagtcacagaagaaaagggtaacatatggggctgcgaggccttaaaacaacttgggtggtatagtgaagtcagatttgaatttactttaagtgttcttagtcagcaagaaaaagttaaatcaaccttgtcaaatgttatcagattgcagtggaattttcataccacgtgaatctatatctccttctaaccatgaagggcctttgcgttgcaaccaatagtattaagactggaatatatgtattatttgagtctgtaagtgacataaatggctgattatatgtcacatccagggcttgaagcatggatggagataacaaacttatcattggtttaatttacacctagtaagctatatatatatatatatatatatattcaaatcccagaatagttagctttctctagtcttattttgaggttacagaatgatgtggcatggataattattttgagtacatgtgcccgtctggactctccactgtaatatgctttgcatgccaaaaatatgatatggggtctattattgatatgtgggaagctttggacgcaacatcttggacacttctgactgtgtgtagtattctccatcaccagtaatttgttttggagatgtctttccacatttgcgtagagaacttgaaaggaactgatgcacaacaggttggaaatgctttaatgctttgtatttgagcgaactactttgtctaaattaaacatcaagtgaattttctgtccagccttggtaaagtccccaagctgctgtaccttgaactttgaatcaattgcctcattgggaagttaaggtaaatttcctctgatgtaagctctagcctctttggataaacaaatactactggtctccgtacatgcttatcttgtttcattgtagcttttttcatgccttaagttcgagcggaggctgccttgcacgtttatttgtctgagtgcaattgctatttctgcttgactgatctgtagctttgctaaacctctaattttctggtaattcttgtgtgctggaaatgatattgaaaataactatcatgcactaatgtctataaagtagaaattttaagaataaatttgaaattggttgaaacattcttaatgtttcatttcattgtgtcttctagttcagttaaatatctgatacttttttaaatttgtcaaattcaatttcttttggcatgtgcagattatcactagaatcaattacggccaaagtctcag

SEQ ID NO: 9162 - DNA, 1771 bp, Citrus sinensis
  Intron number 2 from transcript orange1.1g031407m (locus o range1.1g031407m.g) derived from phytozome v7.0 (chr-ID sc affold00468; pos 20932 to 22702 reverse strand)
aaccattttttctaacagaattggcatctggggtgagtgagattttgatttctgatattccatattaatttgagttctttagctgtgtctttttaatgcgactacagcaaaaatacggttaatattcaccaaagaagatatctataacaaattgttgagatattggcacattagtcatgattgaatttatctagttgtcacttcctgttgaaaggttgatatgtccttagtttgaacatgtgcttggagataactatgtgtgtgattcgcatggcatgataagatcttaggatgtggaaactttcctgtagaaatggagggttcaagggatgttttatatccagtaacgtgtctcctaactacctatcccccaacaagaaaaataaatcgataagttaacttgtacttagaagaaagaaaaaagttgcattgaacttattgtgggaattgtttgataactagttgggaactttaagttttagatggtgtttttcttgtatactttggcgtttacatggggttgttcctcaaagttagtgatttctttgcttatatatacttctctgtataaagaatttgtcaaagaaacaaataatactaacgtttccttgaaatggacaaaataaataaagccccgcttgacaaaaagaagtcataaacaataaaagatacgtagaatgtgaacaaatgtagagtgacaaaacaagaaggatggttatcctgattggatttcttttttttttttttttattgagttatccctctgtttacctctcattctcaccagtttcgttttgctaatgtgtagacaaatgtgaagtggctttccaaacaaccagttaaaatttatcactaccaaactatttactaagtgttattacctagtgtcaacttcactaatttgatattcatcatacttaacttctatgagcgatgttaatatagagtaaaattataatcctctactttgtgttcaaaccattttgttggtgacattattacgagtagacaatttaatctctgaaaactgatggctggtttgtgtcttaatcagacattaaggttgtctagttgaatacattcgggattggccttctagcatagattaatgtagttgttcaggattgcacctctctggtaagtttttcaaatattagaagtaatggatggaggtctataaagcttatagctgtgatgacaatgctgatatcctattgattgaggattgaggattgaggaaatgctctggagataccaaatatttgatctaggtacaagtagttcaacttctttgaaagtagctttctgtatagctgagtatgactgtaaaatagtgttgttctaaaaccctgcttctttatggatgacctaatttattttcaagtgtgtttctgttcaaattctggaatttaataacttggtgtcatgttggagcttcggacgcatgcacaagcatattgtttataccaaaaactataatattctgcagagtttttttttttaatattcattcagttttctgtacttattctgcctgttctattctgtctatgctttatatttttgctgccaaagtcctggcatttatcttgtttctgctttatttatttattatatttggttattgccagatttcctgtatttgacatagaaatttaccctgccacttaaacaagaccttcaaatcctcaaaagcaaagactgatcattggttgaatttgtgcatgtttgtgcaggctcatcagacttgtaaattttctgtagaagcgat

SEQ ID NO: 9163 - DNA, 2312 bp, Citrus sinensis
  Intron number 1 from transcript orange1.1g039833m (locus o range1.1g039833m.g) derived from phytozome v7.0 (chr-ID sc affold00168; pos 33785 to 36096)
tctgcctttccaccatcatatcatcactaactacggtacgcctcgctactaatttgtcataaaactttacttgtaagtatatttgttttgaaaattctctaattgagcagttgagcctgcctagttagagaacatgattttgttttagtttttcttttgtctttttttagtccaaattactttttatcttaatacctccccagcatcaattcaaactcagatgttcaactaaataaaactcagatagtcaattaaataaaactacttgaaaatcacgcgaccaattgacttttaaattgcttgaaaattagtttattatgattttattattcttattatatgtcgtcctgtcttcatggttcagttttaatttaatcactggttaagattacgattcaaatgttcaaaagtcacttattttataaattttgataaaaatgagagttgatgaaatttttaaaaactattaattttgtaatttttttacttggacaactacttttgtgggcagatatagaattacttttcaaaagtaacttattaaaaaaactactatacacttaaagttcctataataacctaattattttaacaaaaaaaaataattatatcacatttttactttaactctatgataaaaatcatagctatgaagtatcacattaccgaaactacagagtactttttataaagcagcaggtcaattgtggaataaagcatcactttttaataaaacaataggtctcgtaataaagccattttttttataaaatatcttaaagtggaacttatcaatactctcgcattaagatttaataatctgttataaaattatttatacacacatgacataaagaataatgaaaatttgataaaagaaatttaaaatacaaaaaaggtcctttgtttcatcatgacaagattggacaataatgtaaaatattggatgagactatatgaacaaaaaaaattactcattaaacccattttctttataacgtattgttaaaatttaaacattaattttctactgcatccttatgaaattcaaaaataaccttaactataaattattatggattaatttctccactttttacactcattattaacttctccattaattctaccgttctcaattgttatgagcaaaggaggttaagaactatgcagtaccctttgtagaaacattggggaatatcaatggagtaggggaatataacacaatcattgatgttctttattttaagttcaagaacaaattgagatcacaatgataagtcaaagacctatggcagtatagattgttagtgacccactaacaatagttgccttgtcttggagttgccttttggagaaacaacgtaacagaatggtgtgaactttcttttgtggcccagtggcgctgggccctctttaaaacgttgattctgtcaaatgtaacaataaaatttgcttgtagcgtttatgttttggctttgttaaattgtgaaatcgttctaaaattacattcgggaaatttagaatatataaagaagaaagtagaaaatatattacatagataattgaggagagcatatgtagtgtattagggttatggttcatcataaaatggatgtataaagtagcttttgtttgtttttctaattaaatgtaattttgatcaagggcagtttggtaataaaatttttaattagataagttaaaaaaagtaaatttacgggttcaatagcctcactcgtttatttttgtgtcttaaaattaaaaaccaaaaatgcccacaaggcgaaacgagaaactttcactcaactagagggtatttgagatttttcataaattttcatttgtcactgtcattataattttctgttaaagtaacatttttccccgccaaatccatttttacgaaattactttttaagaaattgttgatggggtgctgatgtgttcaacatattgtaagcttggtttattactttgtacttgaattgaagatatattataagagtaaaaaaaaaaaaaacaaagtacttaaatcttgtggttatttttagtgggtgttattgcgtgattctaaatgatctttgtaatcttctttcctatttatagtgaagctttgcagtggccgaaacggacgtagctctcacattcgaagtggactactataaatatgtgacctatagtgttttcttaacttttattctctaatggcgctctatactctatagcaaacgactgggattctatcatccatccataacatttatggctaacagcatgtactcctaaattacaggtaagaattctttcat

SEQ ID NO: 9164 - DNA, 2967 bp, Citrus sinensis
  Intron number 2 from transcript orange1.1g010575m (locus o range1.1g010575m.g) derived from phytozome v7.0 (chr-ID sc affold00123; pos 364317 to 367283 reverse strand)
gcagttcaacaaaccaggtaatgcacctaacaattgcattatcttattttctttcccaaaaaaaaaaaaaaaaaaaaggtatcatttatgtagacgaattactagccacttttctgtatgatttgttctttttttttttcttttggtagcagaatgcttgctgtagctaaatagttgttccttcttttctaagtttgtgtatttagagatattcttaggcaacttcttgataatcattctatgtataaaaagttatagtctatattgcaagtgcatgataagcagtttcttcggtcactttcagctttcttttgacttatagtaaattttgatatcgttcactgcatatccatgtgattcgaccaatttacagggaacaaggtgccttttttctgtatttcataaattgagatctcattgacatgctaccaagctaattaaaatatttaaattgctatatgaagatacaatattgcatctacttacatttgaatcctcatgcccaaggtgaacgctttttaccctcgttgcaaaatttagagaacatattgtctcacacaaatcgtcttccttggggctgacatggacaagcatcagtgtctttgagtcctcacctggaaaagaaaaatggccagatataacctacataatatgaataattaattggatcatatgtcttcactcttatgaaaagacattcactgggacttccataatctttagaaaccatgaggagatgattttgttttagtttggtttaaaagcatttgattagtggtaccacttgatcggtacaaatagacctctggaactctgtgttttggttggtacaacctaaagtaggggaagtatatatatatattttttttcatttttgctatgttatttgatgtgtatcttagaaataacagaatatgggaaaaaaaagaataaaattacctagggaatctttaagtacttgcgtcaacttgctattcctgtcaaaagaaagaaattgttagctaggtttctgtctatgaccatgttgcaatctaatgaatttagagattgtctgcttcttctggaagtattggagactgaaatctcgaacttcactcaattcagattcttaagttctaattccttgttacaaacaaagggttagcttagtttgaggagtcttttgttgtattatgcagaaaattactaatcagtattagcactgcaatgaaaaaatctaatgcagctcattcgattcttgaatggaggatagggctctttatacaactgaattccaaaaatgatctatgcagctgagttcatgttgttgggatgggctgtgttgagttgagtttcctatttacctgtaaggtacatggcgctttctcctttgaagggcgtaaatgacatctccaagagcagaaagtgacaaattaatggcttttccttcatcaagccttctcccccgtgcttttgtcttcagcacacgctcacttcctcctaggtcgactaaccaaattttgtttttttcccgtcgcctctcaggagcatcaaagcaggttattgatatgcgaatcatgctgttagaagtattgaaaagggaggcatacttagaacgtaatagataatgttgccaatattaagcagtttctaaaaatttgcatttgatattgcaaatattaagcagttgccaaaattggcagtcagatattgaagtgttttatgattcctaatgagtctcaagcttcacttagctctctggtaacctaattccacaaacgatttgaaaaattcttagaagtaattaccagtgagatctgctagaagtcctgtttgaatttgtagaggcagttgatctgaaccggcaacctaatctatacagcctcaaagcttggttgaagtcattcacttggatggtcactaggttgtcaatttcaatccctccctttggttctgtatgaatggaaaggctgcaaatacagtggattatgttagttggaaaggtattcttgttgcatataggaaaacaaaagtccaactcatttcaagatttttcaaaatagtggatatttttcagttgaaatcagagaaaagatgtactcctactgatctttctggtaaaatggtggatgaacattagttgaattactgtgaacatccagtagaggggaaaattaggctcttcatgaagttgacaaaaaaatgatagggtttgagcattgacctttacaatgctgtgacaaaattaaggatcttgaagttgacaagaacatcttaatgaaaacaactagcatcgtacaaaaagcagacttaccaaggtggcaaaggatcagttgcttttgttggctgagtaacaagcaggtctttcaaacttcccaagtaaatttcaagcatactgaaactgatgcgaaatgcatgattgctttccattgcttgcttaaatattgcttcaattgctcggggcactatgccaggggaatctggagtaccttcctataaattatcagtggagagaggtagactaagaaaagttacattgattctcttgattttggtagagatatacgtgttcactccagataggatttgattcacttagtttatgaatgactataaatagtgtggccagttagttcttatttgcagtgcaagtgattactcatttggataatttcttaattaaagatagattagctaagcagctgattatttggtacgtcacttaattacacctagagcttttcatgttacttgatgcggttcccatatcgtaaggtccttaccattgtgaaactttttcctgtgcctgtctgcccatatgcaaaaatgcatgcattgtagccatccaggacagatttgatgactggttcaacttctgaaaagacttcatctgaaaaattacaaccataaaactcatttcataacttataaccgtataattcaagttggtggctcataatacgtctgctttttatttcagggctatac

SEQ ID NO: 9165 - DNA, 569 bp, Citrus sinensis
  Intron number 5 from transcript orange1.1g036227m (locus o range1.1g036227m.g) derived from phytozome v7.0 (chr-ID sc affold00571; pos 63631 to 64199)
ctggtggaagaggtattcgttcacccactcctaatgtaagtgtctatgaccgtgaatttcagattcttggctcaaattatgattgaacattcaattttgtagtgtatgcatacattgtatttgccaagaaactatgtgaatacaagactctagtgctgcagataaatatagtagttgacgcgaaaatgattttagatgacaataaaaagtattacatcaatattcaagtttgccgatgttgtacaacaacaaattattttcagtcaatgttagttatcatggatgtctcttgatgttgtacagtctggaagtatttgtagttaatatcagtgatcatgaatctctctttctctttacatgaattctgtactctttatactttgttttttatttattatgatactcatgacattggagcatgggccattagagtattagttttaaagatttaatttatttactagaaccttcatgcttggggattgatgttgtggatgtgaaagttcttactatgagaaacattataaagcacagatcagagctacagcccaaaagcagatcaaggtgac

SEQ ID NO: 9166 - DNA, 690 bp, Citrus sinensis
  Intron number 2 from transcript orange1.1g000802m (locus o range1.1g000802m.g) derived from phytozome v7.0 (chr-ID sc affold01153; pos 23765 to 24454 reverse strand)
ggtaatcattcttattctctattattaattctttttttgttttggttttgcattattagtaactacgaaacaaattttaatattcatgattcaacactgttttcaattacaatagtaatactgttaatgaattaatatttgcaaacgaagattatataatatgttctgatgctttgtgctctattaatcagatttaaaaaataaaaatgaaactttattcttagattgactatcgagctagattgctaaatactactaatagcaatgacaacagtcgcaacaccaatcatatatcaatatcattacctatttagctaatctgatcaatttcatgtgtgtaataaatgatcttgtcaaaaactaatctaaaatctctttcaatctaatttacactgttacagagagaaataatataacaataatattgggaaaaaaagcagcagaagaaattaaataatttttaatccaaaatccacaatgcaacccaatccagaccaatttttttgggtcgggtcattccaactgtttcttacttaactataacatgtcacttaattatatgacttcaatttgatgaaatgaataaactttcttgacttgatgcataatacagaattgatttgttactacgttcatactaactgtagtgtaacaacaccaatcttttcttgttgttttcaatctgcagca

SEQ ID NO: 9167 - DNA, 2705 bp, Citrus sinensis
  Intron number 3 from transcript orange1.1g002310m (locus o range1.1g002310m.g) derived from phytozome v7.0 (chr-ID sc affold00336; pos 42969 to 45673 reverse strand)
tttgactagttgtggttttaagtccagtcttcgaggtaagaattttatgagcatccatttttgtttttgtctcttgactacgattggcatacaccttatcaccaaccaaaaaaatttactaaaaaagtttgttaaaagtttaaacttttgtaatctattagttttacagctatagagaagtcaatgcagaagagaaagatcttttagataatgtattagaacttaacaatcgttagtaacattgcatgttcttgacattcttgacttttttgacttgttcaaatgctgttacttgggattccggttctgttagatccacagtcctgtgaatattggtagaactttgatgagtatctagaaaaaaggcttactaatagcatcttgcggcttttaattgttgtttatccatacgattcatgtagtagtccctagcagaggagaacagtccactggtggatattgtcactgtagacatgtttatggtccataaacttgcatgtgtgcatctttttgaacatatatgctgctgagtatcagctctaaaatgtctgcttccaaagtatggttctcaggatgctgtcttttaccttttaattctctggtgactattgtgtaaaacagttattttgagtttcatttgtcaaagtattggacttcatgttaatctttgttcatgttgtaaatgcgaggatagccaatttcaggaagtttaagtggtataggttatgaagcttccacttgtaggagatggaaaaaagataggcaaattgtcaattttttaatgtacaacagtacacaagttgtttgtcatatcatgtgtatatcagatcaaagaacaagtttgttgttttttttttttcctccaaatttttgggtatctttatcaacttatgcattagagcagctctatctgtgacttagagtagatgtaacatagttaaatatacagagggtttcatgtgacttatgtgaagcttggtcggtaactggcaggtgagggagctattgaatgagatatttcaccataataatgcaaaatataattttagggagaaatcatagttctttgtggtatgtctgtaatttattgagtttaattgcaaaagattgttgcaaatgtcattccagtatttgagatgtcgaaagataggctacagagtcattattaattctacaatttctccctttaataggtgagttgcagcagctacttggggtggattgttggaatggaagtctggtgctaaggagccatttgctttctagaatttattctcctcaatccaagtttagcaaatttttaagtgattgacaggaactcaaattttttattcttgaaaagttgattgtagattatttttgagagttgatactactctcatcttgtatttttcattgggaaagttgatattggtttatatgaatatgatcatcataacatatctagtatattttcatccttttgaagtttgtgctctgcccttctccagaggttttgtataagcttttccgtttggtgaaaatcgtctttgtcattttatgcctgtgtagttcttttccttccgtaataattgtagaggtactaagtgttgtagtctttagaaaaccactaaaaatttgagctacgtgaaagctttctttcaactgaacatgctatcactattatagattggatgttcaggaaaagttttcctggttgaaatttattatgcaattgataattctaatctttcttcaattgtagatgtcataaagttgtctaatttttgaacttttgagcctggcttggaaattcatttattttcattatgatttggttataaatttcattgcatttctatgctcgcacttgtttccttttcaattctttattttttatttttttaactctcttccgccttttttttagatcataccttttaggataaatctgagaaatacgactttatgtatttcaaaaaattgttagtaagtctgatttctggccaaacaaattaatatattgaaaaatgaaagtaatataactgaaccttcagtagctaataaaattttattcttgtatattatcaaataaaataaagaaatatttcttgaatttgagagcacattcattgtaaatgttaatggtatttttgttggttacaggacattcattgtggcaagaaatgatttatgtctttgtggagctagaataggttttcattgtgggtgattttgcattagaagttctgttcacctcttgttaatcttggttatgcccatgttcatggctgtttcttcgattatggcagggtgataaccaattcattcgatttgctgatgttttggattgtttgtctcctttctattttggtgtaccctagtattaaagcagttgcgtgtaattcttagccagaatttggacattattgcaccttcctaatgccatacaatatccataaatgggttctggtacctgggtggaaagttttgcattgaaccaaagtattatttattttattgtatgtttaatatcctgaactggttttaacttcactaatgtgtttcgaatttgaaagtgactgtattcttatatggatttataccgtaaaacctttttcttcttgtaataaccattgtagctgggtttagtttattaagtgtttgcacttctatttacccatctgagtaactgctcaattgcttctcttctcctttcgacagat

SEQ ID NO: 9168 - DNA, 1750 bp, Citrus sinensis
  Intron number 1 from transcript orange1.1g003304m (locus o range1.1g002661m.g) derived from phytozome v7.0 (chr-ID sc affold00067; pos 338621 to 340370)
cttctcgcatactccaactactacgaagcctctcggtacgattaaacttattttgcttattttcgcttgattattctcttccttgctgtttccatttttgaacttctttgttgcttcgattttgacttctttctgcttgagccaagtcttaatcgctgttttgcgattttgtattttgtggtttttgtactgcattgtttccacttttgtgttcatgttcgtagatcgtcttctgtacttttttttttaattcatttttgttcgcgtatacgaccaaatattcgtcatatttgttaattacattttgtattttttttccttttaaacttctgttatgaactcatctggtagctattttttttttcctcgtgtaatcaatttgttttacacaattttttcgcatggatttttgcttaagttttttgtgcgtgtgtatgtctatgtgtgtgtttttctttttattttttttttacaatatttaaattcaccatagtcgtgagtttaattttgaactagcacgtgtggacgagatttctttcgttcgattttctgtatttttttctcaagaaactgattctgcttgttttaactttttttttagctcaagtgttttgtgtttccttttcttttgaaaatttaagttcattttattctcgagatgtttaattttgaactcacatgtgtagatgagattcacactgtttggttttcggtacttttcattaaccattaattttttgccatgatgtgaatttttccttttttaattttaactatattgtctttcttatgttgtccttggcagttcattaaccattggcactttgtgcttgccccatttttccttgctaaatggaggtgcccatgactgtcctcatggacttcatcattccatctcttttatacttttttgttacatatatttattatgtatatgcaatatgcttttgtatgttagtacgtatatatattcaaataacacgtgaggttggatgaatttgtttgtgtttatgtatacatatttttttatatatttaagcaattaatccatagagacacatgaaatttgatcaaaatagtatgggtgtccgcctgttgtgcttacatgtaatgagtgtacagcaatttaatctatgaactcagattatgtaaattatgaaatttctgttctgaactcatattacaatttcaggattccactacttgaaacttcggtctcacaatgagttttcccgagagcatgtattcaagtattagagctaggtgtactgtaattatatgttcatttttctgcccttctttgttggatctcggtgtttattttgtttttggtttctggtaaaggcatgcaatgccctgttatgatacacttaatcaatccttgtggtttctgttttttgttttatttttcagaataatactttaacacgacattcacaaataaatatgttggatactgtgtttgtactggatttgtttttgtatgagtttcagtttagttactttcatatgattgaggatatgacttttacaattactttctagttgttttacctcgaagaatcctgccttgttattttgaagcttcttcacattgggctgttttctttagtgatctcatgagaattatctccatgttgccattatgtaatatttctattggaatttatgtgtgtaaagtccctttaagtgtttccttaattcataattagcccattttttcaacttatttctctctctgtagtagaag

SEQ ID NO: 9169 - DNA, 869 bp, Citrus sinensis; identical to SEQ ID NO: 9078
  Intron number 1 from transcript orange1.1g016440m (locus o range1.1g006877m.g) derived from phytozome v7.0 (chr-ID sc affold00259; pos 55735 to 56603 reverse strand)

SEQ ID NO: 9170 - DNA, 2463 bp, Citrus sinensis
  Intron number 2 from transcript orange1.1g007717m (locus o range1.1g004351m.g) derived from phytozome v7.0 (chr-ID sc affold00100; pos 37069 to 39531)
aagagttcaagcaggtttagtcctctaaacaatccttattcacacaatgtgcttaattttggttatggtcattatttatgctatgtttggtgagaggaattggagaattaaaaaaaaaaagttcaactgctgagaatagttacattgtatatacactcaacagatctgtgctcattagcggtaaaatctacctcatagatatatttactcccactaatattgaggaagatatatctacttccaacatagtttatggacggggattaagttgagacaccacataggcaattggacaatcatctaggggagttatcttatcatgtttgagtaacatgccaatctttgatttttttataaggaggaggttgtaactcttttattcaagggttgtatatcttgcgaatgttctaaaatagaaaccttttgaatattgatgaaaagaaggccaagaagaagtggaagcaagttatagattctagagaaagtgatatggctgaaaaagtttgtgatcttggtagcgaaactgaaaatcttgttatcaaacaaacattgacagcaacaaatcatatgagtagacatttggctatgaaccaattttttcaacctcataatgcctaccatgaaaagtgtgttgaataacttttgaagctgcaaaaacgtgatagctgggaaggaaaaaaaaaagctacagttgacgtaagaaaagcacctccaaccctataaaagtcattcagtaaaggctgtgaaactccaatcaaataaaggttcttgatgcaatatttaattgataagtacgaagataagattggtgtggtgaatattcttctaagggatgcttatcacaatctgctcagataaacctgcaattatgattgcaatgctgtcagaatggcctcaactaaacatttcctcttcaatttaatggaagaaatatgttttttactcgtttgatataatttcgaactaaagcaaaaatggacatgtcctcagatatattatccttgcagtaattagaaaaggtacatgggaattagaaaacatttcaaatttattggaagaatatgttaatgtgatgtctgaagagttaccagatggattatgactactaagtttaacatgtattgatttgttgaaaggaacctataaaatttttagaaccccaaaagaaccttgccattcagaaccaataaaaccccgaatagtcaaaagtccttgttctcttgctgatcttttcagctagaaaaagatgagaggtactcaaggcattaataagctaattgattaagtgcctatatttacaatggttaatagaatgctagatactcttcatactgcaaaattgttctttcaatttgatctttagaagtggtattgtttgttaagggctaaaatttggaagattacatgccactttctatgttactgagatctagttttattcttagtgctgcatgactttaagcactgtagtatatcaattttaatacattactgtccctccttcctaacgccccctcccctttcccccacctttttcctcttctagatttttgtactactgatatgattttttataactgctgcttttggaacattttgcaatcaaagtgcatggaagaagttaacttgtctactctcaatttttttttttcttttccccttctttaattttgacgatgccgaaactgctaaaattttcatggcatgaaattaaagaaacattagctatttttcttcttttttttttcattttctcttctacagcttttatttcaattttttaattcatttggatgtttatgttggtttgtgttctttagccgaagcatgattgtatgatacttacacgcatacatgaaaatttatattttctaacttttatatgagtccataattttatgtatccaaaatgctatttttaaattcatttatttcatgttgtataaaacctaattcctttattttttataaaatttcttagctgatataataaatttttaaactttatgcatttagaacaaagtaacaacaattttttttttcagttatttattaatgtaccatattattcaaaaacatttgttcacatcttgtcaagagcctaacttaagctcatttctaacacaaatccaagtatattaattactattttaagatgctcttgatttttaaagataaacatctgaacacttaatagtcagatattacaaaaagaaaaacaaaaatacattaagatgtttgctttttgagctattcaaacgtatttatatttcagatacaagcacacaggctgcattagctatctgaaagtgtttatttatgttggccttgcatttatgaatttatggtatttaggatttgggatgttagactttgttaatggtcgattttcttgatttaattatttctacacccctaaatttttaagcgtactttgtagaacaggctatattcataagagag

SEQ ID NO: 9171 - DNA, 1741 bp, Citrus sinensis
  Intron number 2 from transcript orange1.1g034791m (locus o range1.1g034791m.g) derived from phytozome v7.0 (chr-ID sc affold00377; pos 44989 to 46729 reverse strand)
tgtgctgaggtaagtttcattttccttccattttgctatatttaattgttaatagaagtggttctgtagaaagttcttctctaatgggttccttttttgagtgaatattatgcttagagaatttttgtcgtgttgtttgctggaatagattatgcatatttgtagtgtctttttatgtatgtgattttttataaagcaggtttaggtgtttttacagaaagcgcttttatttgaaagcacttcatgtcagataccttatggtaaaatgctaatgtgagattatataggtgagtatgaagagcacgcatattttgaaatgttttaggatatgtgctttcaagaaagagcgttttctgtaaaaatacttgcaactgttttataaaaaacacttatgaaatgttcttcaaaatgcagttaaagtacttttagacctcagttgcttttaaaaaaagtagttgaaatgatttttgggatcaaaaaagttgttttttctatttcagccgagcactataaaatagatacaatatacttttggtcttttaggattgttttggtagtgacaataacctagcagaacacaatgagagttgctaatgtgacactagtctctttgagattctgagtgaataataggggaagagcaggtcttatccctcttaattctgaggaagagaagttaatacaaacactaatgtttttgaaattctgagtgaataatgagggaagagcaggtcttatcccttttaattctggggaagagaagtgaatataactttctttacgattgagttctgattttatagtcttgatgataattttaatttgtttcactaaataagttactgatagatagataagatagcataatcaaactgtatcaatgattgttttcgtcattgtgtaaataatgtgttaggatgggtaggatgttgtggaaaagataattgaggagttgtttgagtgacagtttgatcatcgaattgggaaaaatctttggtgaatgtaaggtactgtgggaggttggctctacgatttttaaatacttgacctgtttttgtgtctattttatagtgtttaattgtaattttttaaaaaatgtaatttaggagtactttccagatatatgtttctttaaaagcctttttttttagttgaaacaactttgaatataaaccttcttcagttatatttttatggtcaaatactaatcagtttacgtaactatagagcttttgagtatctggtagaataccagcagcactcacaaaggtgcagttgatatgtaggtgcatttgggcatgtttttgcaaggagtgcttttaaataaaaccactttctgttttataaaagcaccttgaaatgtttcttcaaaatgcacttaaaagttcattttgacctaagaagcattttgttctaaaaaagcatgtatcctgtgcttatttaaaagtgcacctcttgctttttcagaccaaaaaggtccttctatcttatatctatagggtgaaacttaacttagcatcagtctctttgaaatcgttgaactatacgtttgcccattagataattgggggatgttggaacagaaggtctaatcaatttctacagtgaagacgagaaaaaattaaccatcaagttttaaacttagtcttgatggtaattttgtattttttggcttaaatcaagtgactgaagacattgtcgatcagattattgaggagtttcaaaagtgccacttggatca

SEQ ID NO: 9172 - DNA, 723 bp, Citrus sinensis
  Intron number 1 from transcript orange1.1g044901m (locus o range1.1g044901m.g) derived from phytozome v7.0 (chr-ID sc affold00255; pos 208878 to 209600 reverse strand)
cagctggtgttgctggtttcactgcctcttattgggtaagcttcatcaatatgttcttgaccacatttgatattgaaagaattaataaataaaaatatgggaatattaagtgcttgatattggcacaaattaagtttaaacttttacattaaatatactaaagtagggcgagatattcaaattctactcgtaataatgatgataatcgagtgtagtatgctttgcggatttgcacaatggacgctatcatatatgataaaatctgcagaatcgtggaattcactgtaaatataattagtagatgtgaagtagtttaattagtgaaatcttttataattatataaaactaaaattcactcacatgagcattcattcttttaattatgaataataataataataataataataataataataataacaacaacaaaaatacaatacatcttagttaaaatatacaaactaaatcatttattaaaaaaattgcaaattcttcagcaaagggtaaaatatcgcatgatgttgttgattaaaaaatatgtcaatttatgatttgtatagaattcttggagatagtttcaattttggaggaaagggagagttcataaagcatacaatttgttgttttctatcgtgaacgggaatagtctctttaacgacgacgtttaaactgctaacccgttaggttggtcccagatcggataaagacagagagaagtt

SEQ ID NO: 9173 - DNA, 1842 bp, Citrus sinensis
  Intron number 2 from transcript orange1.1g004439m (locus o range1.1g003865m.g) derived from phytozome v7.0 (chr-ID sc affold00028; pos 1004670 to 1006511)
tcggtcatccggtgggtatcaaagcggtccatctggtaagtggttaactgctttttaaccgctacagtttcaaatttatgatctgatttggtcctcctgtactccaaatgttagtactgtttttttaccgagtaatttgttaaatagttagcaaaatatgcgatgaatattctttgcatttgagttttctgaatcattctacattctcaaatacactggtgttgttctatatgcatctctctcttactcaccagatgaccctaattaggagatttcatgcgaaagggaaaaaggaaaaaaagaaatattgaaatacttgttttatgggcttgcttttattgctagtctgagttttttatgccaaaaaaaaaaaaaaatcacatctatactaaatgatattttgttggccaaaggagcatgtaatttatacctaattgacgtttgtcagaagagcattggaaaaaggtgtcctattgtaggagtgtgcatgtgttttagataaggaacagactttcatagaacaattctgtggtttacagtgcctttgtttaggcatgttcattttagcatagtgaccaatgttagtcctggcttgatataatcacatagatgatgtgtgtatgtatgcatcggtctggttgcatgcttcttgttgcacatattttcaatttttcatatgttgtgaaattttcttatcttattggtcaattccttttcaaagatgggtttgtcaaattattctggttagtgatatacttaaaatggacctaatcaagcatgtctgttggacatggcacgcacatataaattgtaatgtgtgtttggatctttgacatggagcatctactttggttttcgactcaaggcattattgctatctggtgcaacatacacctgtagttagttcaaattggtggtggtgctgaaacttattcttgcgtgcttcgatatggcataattttgaaaatatcgacatgcggaaactgttatgtgacattctgaacttagatggtgtaggattatatggatatgaactaccctacgatttgtgataggtctcctattgagatttggtgtatacatttaattgtatgtccttctgaccacatatatacattttaactatatgagaatggatcttcatttgccatgaacatgtagaaagaaaattgataatataagatttcggatcttatatgattacatctttgtagcattcttggttatcggatcttatatgattacatctttgtagcattcttggttattagtagcttgtatgtaatattataaatatagcttttatggatatgcttggggcagagtgttgcaaaattccctatcacagttattattaaaatacgtgtacagcatttgcttctgcaccatctgtaggaatgagaacatgttaaaaaatatctaaggaattctgttgcatattgcaggccatatgtgtggtgctgatttgacagatgccatagtttataatctaaatctcattgttattagtagctcgtatgtaatattataaatatagcttttatggatatgtttggggcagagctttacgagaacagtttgattttaattttctatcacagttattattaaaatatatgtacagcatttgcatctgcaccatctgtaggaatgagaatatactaaaaaatatctagggaattctgttgcatatcgtaggacgtatgtgtgattctgatttgacagatacaagagtgtataccctaaatctcgttgctgttggcaatttctgtagtggtgcagaaatgtatatagcattcatgtttgtttttctagtagaactaattcagttacttttgcaga

SEQ ID NO: 9174 - DNA, 4109 bp, Citrus sinensis
  Intron number 1 from transcript orange1.1g047796m (locus o range1.1g047796m.g) derived from phytozome v7.0 (chr-ID sc affold01263; pos 17063 to 21171)
ttcttactattgcggctgaacgatccgttgctttggtatgaatttcttttaccaactcctcttccttattaatattttatgcttagaagtaaattaatactagaaaatagaaccgtgcgtggctttgaaagacaaaatttaatattattcttttttcttactttgtacttgataaaactgataaaaaatatgaattgattttttttaaagatgaggcgaccttataaaactaatgttatttatgaaaattaattatttttttgttaactttaaaaatatatattaatgtgtatagtgtaagtgtatagaccttataacttttgtagttgttgggaaattctaaattatattcaacttgctaatctgttagaacttttatatctcttttttttttccaaccaactccaaaaaatctcaatatcacccacaccacataaacttctgaccacatctataatattatggaaaaataacataaacatgttaaaagataaggatcaataatttctaatatacacttaaagattaacaaacattaataattaaaaaaatacctgagaggattgtgttatcattcacacgtatatcaatcaaattcgtagatatgaattggaatccattgattggaatcttaacggtttcttttataaccaataaaataatattatactgatttgaaagtgatttgtactcgcctatagttgaaacaactttcaaattcttgacattgtataaagaaccctcacttaacatgtgcctaaacattgtcactaaatttttcctaattattgcatgcattagattttcctaaaaaaaaaatgctacattaagtgtaaaaaaattggaaaaaaaatagagaaaacaatgggagaaggaaattttatacaacattttcatcaataaaaatcatgttcacactaatcaattctacattcttcttggtattaacatactcccacatcctacaaagcctaacacttatcatccaattatctttatcatttttcaactcatgaagaaaagagtgctccacgaagcacacaatactaaaaatttaaataagtcaaaaaataaaaacacatgaatatttctaaagaggatgttggttaaataataaaaaaaatctcaaacataataaatcttaaatacttaatgtttatagaatttgaagaagtcaaaaggcaccaaacaaaaggttgcataattaaatatgagattatgacattaaaattaagccctaaaatcattggtgaaggaagatgaatgaacattcattcctatattaattagttgatatattttaagccactaaagtttagttgttggcttaataaaataaatgaatgtttcgagacttataattaattattattaacagtaacatattgttgaatttaaataaaaagaggaagagacatgtaatcttttgtaatctaataattattttttatttttaatattttgtaatgtaattattttttaatctcaaccaatatattagataatgaaaatataaaaagataagaaataacgatgccacaaatattaaatacttaatgtttataaagtttgaagaagtcaaaaaacactaaacaaaaagttgcataattaaatataggattatgacattaaaattaggctctaatgacattgctgagagaagataaaggaacattccttcctatattaattaattaatgtattttaagccattaaagtttaattgttggtataataaaataaatgaatgtttcaagacttataattaattattattaatggttacatattgttgaatttaaacagaaagaggaagagacatgtaatcttttgtaatctaataattattttctatttttaatattttgtaatgtaattatttttttaatttcaactagtatattagataatagagaatataagaagatgagaaatagtgatgtcacattacctgttgtagtctcaactttatatatatactaggaaataaaaccgcacttcgcgcggttttgaaaaaaaaattaatattttctaattaatttttcttgtgaatgcgttgaataatctctaagtgctataccctttttcattgtacttttaactgtttttcttcaacaaatattggatgtattcattgaaaaagaaaattaaaacttagataataaccaataagattagtgaagtcaaactgttaattaattcttatgataaaacaataactaaaaaaatgtatagtcatagttttcttgattatattcaacttactactttgttagaacttttatatctctttttctccaaccagctccaacgatctcatatcactcacaccacataaaatttcgacaacatctgtaatattatagaaaaataacataaacatgtcaaaacataaggatcaataatttccaatatacacttaaagattaacaaacattaataattaaaagaaatacctaagaggattgtgttatcattcacacgtaaatcaatcaaattcggagatacaaattgaaatccattgatcagaatcttgacagttcctctactaacctcctaagcaaagttataaccaagaaaataatcttatactaatttgaaagtagtttgtatccgcttgtagttgaaacaactttaaaattcttgacactgtacaaagaacccttacttaacatatgcctaaaccttgtcactaaatttttcctaattgttgcatgcattagattttcctataaaaaaaagttacaataagtgtaaaataattgggaaaaaaaaggaaaataataggagaatgaattttttatacaagcttttcatcaataaaaattatgtccacactaatcaattctccattcttcttagtagtaacagactcccacttcctacaaaggctaacccttatcattcaactaaaaattcaaataaatcaacaataaaaacaaaagaatcttttctaaagaggatgttggttaaataataaaaaaaaaacttaaacataacaaatcttaaatacttagtctttagagagtttgaagaagctaaaagtcactaaataaaaggttgcataattaaatatatgattatgacattaaaattaggttctaatactggcattgttgatggaagatgaaagagacttcctatattaattagttgatgtaatttaagccatgaaagtttaattgctggcataataaaggaaatgaatgtttcaaggcttataattaattattttaatggttacatattgttgaatatattagataataaagaatataaaaagatgaggaatagtgatactacataagctcttctagtcttaactatatatatatatatatatatatatatatatatgggtatcaaaataagtgaacagaataatggtaaatctttgcagtattaatgtaatttttaattattttttcaattaataacaacccctataaattaaacatgtttttatattatttttcaattaattaaataacccgtaagttcaactttacccttagaagaatacattaattaaataattattcacatagaacaatgtgcaagatctgagtccacatgtttagcctttgatttaagtgaagagattcatagttggacccatcattattaaattgggacgacgcaatggactccattatttaaaaggttcggctacagtgcaactgtgatactgtgctacagttacattcagccgttggatccacttagatgagtggagtctattagaatttaatggctggatgcaacagtagcacggtaccatatttgcaccacaatttttcccttatttaaaaggggtgacttattgactatggtgcatcagctacactgtgtggtaccaaaattgctacacatatgtcaatatagtgattattaagggataaattgttactgacagtgagacactttttactgcgctggtgcatcgtagcaagtccttagttttaaacttaaaagttttcttcttttgttatacgacaaagttttgattcaacggctagcaaattaaatagtccgccccaaacgcacatctcttaagattattgttgattttgagtgaatggcttttggttacagtcagggggtccgtc

SEQ ID NO: 9175 - DNA, 2764 bp, Citrus sinensis
  Intron number 7 from transcript orange1.1g006182m (locus o range1.1g006181m.g) derived from phytozome v7.0 (chr-ID sc affold00206; pos 130937 to 133700 reverse strand)
gaggtgggaatcactccaggagatattgatttaaagtaagtcattttcttgatatttttattgtgttataaggttcaatgggataatttcccttagaaggcctctgtagatttctttagaccagaaaggttaacttttactacctagggggctaatcttttgggtggggggggggtgggttttggtggggaagcagtgttgagattcaaaaaggatagtctaagggggttattgagtcaatacttacaacataggttgattctaaaggctgatatgttttatccctgtgggagggggtcacacagttagagccaacaaggaggtgcttaaagccttggggatcctgttgctgcaactgtagtaattgagtgtttgttgctcctgttccgccttattcttcttttttctgtttataccaacttgtgatatttcttcatgctggaatgttatggctgaaaactgggttatttgctttgtgtccggctgagatgggcatgagtatcatcgtatatttcccatcctgctgtggctcagtttaaaagtcaattcatcattgtgggcattctagttttgtgctggaatgctgtttcaccaaagatattagttctcatacaaactaatcagttaagctttcaacatatgatattatgcaaattatgaacccaaagctttgacttttaaactgcttaaaatttttctttcaatatttattcaactaacattttttagtacattaattgactttatcctagctgtgtagattttaaattctcattatataaatagttgatgagtagtctggatatgatagtaattgacattttggctgcaattttgtttatagatctggctgatggctttgacctagtttatggacacaaatcctctcttcttttctggaaacccatcttctggttttgatgaaaaagtgttttcatccaggctcactggtttaatgggaaaattattgataagcttagcaattgggtactcatgatctaagatgtttatatctagcaaatgatatgtcagtgaatatatatatattttttttggcaaaaaacctttcgaatattggttaagacttaatcaaacaatgagttcaatatgattttgaaatattggttttaaatcatggtatgactcttttttattttgttatatgtaatcatctttaaccgcaaaaagttgaaaaccatggttctacagagagatttcgttttgcaatgctggttcggttatgaatagatgttatggatgagctaaatgagaaaaatgattttctaacctgttgttattgtcataaattgcaaaatctcaacaattattaaaacaattcctctacattccgatgttgattttggcagtgtcaaatagctttcaccttagcatagattagattttggcggtgtcaaataacttcaatgaattatcttagctttctttttattggagctacaaatgctgttttgccttaaccaatgcgaaagggagttgttgaagaaaatattctggaaagtatacccttttctatattcagaattggttttatgttggcatcttcttaatactggaattgcatttatgtatattctgtattcatccttttgttgtaccaaatgagctcgaatgtcttctttgtgttctgactgctgactagtggtgcccaccagtcatatccctacatttataggatgtgattggcatttgaatagagtagaaaatgacactgcatttatgaacactgagtttagtttccttagatcatactgattgcctataagtgggtatgaacgaagtagaactacaattcgttttccttatttatttatctatattacttgtcttatattttttattgctctataattttattcctattccagcataagataattcattgtagtatgttagcagttaggtgaatgtcgtgaagttttctctgccttccattgaagtatgttagtagttaggtgaatatcattaagttttctctgccttccattctcaatggcctcttgtcccatatgggaagatttggaatagagatagttgacaagtaaaaatagagtagagatgaagtctattggggttgatgttttgttagaccaatgaaaacttatgttagacgcaaatataaagaggcaggggcaatttagtaattttaggggcggggacagtttagtgattttattaattagggttcaggtataaataagatattgtggagtcatttagggtttatgttgagttttgtctggtattaggaaccattaggagttttgggagagattgacctacttctcgaattgtaggtcaggattgattgtttgttttcttttgatttaatcaataaaagtcagccctaagtcctatcatgtttaagaggagatattaggtttttggtcttggatactttgagaatagaaagaagatagtaggcaatattccatagtagtacttgtagattgaagaattattgaacggcaacatttcaagtaaaatattctggctttagattgaaggcaaaaagtatgtcccttttgacccaaataaaatattttaaactaatcattaagttcgaacttgtaataagatttatgaacttgtatttttgctaaatttacatacagtcccttgatttatctactatctagtcctttcttttatttatttattatgagacacttgttgtaatcttttacctgcaccaattagaaactctgttgagcctttttttaatgcaggaaattgttgatcagag

SEQ ID NO: 9176 - DNA, 1592 bp, Citrus sinensis
  Intron number 2 from transcript orange1.1g025435m (locus o range1.1g025435m.g) derived from phytozome v7.0 (chr-ID sc affold00009; pos 188252 to 189843)
tgctttttgctaccccatccacgcctgctgctcgagtaatctcctttaattctttctgtctttatatacatattatatgtcaattgtcaactcttttaaattatgaattccacttgctattttgcaaatgccggcgatttttttcttttttttttgccggggagggggggggggagggattgggttggatgtggtgtattatccttttttgggtaacgtatagcagcaattagcacacttaacactacctcctctgttctggatgatatgtcatactaatacttaatacaccctacgacgtgtcacagggtgtagtatgacatctacatgtgttatcaatctcttgcttatttctaagtacgagaacaagaagagacgatgacactttcattcctcttcaaatttgtttttattatctgggtctttcataagtttttgtacactgtctcgttccttgtgttaagacaatcaggaagaaaaattattgaaaaagattaaattttttgacctttaaattttgtttctttaatttctttaacaagtcattcatattcttatggtaaaggtacaaccaacccattattacaaattgaatttgagtggctagccaaacaaggaggctgaaaagccactcggccgagcccttaaaggcataccaaattaattatctaagacttcgacaaattaaaagtaattaatatttttccaaatttcacattttttctttgataatatatgtatttgttactaatttaacatcaatcaatagatagactattaaaatttatcaaagatctaagaggtaaaaataatttctaagagagatcgaagtgtcattctctcgtgcaagtattgcaattttggtagtttgagttatttcataatataattttcacagttttgaaaggccttatactatttgggtttttaaggccttttttgtttttttggcgattgtcaaagtgttgatagatgcttgctgttgatagccacctttgccttttgaagacatccgaaggttttatacaattgtttatttaaaaaaaaggaaaaaaatgaactccaaaaataatacccaaaccgaaccctccacctcttattcgtagtgctttgctagatagtcataaactggcttctatttcactgcagttttacctttgaaagcctaagtcaaggaagtctaccacactattacattttgatcagttgcttcatatttagtctaattagactctccttaatttatagctaatgtcggtttaacttaatttaattgtacaagagcttaagcttttggtaaacaaaatcgttgatcgaatttgatatggcattatattaatagctagtaattcctattctgtgtatgaaaatttaaagcaccttattctcatatagttacagggccttaatcctttatagaggaatattaggactgaaaacctttgcactgaacatggagagactttgaaaagtttttggattatttggctccttgctgtcccattttacattataatgttcttctcttgagattaagtgattatcatacattctaaactaatcacttactctcgcaatattgcagaaataca
